(19) United States
(12) Patent Application Publication
(10) Pub. No.: US 2020/0032265 A1
(43) Pub. Date: Jan. 30, 2020

(54) Oligonucleotide Probes and Uses Thereof

(71) Applicant: CARIS SCIENCE, INC., Irving, TX (US)

(72) Inventors: Tassilo Hornung, Phoenix, AZ (US); Heather O'Neill, Mesa, AZ (US); Mark Miglarese, Phoenix, AZ (US); David Spetzler, Paradise Valley, AZ (US)

(21) Appl. No.: 16/337,367

(22) PCT Filed: Sep. 27, 2017
(86) PCT No.: PCT/US17/53830

§ 371 Date: Mar. 27, 2019

Related U.S. Application Data
(60) Provisional application No. 62/400,581, filed on Sep. 27, 2016.
(60) Provisional application No. 62/456,044, filed on Feb. 7, 2017.

(51) Int. Cl. C12N 15/115; C12Q 1/70; A61K 31/7088

(52) U.S. Cl. CPC C12N 15/115; C12Q 1/703; C12N 2310/351; C12N 2310/16; C12N 2310/321; A61K 31/7088

(57) ABSTRACT

Methods and compositions are provided for oligonucleotides and libraries of oligonucleotides that bind targets of interest. The targets include cellular biomarkers of viral infection. The viral infection may be that of human immunodeficiency virus-1.

### RELATED APPLICATIONS

[0001] This application claims the benefit of priority to U.S. Provisional Patent Application Serial Nos. 62/400,581, filed Sep. 27, 2016, and 62/456,044, filed Feb. 2, 2017; both of which applications are incorporated herein by reference in their entirety.

### SEQUENCE LISTING SUBMITTED VIA EFS-WEB

[0002] The entire content of the following electronic submission of the sequence listing via the USPTO EFS-WEB server, as authorized and set forth in MPEP § 1730 II.B.2(a), is incorporated herein by reference in its entirety for all purposes. The sequence listing is within the electronically filed text file that is identified as follows:

[0003] File Name: 37901833601SeqList.txt

[0004] Date of Creation: Sep. 27, 2017

[0005] Size (bytes): 4,445,295 bytes

### BACKGROUND OF THE INVENTION

[0006] The invention relates generally to oligonucleotide probes, which are useful for diagnostics of cancer, viral infection, and/or other diseases or disorders and as therapeutics to treat such medical conditions. The invention further relates to materials and methods for the administration of oligonucleotide probes capable of binding to cells of interest.

[0007] Oligonucleotide probes, or aptamers, are oligomeric nucleic acid molecules having specific binding affinity to molecules, which may be through interactions other than classic Watson-Crick base pairing. Unless otherwise specified, an “aptamer” as the term is used herein can refer to nucleic acid molecules that can associate with targets, regardless of manner of target recognition. Unless other specified, the terms “aptamer,” “oligonucleotide,” “polynucleotide,” “oligonucleotide probe,” or the like may be used interchangeably herein.

[0008] Oligonucleotide probes, like peptides generated by phage display or monoclonal antibodies (“mAbs”), are capable of specifically binding to selected targets and modulating the target's activity, e.g., through binding aptamers may block their target's ability to function. Created by an in vitro selection process from pools of random sequence oligonucleotides, aptamers have been generated for numerous proteins including growth factors, transcription factors, enzymes, immunoglobulins, and receptors. A typical aptamer is 10-15 kDa in size (30-45 nucleotides), binds its target with sub-nanomolar affinity, and discriminates against closely related targets (e.g., aptamers can be designed to not bind other proteins from the same gene family). A series of structural studies have shown that aptamers are capable of using the same types of binding interactions (e.g., hydrogen bonding, electrostatic complementarity, hydrophobic contacts, steric exclusion) that drive affinity and specificity in antibody-antigen complexes.

[0009] We have previously identified oligonucleotides and libraries of oligonucleotides useful for the detection of microvesicles in bodily fluid samples. Microvesicles can be shed by diseased cells, such as cancer cells, into various bodily fluids such as blood. Thus provide a means of liquid biopsy, including without limitation blood based diagnostics. We have also previously identified oligonucleotides and libraries of oligonucleotides useful for analysis of tissue samples of interest. Herein we report oligonucleotides and libraries of oligonucleotides that bind virally infected cells. Applications of the invention include without limitation theranostics (e.g., predicting a drug response) and diagnostics (e.g., detecting cancer samples). As the methods of the invention provide aptamers that specifically recognize diseased cells, the aptamers themselves can be used in therapeutic applications.

### INCORPORATION BY REFERENCE

[0010] All publications, patents and patent applications mentioned in this specification are herein incorporated by reference to the same extent as if each individual publication, patent or patent application was specifically and individually indicated to be incorporated by reference.

### SUMMARY OF THE INVENTION

[0011] Compositions and methods of the invention provide aptamers that bind biomarkers of interest. In various embodiments, oligonucleotide probes of the invention are used to detect the presence or levels of biomarkers or other biological entity in a biological sample. The biomarkers may be related to a disease or disorder, e.g., a viral infection or cancer. In other embodiments, oligonucleotide probes of the invention are chemically modified or comprised within a pharmaceutical composition for therapeutic or medical imaging applications.

[0012] In an aspect, the invention provides an oligonucleotide comprising a sequence selected from any one of Tables 20-23. The oligonucleotide may have a sequence comprising a variable region according to any row in any one of Tables 20-23 having a 5′ region with sequence 5′-CTAGCATGACTGCAGTACGT (SEQ ID NO. 3) and a 3′ region with sequence 5′-CTGTCTCTTATACACATCTGACGCTGCCGACGA (SEQ ID NO. 4). The oligonucleotide may comprise a sequence according to a row in Table 24. The oligonucleotide can have a sequence comprising a variable region according to any one of SEQ ID NOs. 2922-21424. The oligonucleotide may comprise a sequence according to any one of SEQ ID NOs. 22832-22843. Substitutions, modifications, additions and deletions in the sequence can be chosen such that the oligonucleotide retains or improves upon desired such as stability or target recognition.

[0013] In some embodiments, the oligonucleotide is capable of binding to HIV infected cells. In some embodiments, the oligonucleotide is capable of binding to T cells. The T cells can be infected with HIV. The HIV can be latent or active.

[0014] The invention further provides an oligonucleotide comprising a nucleic acid sequence or a portion thereof that is at least 50, 55, 60, 65, 70, 75, 80, 85, 86, 86, 88, 89, 90, 95, 96, 97, 98, 99 or 100 percent homologous to an oligonucleotide sequence described above.

[0015] In another aspect, the invention provides a plurality of oligonucleotides comprising at least 1, 2, 3, 4, 5, 6, 7, 8, 9, 10, 11, 12, 13, 14, 15, 16, 17, 18, 19, 20, 25, 30, 40, 45, 50, 55, 60, 65, 70, 75, 80, 85, 90, 95, 100, 110, 120, 130, 140, 150, 160, 170, 180, 190, 200, 300, 400, 500, 600, 700, 800, 900, 1000, 2000, 3000, 4000, 5000, 6000, 7000, 8000, 9000, or at least 10000 different oligonucleotide sequences described above.

[0016] The oligonucleotide or the plurality of oligonucleotides provided by the invention may comprise a DNA, RNA, 2′-O-methyl or phosphorothioate backbone, or any combination thereof. The oligonucleotide or the plurality of oligonucleotides may comprise at least one of DNA, RNA, PNA, LNA, UNA, and any combination thereof.

[0017] In some embodiments, the oligonucleotide or the plurality of oligonucleotides comprises at least one functional modification selected from the group consisting of biotinylation, a non-naturally occurring nucleotide, a deletion, an insertion, an addition, and a chemical modification. The chemical modification can be chosen to modulate desired properties such as stability, capture, detection, or binding efficiency. In some embodiments, the chemical modification comprises at least one of C18, polyethylene glycol (PEG), PEG4, PEG6, PEG8, and PEG12. The oligonucleotide or plurality of oligonucleotides can be labeled. The oligonucleotide or plurality of oligonucleotides can be attached to a nanoparticle, liposome, gold, magnetic label, fluorescent label, light emitting particle, or radioactive label. The liposome or particle can incorporate desired entities such as chemotherapeutic agents or detectable labels. Other useful modifications are disclosed herein.

[0018] In an aspect, the invention provides an isolated oligonucleotide or plurality of oligonucleotides having a sequence as described above. In a related aspect, the invention provides a composition comprising such isolated oligonucleotide or plurality of oligonucleotides.

[0019] The isolated oligonucleotide or plurality of oligonucleotides can by capable of binding to HIV infected cells. The isolated oligonucleotide or plurality of oligonucleotides can by capable of binding to T cells. The T cells can be infected with HIV. The HIV can be latent or active. The isolated oligonucleotide or plurality of oligonucleotides can be capable of modulating cell proliferation. In some embodiments, the isolated oligonucleotide or plurality of oligonucleotides is capable of inducing apoptosis. The cell proliferation can be neoplastic or dysplastic growth. The binding of the isolated oligonucleotide or plurality of oligonucleotides to a cell surface protein can mediate cellular internalization of the oligonucleotide or plurality of oligonucleotides.

[0020] In an aspect, the invention provides a method comprising synthesizing the at least one oligonucleotide or the plurality of oligonucleotides provided above. Techniques for synthesizing oligonucleotides are disclosed herein or are known in the art.

[0021] In another aspect, the invention provides a method comprising contacting a biological sample with the at least one oligonucleotide, the plurality of oligonucleotides, or composition as described above. In come embodiments, the method comprises detecting a presence or level of a cellular protein or complex thereof in the biological sample that is bound by the at least one oligonucleotide or at least one member of the plurality of oligonucleotides. Relatedly, the method may further comprise detecting a presence or level of a cell population in the biological sample that is bound by the at least one oligonucleotide or at least one member of the plurality of oligonucleotides. The cell population can comprise diseased cells, wherein optionally the disease is a viral infection, wherein optionally the viral infection is HIV infection. In some embodiments, the at least one oligonucleotide or the plurality of oligonucleotides has a region corresponding to at least one of SEQ ID NOs 2922-2965 or 3007-21289 and the viral infection is a latent infection. In some embodiments, the at least one oligonucleotide or the plurality of oligonucleotides has a region corresponding to at least one of SEQ ID NOs 2966-3006 or 21290-22831 and the viral infection is an active infection. One of skill will appreciate that the nucleotides can be modified in sequence or via chemical or other desired modifications that still retain or perhaps enhance the detecting. Such modifications are envisioned within the scope of the invention.

[0022] The detecting step of the method may comprise detecting the at least one oligonucleotide or at least one member of the plurality of oligonucleotides. The presence or level of oligonucleotide may serve as a proxy for the level of oligonucleotide's target. The oligonucleotides can be detecting using any desired technique such as described herein or known in the art, including without limitation at least one of sequencing, amplification, hybridization, gel electrophoresis, chromatography, and any combination thereof. Any useful sequencing method can be employed, including without limitation at least one of next generation sequencing, dye termination sequencing, pyrosequencing, and any combination thereof. In some embodiments, the detecting comprises transmission electron microscopy (TEM) of immunogold labeled oligonucleotides. In some embodiments, the detecting comprises confocal microscopy of fluor labeled oligonucleotides. The detecting step of the method may comprise detecting protein or cells using techniques described herein or known in the art for detecting proteins, including without limitation at least one of an immunoassay, enzyme immunoassay (EIA), enzyme-linked immunosorbent assay (ELISA), enzyme-linked oligonucleotide assay (ELONA), affinity isolation, immunoprecipitation, Western blot, gel electrophoresis, microscopy or flow cytometry.

[0023] Any desired biological sample can be contacted with the oligonucleotide or plurality of oligonucleotides according to the invention. In various embodiments, the biological sample comprises a bodily fluid, tissue sample or cell culture. Any desired tissue or cell culture sample can be contacted. For example, the cell culture may comprise T cells. The cell culture may comprise HIV infected cells, e.g., cells harboring latent or active infection. Similarly, any appropriate bodily fluid can be contacted, including without limitation peripheral blood, sera, plasma, ascites, urine, cerebrospinal fluid (CSF), sputum, saliva, bone marrow, synovial fluid, aqueous humor, amniotic fluid, cerumen, breast milk, broncheoalveolar lavage fluid, semen, prostatic fluid, cowper's fluid or pre-ejaculatory fluid, female ejaculate, sweat, fecal matter, hair oil, tears, cyst fluid, pleural fluid, peritoneal fluid, pericardial fluid, lymph, chyme, chyle, bile, interstitial fluid, menses, pus, sebum, vomit, vaginal secretions, mucosal secretion, stool water, pancreatic juice, lavage fluids from sinus cavities, bronchopulmonary aspirates, blastocyl cavity fluid, umbilical cord blood, or any combination thereof. In certain preferred embodiments, the bodily fluid comprises whole blood or a derivative or fraction thereof, such as sera or plasma. In some embodiments, the bodily fluid comprises semen, vaginal secretions, cervical secretions, rectal secretions, breast milk, saliva, or any combination thereof. The bodily fluid may comprise T cells and/or HIV infected cells (e.g., infected T cells), e.g., cells harboring latent or active infection.

[0024] As desired, the method of detecting the presence or level of the at least one oligonucleotide, the plurality of oligonucleotides, or composition bound to a target can be used to characterize a phenotype. The phenotype can be any appropriate phenotype, including without limitation a disease or disorder. In such cases, the characterizing may include providing, or assisting in providing, at least one of diagnostic, prognostic and theranostic information for the disease or disorder. Characterizing the phenotype may comprise comparing the presence or level to a reference. Any appropriate reference level can be used. For example, the reference can be the presence or level determined in a sample from at least one individual without the phenotype or from at least one individual with a different phenotype. As a further example, if the phenotype is a disease or disorder, the reference level may be the presence or level determined in a sample from at least one individual without the disease or disorder, or with a different state of the disease or disorder (e.g., latent, active, in remission, different stage or grade, different prognosis, metastatic versus local, etc).

[0025] As noted, the sample can be from a subject suspected of having or being predisposed to a disease or disorder. The disease or disorder can be any disease or disorder that can be assessed by the subject method. For example, the disease or disorder may be a cancer, a premalignant condition, an inflammatory disease, an immune disease, an autoimmune disease or disorder, a cardiovascular disease or disorder, neurological disease or disorder, infectious disease or pain. In certain embodiments, the disease or disorder is a viral infection, e.g., an HIV1 infection. The infection may be active or latent. In some embodiments, the at least one oligonucleotide or the plurality of oligonucleotides has a region corresponding to at least one of SEQ ID NOs 2922-2965 or 3007-21289 and elevated presence or level as compared to a reference (e.g., a level in actively infected cells or non-infected cells) indicates that the viral infection is a latent infection. In some embodiments, the at least one oligonucleotide or the plurality of oligonucleotides has a region corresponding to at least one of SEQ ID NOs 2966-3006 or 21290-22831 and elevated presence or level as compared to a reference (e.g., a level in latently infected cells) indicates that the viral infection is an active infection. One of skill will appreciate that the nucleotides can be modified in sequence or via chemical or other desired modifications that still retain or perhaps enhance the characterizing. Such modifications are envisioned within the scope of the invention.

[0026] In preferred embodiments, such characterizing is carried out in vitro.

[0027] As further described herein, the invention provides a kit comprising a reagent for carrying out the method. Similarly, the invention provides for the use of a reagent for carrying out the method. The reagent can be any useful reagent for carrying out the method. For example, the reagent can be the at least one oligonucleotide or the plurality of oligonucleotides, one or more primer for amplification or sequencing of such oligonucleotides, at least one binding agent to at least one protein, a binding buffer with or without MgCl₂, a sample processing reagent, a cell isolation reagent, a cell isolation reagent, a detection reagent, a secondary detection reagent, a wash buffer, an elution buffer, a solid support, and any combination thereof.

[0028] In an aspect, the invention provides a method of imaging a cell or tissue, comprising contacting the cell or tissue with at least one oligonucleotide or plurality of oligonucleotides as described herein (e.g., HIV related oligonucleotides) and detecting the oligonucleotides in contact with at least one cell or tissue. In some embodiments, the oligonucleotides are labeled, e.g., in order to facilitate detection or medical imaging. The oligonucleotides can be attached to a nanoparticle, liposome, gold, magnetic label, fluorescent label, light emitting particle, radioactive label, or other useful label such as disclosed herein or known in the art. The oligonucleotides can be administered to a subject prior to the detecting. The cell or tissue can comprise T cells. In some embodiments, the cell or tissue can have a viral infection, e.g., an HIV1 infection. The infection may be active or latent. In some embodiments, the at least one oligonucleotide or the plurality of oligonucleotides has a region corresponding to at least one of SEQ ID NOs 2922-2965 or 3007-21289 and the viral infection is a latent infection. In some embodiments, the at least one oligonucleotide or the plurality of oligonucleotides has a region corresponding to at least one of SEQ ID NOs 2966-3006 or 21290-22831 and the viral infection is an active infection. One of skill will appreciate that the nucleotides can be modified in sequence or via chemical or other desired modifications that still retain or perhaps enhance the imaging. Such modifications are envisioned within the scope of the invention.

[0029] In preferred embodiments, such imaging is carried out in vitro.

[0030] As further described herein, the invention provides a kit comprising a reagent for carrying out the method of imaging. Similarly, the invention provides for the use of a reagent for carrying out the method. The reagent can be any useful reagent for carrying out the method. For example, the reagent can be the at least one oligonucleotide or the plurality of oligonucleotides, one or more primer for amplification or sequencing of such oligonucleotides, at least one binding agent to at least one protein, a binding buffer with or without MgCl₂, a sample processing reagent, a cell isolation reagent, a cell isolation reagent, a detection reagent, a secondary detection reagent, a wash buffer, an elution buffer, a solid support, and any combination thereof.

[0031] In an aspect, the invention provides a pharmaceutical composition comprising a therapeutically effective amount of the oligonucleotide or plurality of oligonucleotides described above, or a salt thereof, and a pharmaceutically acceptable carrier, diluent, or both. In some embodiments, the oligonucleotides are attached to any useful drug or other chemical compound, e.g., a toxin, cell killing or therapeutic agent. In some embodiments, the oligonucleotides are attached to a liposome or nanoparticle. The liposome or nanoparticle may comprise any useful drug or other chemical compound, e.g., a toxin, cell killing or therapeutic agent. In such embodiments, the at least one oligonucleotide or the plurality of oligonucleotides can be used for targeted delivery of the drug or other chemical compound, liposome or nanoparticle to a desired target cell or tissue.

[0032] In a related aspect, the invention provides a method of treating or ameliorating a disease or disorder in a subject in need thereof, comprising administering such pharmaceutical composition to the subject. In another related aspect, the invention provides a method of inducing cytotoxicity in a subject, comprising administering such pharmaceutical to the subject. The pharmaceutical composition can be administered in any useful format. In various embodiments, the administering comprises at least one of intradermal, intramuscular, intraperitoneal, intravenous, subcutaneous, intranasal, epidural, oral, sublingual, intracerebral, intravaginal, transdermal, rectal, by inhalation, topical administration, or any combination thereof. The carrier or diluent can be any useful carrier or diluent, as described herein or known in the art. As desired, the pharmaceutical composition can be administered in combination with additional known chemotherapeutic agents such as described herein or known in the art, e.g., cyclophosphamide, etoposide, doxorubicin, methotrexate, vincristine, procabazine, prednisone, dexamethasone, tamoxifen citrate, carboplatin, cisplatin, oxaliplatin, 5-fluorouracil, camptothecin, zoledronic acid, Ibandronate or mytomicin.

[0033] In an aspect, the invention provides a multipartite construct that comprises a first segment that binds to a first target and a second segment that binds to a second target, wherein the first segment comprises an HIV related oligonucleotide sequence described herein. See, e.g., Example 10. In an embodiment, the construct further comprises a first oligonucleotide primer region and/or a second oligonucleotide primer region surrounding the first segment. The first segment can be capable of binding to T cells. The first segment can be capable of binding to HIV infected cells. In some embodiments, the first segment is selected from any one of SEQ ID NOs 2922-2965 or 3007-21289. In some embodiments, the first segment is selected from any one of SEQ ID NOs 2966-3006 or 21290-22831.

[0034] In the multipartite construct of the invention, the second target may comprise an immunomodulatory molecule. In some embodiments, the second target comprises at least one of a member of the innate immune system, a member of the complement system, C1q, C1r, C1s, C1, C3a, C3b, C3d, C5a, C2, C4, and any combination thereof. The second target can be C1q or a subunit thereof. The C1q subunit can be the A, B or C subunit. The A subunit may have at least one modification. In some embodiments, the second segment comprises an oligonucleotide having a sequence according to any one of SEQ ID NOs. 22843-23022, or that is at least 50, 55, 60, 65, 70, 75, 80, 85, 90, 95, 96, 97, 98, 99 or 100 percent homologous thereto.

[0035] In some embodiments, the second segment comprises an antibody or oligonucleotide.

[0036] The multipartite construct may further comprise a first oligonucleotide primer region and/or a second oligonucleotide primer region surrounding the second segment. The multipartite construct may also comprise a linker region between the first segment and second segment. The linker region can have a desired effect, e.g., it may be an immunostimulatory sequence and/or an anti-proliferative or pro-apoptotic sequence. In some embodiments, the linker region comprises one or more CpG motif. In other embodiments, the linker region comprises a polyG sequence.

[0037] The multipartite construct can be modified to comprise at least one oligonucleotide chemical modification. Non-limiting examples of such modifications include a chemical substitution at a sugar position; a chemical substitution at a phosphate position; and a chemical substitution at a base position of the nucleic acid. The modification can be selected from the group consisting of: incorporation of a modified nucleotide, 3′ capping, conjugation to an amine linker, conjugation to a high molecular weight, non-immunogenic compound, conjugation to a lipophilic compound, conjugation to a drug, conjugation to a cytotoxic moiety and labeling with a radioisotope. The non-immunogenic, high molecular weight compound can be polyalkylene glycol, e.g., polyethylene glycol.

[0038] The multipartite construct can further comprise an immunostimulating moiety and/or a membrane disruptive moiety.

[0039] The multipartite construct of the invention may comprise an oligonucleotide polymer, and optionally wherein the multipartite construct is flanked by a first oligonucleotide primer region and a second oligonucleotide primer region.

[0040] In an aspect, the invention provides a pharmaceutical composition comprising a therapeutically effective amount of a multipartite construct described above, or a salt thereof, and a pharmaceutically acceptable carrier, diluent, or both. In a related aspect, the invention provides a method of treating or ameliorating a disease or disorder in a subject in need thereof, comprising administering such pharmaceutical composition to the subject. In another related aspect, the invention provides a method of inducing cytotoxicity in a subject, comprising administering such pharmaceutical to the subject. The pharmaceutical composition can be administered in any useful format. In various embodiments, the administering comprises at least one of intradermal, intramuscular, intraperitoneal, intravenous, subcutaneous, intranasal, epidural, oral, sublingual, intracerebral, intravaginal, transdermal, rectal, by inhalation, topical administration, or any combination thereof. The carrier or diluent can be any useful carrier or diluent, as described herein or known in the art. As desired, the pharmaceutical composition can be administered in combination with additional known chemotherapeutic agents such as described herein or known in the art, e.g., anti-viral agents, retroviral agent, entry inhibitor, nucleoside/nucleotide reverse transcriptase inhibitor, non-nucleoside reverse transcriptase inhibitor, integrase inhibitor, protease inhibitor, cyclophosphamide, etoposide, doxorubicin, methotrexate, vincristine, procabazine, prednisone, dexamethasone, tamoxifen citrate, carboplatin, cisplatin, oxaliplatin, 5-fluorouracil, camptothecin, zoledronic acid, Ibandronate or mytomicin.

[0041] The invention further provides a kit comprising a multipartite construct as described herein, or a pharmaceutical composition comprising such multipartite construct.

[0042] In the methods of treatment provided by the invention, the disease or disorder can be without limitation a cancer, a premalignant condition, an inflammatory disease, an immune disease, an autoimmune disease or disorder, a cardiovascular disease or disorder, neurological disease or disorder, infectious disease or pain. Examples of each are further provided herein. In preferred embodiments, the disease or disorder comprises a viral infection. The infection may be that of HIV, latent HIV, active HIV, or any combination thereof. In some embodiments, the at least one oligonucleotide or the plurality of oligonucleotides used for treatment has a region corresponding to at least one of SEQ ID NOs 2922-2965 or 3007-21289. In such cases, the viral infection may be a latent infection. In some embodiments, the at least one oligonucleotide or the plurality of oligonucleotides has a region corresponding to at least one of SEQ ID NOs 2966-3006 or 21290-22831. In such cases, the viral infection may be an active infection. Mixtures of such oligonucleotides can be used. For example, one or more oligonucleotide to latent cells may activate the virus in such cells while one or more oligonucleotide to active cells is also provided in order to kill such infected cells.

[0043] In the methods of treatment provided by the invention, the HIV related oligonucleotides and/or multipartite constructs can be administered in combination with at least one other therapeutic agent. In some embodiments, the at least one other therapeutic agent comprises an anti-viral agent, optionally wherein the anti-viral agent comprises at least one anti-retroviral agent. Any useful anti-retroviral agent can be used. In some embodiments, the at least one anti-retroviral agent comprises an entry inhibitor, nucleoside/nucleotide reverse transcriptase inhibitor, non-nucleoside reverse transcriptase inhibitor, integrase inhibitor, protease inhibitor, or any combination thereof. The entry inhibitor can be one or more of maraviroc and enfuvirtide. The nucleoside/nucleotide reverse transcriptase inhibitor can be one or more of zidovudine, abacavir, lamivudine, emtricitabine, and tenofovir. The non-nucleoside reverse transcriptase inhibitor can be one or more of nevirapine, efavirenz, etravirine and rilpivirine. The protease inhibitor can be one or more of lopinavir, indinavir, nelfinavir, amprenavir, ritonavir, darunavir and atazanavir. Cocktails of such agents are commonly used to treat HIV.

[0044] In a related aspect, the invention provides a kit comprising a reagent for carrying out the method of treatment. Similarly, the invention provides for use of a reagent for carrying out the method of treatment. In another related aspect, the invention provides for use of a reagent for the manufacture of a kit or reagent for carrying out the method of treatment. The invention also provides for use of a reagent for the manufacture of a medicament for carrying out the method of treatment. The reagent may comprise at least one oligonucleotide or the plurality of oligonucleotides provided herein, a multipartite construct provided herein, or a pharmaceutical composition comprising the same.

### BRIEF DESCRIPTION OF THE DRAWINGS

[0045] FIGS. 1A-1B illustrate methods of assessing biomarkers such as cellular or microvesicle surface antigens. FIG. 1A is a schematic of a planar substrate coated with a capture agent, such as an aptamer or antibody, which captures cells or microvesicles expressing the target antigen of the capture agent. The capture agent may bind a protein expressed on the surface of the diseased cell or vesicle. The detection agent, which may also be an aptamer or antibody, carries a detectable label, here a fluorescent signal. The detection agent binds to the captured cell or microvesicle and provides a detectable signal via its fluorescent label. The detection agent can detect an antigen that is generally associated a cell-of-origin or a disease, e.g., a cancer. FIG. 1B is a schematic of a particle bead conjugated with a capture agent, which captures cells or microvesicles expressing the target antigen of the capture agent. The capture agent may bind a protein expressed on the surface of the diseased cell or vesicle. The detection agent, which may also be an aptamer or antibody, carries a detectable label, here a fluorescent signal. The detection agent binds to the captured cell or microvesicle and provides a detectable signal via its fluorescent label. The detection agent can detect an antigen that is generally associated with a cell-of-origin or a disease, e.g., a cancer.

[0046] FIGS. 2A-B illustrates a non-limiting example of an aptamer nucleotide sequence and its secondary structure. FIG. 2A illustrates a secondary structure of a 32-mer oligonucleotide, Aptamer 4, with sequence 5′-CCCCCCGAATCACATGACTTGGGCGGGGGTCG (SEQ ID NO. 1). In the figure, the sequence is shown with 6 thymine nucleotides added to the end, which can act as a spacer to attach a biotin molecule. This particular oligo has a high binding affinity to the target, EpCAM. Additional candidate EpCAM binders are identified by modeling the entire database of sequenced oligos to the secondary structure of this oligo. FIG. 2B illustrates another 32-mer oligo with sequence 5′-ACCGGATAGCGGTTGGAGGCGTGCTCCACTCG (SEQ ID NO. 2) that has a different secondary structure than the aptamer in FIG. 2A. This aptamer is also shown with a 6-thymine tail.

[0047] FIG. 3 illustrates a process for producing a target-specific set of aptamers using a cell subtraction method, wherein the target is a biomarker associated with a specific disease. In Step 1, a random pool of oligonucleotides are contacted with a biological sample from a normal patient. In Step 2, the oligos that did not bind in Step 1 are added to a biological sample isolated from diseased patients. The bound oligos from this step are then eluted, captured via their biotin linkage and then combined again with normal biological sample. The unbound oligos are then added again to disease-derived biological sample and isolated. This process can be repeated iteratively. The final eluted aptamers are tested against patient samples to measure the sensitivity and specificity of the set. Biological samples can include blood, including plasma or serum, or other components of the circulatory system, such as microvesicles.

[0048] FIG. 4 comprises a schematic for identifying a target of a selected oligonucleotide probe, such as an aptamer selected by the process of the invention. The figure shows a binding agent 402, here an aptamer for purposes of illustration, tethered to a substrate 401. The binding agent 402 can be covalently attached to substrate 401. The binding agent 402 may also be non-covalently attached. For example, binding agent 402 can comprise a label which can be attracted to the substrate, such as a biotin group which can form a complex with an avidin/streptavidin molecule that is covalently attached to the substrate. The binding agent 402 binds to a surface antigen 403 of cell or microvesicle 404. In the step signified by arrow (i), the cell or microvesicle is disrupted while leaving the complex between the binding agent 402 and surface antigen 403 intact. Disrupted cell or microvesicle 405 is removed, e.g., via washing or buffer exchange, in the step signified by arrow (ii). In the step signified by arrow (iii), the surface antigen 403 is released from the binding agent 402. The surface antigen 403 can be analyzed to determine its identity.

[0049] FIGS. 5A-5G illustrate using an oligonucleotide probe library to differentiate cancer and non-cancer samples.

[0050] FIG. 6 shows protein targets of oligonucleotide probes run on a silver stained SDS-PAGE gel.

[0051] FIGS. 7A-B illustrate a model generated using a training (FIG. 7A) and test (FIG. 7B) set from a round of cross validation. The AUC for the test set was 0.803. Another exemplary round of cross-validation is shown in FIGS. 7C-D with training (FIG. 7C) and test (FIG. 7D) sets. The AUC for the test set was 0.678.

[0052] FIGS. 8A-C illustrate multipart oligonucleotide constructs.

[0053] FIGS. 9A-D illustrate use of aptamers in methods of characterizing a phenotype. FIG. 9A is a schematic 900 showing an assay configuration that can be used to detect and/or quantify a target of interest. In the figure, capture aptamer 902 is attached to substrate 901. Target of interest 903 is bound by capture aptamer 902. Detection aptamer 904 is also bound to target of interest 903. Detection aptamer 904 carries label 905 which can be detected to identify target captured to substrate 901 via capture aptamer 902. FIG. 9B is a schematic 910 showing use of an aptamer pool to characterize a phenotype. A pool of aptamers to a target of interest is provided 911. The pool is contacted with a test sample to be characterized 912. The mixture is washed to remove unbound aptamers. The remaining aptamers are disassociated and collected 913. The collected aptamers are identified 914 and the identity of the retained aptamers is used to characterize the phenotype 915. FIG. 9C is a schematic 920 showing an implementation of the method in FIG. 9B. A pool of aptamers identified as binding a target (e.g., cells or cellular particles) population is provided 919. The input sample comprises target entities that are isolated from a test sample 922. The pool is contacted with the isolated target entities to be characterized 923. The mixture is washed to remove unbound aptamers 924 and the remaining aptamers are disassociated and collected 925. The collected aptamers are identified and the identity of the retained aptamers is used to characterize the phenotype 926. FIG. 9D is a schematic 930 showing an implementation of the method in FIG. 9B. A pool of aptamers identified as binding a target tissue sample is provided 931. The input sample comprises target entities that are isolated from a tissue sample. The pool is contacted with the isolated target entities to be characterized 932. The mixture is washed to remove unbound aptamers and a detection agent is added 933. The tissue sample is scored to assess binding of the aptamers 934. The score is used to characterize the phenotype 926.

[0054] FIGS. 10A-I illustrate development and use of an oligonucleotide probe library to distinguish biological sample types.

[0055] FIGS. 11A-C illustrate enriching a naïve oligonucleotide library with balanced design for oligonucleotides that differentiate between breast cancer and non-cancer microvesicles derived from plasma samples.

[0056] FIGS. 12A-E show identification of oligonucleotide probes that differentiate HIV active versus latent cells.

### DETAILED DESCRIPTION OF THE INVENTION

[0057] The details of one or more embodiments of the invention are set forth in the accompanying description below. Although any methods and materials similar or equivalent to those described herein can be used in the practice or testing of the present invention, the preferred methods and materials are now described. Other features, objects, and advantages of the invention will be apparent from the description. In the specification, the singular forms also include the plural unless the context clearly dictates otherwise. Unless defined otherwise, all technical and scientific terms used herein have the same meaning as commonly understood by one of ordinary skill in the art to which this invention belongs. In the case of conflict, the present Specification will control.

[0058] Disclosed herein are compositions and methods that can be used to characterize a phenotype, or assess, a biological sample. The compositions and methods of the invention comprise the use of oligonucleotide probes (aptamers) that bind biological entities of interest, including without limitation tissues, cell, microvesicles, or fragments thereof. The antigens recognized by the oligonucleotide aptamers may comprise proteins or polypeptides or any other useful biological components such as nucleic acids, lipids and/or carbohydrates. In general, the oligonucleotides disclosed are synthetic nucleic acid molecules, including DNA and RNA, and variations thereof. Unless otherwise specified, the oligonucleotide probes can be synthesized in DNA or RNA format or as hybrid molecules as desired. The methods disclosed herein comprise diagnostic, prognostic and theranostic processes and techniques using one or more aptamer of the invention. Alternatively, an oligonucleotide probe of the invention can also be used as a binding agent to capture, isolate, or enrich, a cell, cell fragment, microvesicle or any other fragment or complex that comprises the antigen or functional fragments thereof.

[0059] The compositions and methods of the invention also comprise individual oligonucleotides that can be used to assess biological samples. The invention further discloses compositions and methods of oligonucleotide pools that can be used to detect a biosignature in a sample.

[0060] Oligonucleotide probes and sequences disclosed in the compositions and methods of the invention may be identified herein in the form of DNA or RNA. Unless otherwise specified, one of skill in the art will appreciate that an oligonucleotide may generally be synthesized as either form of nucleic acid and carry various chemical modifications and remain within the scope of the invention. The term aptamer may be used in the art to refer to a single oligonucleotide that binds specifically to a target of interest through mechanisms other than Watson crick base pairing, similar to binding of a monoclonal antibody to a particular antigen. Within the scope of this disclosure and unless stated explicitly or otherwise implicit in context, the terms aptamer, oligonucleotide and oligonucleotide probe, and variations thereof, may be used interchangeably to refer to an oligonucleotide capable of distinguishing biological entities of interest (e.g, tissues, cells, microvesicles, biomarkers) whether or not the specific entity has been identified or whether the precise mode of binding has been determined.

[0061] An oligonucleotide probe or plurality of such probes of the invention can also be used to provide in vitro or in vivo detection or imaging and to provide diagnostic readouts, including for diagnostic, prognostic or theranostic purposes.

[0062] Separately, an oligonucleotide probe of the invention can also be used for treatment or as a therapeutic to specifically target a cell, tissue, organ or the like. As the invention provides methods to identify oligonucleotide probes that bind to specific tissues, cells, microvesicles or other biological entities of interest, the oligonucleotide probes of the invention target such entities and are inherently drug candidates, agents that can be used for targeted drug delivery, or both.

### Phenotypes

[0063] Disclosed herein are products and processes for characterizing a phenotype using the methods and compositions of the invention. The term “phenotype” as used herein can mean any trait or characteristic that can be identified using in part or in whole the compositions and/or methods of the invention. For example, a phenotype can be a diagnostic, prognostic or theranostic determination based on a characterized biomarker profile for a sample obtained from a subject. A phenotype can be any observable characteristic or trait of, such as a disease or condition, a stage of a disease or condition, susceptibility to a disease or condition, prognosis of a disease stage or condition, a physiological state, or response/potential response to therapeutics. A phenotype can result from a subject's genetic makeup as well as the influence of environmental factors and the interactions between the two, as well as from epigenetic modifications to nucleic acid sequences.

[0064] A phenotype in a subject can be characterized by obtaining a biological sample from a subject and analyzing the sample using the compositions and/or methods of the invention. For example, characterizing a phenotype for a subject or individual can include detecting a disease or condition (including presymptomatic early stage detecting), determining a prognosis, diagnosis, or theranosis of a disease or condition, or determining the stage or progression of a disease or condition. Characterizing a phenotype can include identifying appropriate treatments or treatment efficacy for specific diseases, conditions, disease stages and condition stages, predictions and likelihood analysis of disease progression, particularly disease recurrence, metastatic spread or disease relapse. A phenotype can also be a clinically distinct type or subtype of a condition or disease, such as a cancer or tumor. Phenotype determination can also be a determination of a physiological condition, or an assessment of organ distress or organ rejection, such as post-transplantation. The compositions and methods described herein allow assessment of a subject on an individual basis, which can provide benefits of more efficient and economical decisions in treatment.

[0065] In an aspect, the invention relates to the analysis of tissues, microvesicles, and circulating biomarkers to provide a diagnosis, prognosis, and/or theranosis of a disease or condition. Theranostics includes diagnostic testing that provides the ability to affect therapy or treatment of a disease or disease state. Theranostics testing provides a theranosis in a similar manner that diagnostics or prognostic testing provides a diagnosis or prognosis, respectively. As used herein, theranostics encompasses any desired form of therapy related testing, including predictive medicine, personalized medicine, precision medicine, integrated medicine, pharmacodiagnostics and Dx/Rx partnering. Therapy related tests can be used to predict and assess drug response in individual subjects, i.e., to provide personalized medicine. Predicting a drug response can be determining whether a subject is a likely responder or a likely non-responder to a candidate therapeutic agent, e.g., before the subject has been exposed or otherwise treated with the treatment. Assessing a drug response can be monitoring a response to a drug, e.g., monitoring the subject's improvement or lack thereof over a time course after initiating the treatment. Therapy related tests are useful to select a subject for treatment who is particularly likely to benefit from the treatment or to provide an early and objective indication of treatment efficacy in an individual subject. Thus, analysis using the compositions and methods of the invention may indicate that treatment should be altered to select a more promising treatment, thereby avoiding the great expense of delaying beneficial treatment and avoiding the financial and morbidity costs of administering an ineffective drug(s).

[0066] In assessing a phenotype, a biosignature can be analyzed in the subject and compared against that of previous subjects that were known to respond or not to a treatment. The biosignature may comprise certain biomarkers or may comprise certain detection agents, such as the oligonucleotide probes as provided herein. If the biosignature in the subject more closely aligns with that of previous subjects that were known to respond to the treatment, the subject can be characterized, or predicted, as a responder to the treatment. Similarly, if the biomarker profile in the subject more closely aligns with that of previous subjects that did not respond to the treatment, the subject can be characterized, or predicted as a non-responder to the treatment. The treatment can be for any appropriate disease, disorder or other condition, including without limitation those disclosed herein.

[0067] In some embodiments, the phenotype comprises a medical condition including without limitation a disease or disorder listed in Table 1. For example, the phenotype can comprise detecting the presence of or likelihood of developing a tumor, neoplasm, or cancer, or characterizing the tumor, neoplasm, or cancer (e.g., stage, grade, aggressiveness, likelihood of metastatis or recurrence, etc). Cancers that can be detected or assessed by methods or compositions described herein include, but are not limited to, breast cancer, ovarian cancer, lung cancer, colon cancer, hyperplastic polyp, adenoma, colorectal cancer, high grade dysplasia, low grade dysplasia, prostatic hyperplasia, prostate cancer, melanoma, pancreatic cancer, brain cancer (such as a glioblastoma), hematological malignancy, hepatocellular carcinoma, cervical cancer, endometrial cancer, head and neck cancer, esophageal cancer, gastrointestinal stromal tumor (GIST), renal cell carcinoma (RCC) or gastric cancer. The colorectal cancer can be CRC Dukes B or Dukes C-D. The hematological malignancy can be B-Cell Chronic Lymphocytic Leukemia, B-Cell Lymphoma-DLBCL, B-Cell Lymphoma-DLBCL-germinal center-like, B-Cell Lymphoma-DLBCL-activated B-cell-like, and Burkitt's lymphoma.

[0068] The phenotype can be a premalignant condition, such as actinic keratosis, atrophic gastritis, leukoplakia, erythroplasia, Lymphomatoid Granulomatosis, preleukemia, fibrosis, cervical dysplasia, uterine cervical dysplasia, xeroderma pigmentosum, Barrett's Esophagus, colorectal polyp, or other abnormal tissue growth or lesion that is likely to develop into a malignant tumor. Transformative viral infections such as HIV and HPV also present phenotypes that can be assessed according to the invention.

[0069] A cancer characterized by the compositions and methods of the invention can comprise, without limitation, a carcinoma, a sarcoma, a lymphoma or leukemia, a germ cell tumor, a blastoma, or other cancers. Carcinomas include without limitation epithelial neoplasms, squamous cell neoplasms squamous cell carcinoma, basal cell neoplasms basal cell carcinoma, transitional cell papillomas and carcinomas, adenomas and adenocarcinomas (glands), adenoma, adenocarcinoma, linitis plastica insulinoma, glucagonoma, gastrinoma, vipoma, cholangiocarcinoma, hepatocellular carcinoma, adenoid cystic carcinoma, carcinoid tumor of appendix, prolactinoma, oncocytoma, hurthle cell adenoma, renal cell carcinoma, grawitz tumor, multiple endocrine adenomas, endometrioid adenoma, adnexal and skin appendage neoplasms, mucoepidermoid neoplasms, cystic, mucinous and serous neoplasms, cystadenoma, pseudomyxoma peritonei, ductal, lobular and medullary neoplasms, acinar cell neoplasms, complex epithelial neoplasms, warthin's tumor, thymoma, specialized gonadal neoplasms, sex cord stromal tumor, thecoma, granulosa cell tumor, arrhenoblastoma, sertoli leydig cell tumor, glomus tumors, paraganglioma, pheochromocytoma, glomus tumor, nevi and melanomas, melanocytic nevus, malignant melanoma, melanoma, nodular melanoma, dysplastic nevus, lentigo maligna melanoma, superficial spreading melanoma, and malignant acral lentiginous melanoma. Sarcoma includes without limitation Askin's tumor, botryodies, chondrosarcoma, Ewing's sarcoma, malignant hemangio endothelioma, malignant schwannoma, osteosarcoma, soft tissue sarcomas including: alveolar soft part sarcoma, angiosarcoma, cystosarcoma phyllodes, dermatofibrosarcoma, desmoid tumor, desmoplastic small round cell tumor, epithelioid sarcoma, extraskeletal chondrosarcoma, extraskeletal osteosarcoma, fibrosarcoma, hemangiopericytoma, hemangiosarcoma, kaposi's sarcoma, leiomyosarcoma, liposarcoma, lymphangiosarcoma, lymphosarcoma, malignant fibrous histiocytoma, neurofibrosarcoma, rhabdomyosarcoma, and synovialsarcoma. Lymphoma and leukemia include without limitation chronic lymphocytic leukemia/small lymphocytic lymphoma, B-cell prolymphocytic leukemia, lymphoplasmacytic lymphoma (such as waldenstrom macroglobulinemia), splenic marginal zone lymphoma, plasma cell myeloma, plasmacytoma, monoclonal immunoglobulin deposition diseases, heavy chain diseases, extranodal marginal zone B cell lymphoma, also called malt lymphoma, nodal marginal zone B cell lymphoma (nmzl), follicular lymphoma, mantle cell lymphoma, diffuse large B cell lymphoma, mediastinal (thymic) large B cell lymphoma, intravascular large B cell lymphoma, primary effusion lymphoma, burkitt lymphoma/leukemia, T cell prolymphocytic leukemia, T cell large granular lymphocytic leukemia, aggressive NK cell leukemia, adult T cell leukemia/lymphoma, extranodal NK/T cell lymphoma, nasal type, enteropathy-type T cell lymphoma, hepatosplenic T cell lymphoma, blastic NK cell lymphoma, mycosis fungoides/sezary syndrome, primary cutaneous CD30-positive T cell lymphoproliferative disorders, primary cutaneous anaplastic large cell lymphoma, lymphomatoid papulosis, angioimmunoblastic T cell lymphoma, peripheral T cell lymphoma, unspecified, anaplastic large cell lymphoma, classical hodgkin lymphomas (nodular sclerosis, mixed cellularity, lymphocyte-rich, lymphocyte depleted or not depleted), and nodular lymphocyte-predominant hodgkin lymphoma. Germ cell tumors include without limitation germinoma, dysgerminoma, seminoma, nongerminomatous germ cell tumor, embryonal carcinoma, endodermal sinus turmor, choriocarcinoma, teratoma, polyembryoma, and gonadoblastoma. Blastoma includes without limitation nephroblastoma, medulloblastoma, and retinoblastoma. Other cancers include without limitation labial carcinoma, larynx carcinoma, hypopharynx carcinoma, tongue carcinoma, salivary gland carcinoma, gastric carcinoma, adenocarcinoma, thyroid cancer (medullary and papillary thyroid carcinoma), renal carcinoma, kidney parenchyma carcinoma, cervix carcinoma, uterine corpus carcinoma, endometrium carcinoma, chorion carcinoma, testis carcinoma, urinary carcinoma, melanoma, brain tumors such as glioblastoma, astrocytoma, meningioma, medulloblastoma and peripheral neuroectodermal tumors, gall bladder carcinoma, bronchial carcinoma, multiple myeloma, basalioma, teratoma, retinoblastoma, choroidea melanoma, seminoma, rhabdomyosarcoma, craniopharyngeoma, osteosarcoma, chondrosarcoma, myosarcoma, liposarcoma, fibrosarcoma, Ewing sarcoma, and plasmocytoma.

[0070] In a further embodiment, the cancer under analysis may be a lung cancer including non-small cell lung cancer and small cell lung cancer (including small cell carcinoma (oat cell cancer), mixed small cell/large cell carcinoma, and combined small cell carcinoma), colon cancer, breast cancer, prostate cancer, liver cancer, pancreas cancer, brain cancer, kidney cancer, ovarian cancer, stomach cancer, skin cancer, bone cancer, gastric cancer, breast cancer, pancreatic cancer, glioma, glioblastoma, hepatocellular carcinoma, papillary renal carcinoma, head and neck squamous cell carcinoma, leukemia, lymphoma, myeloma, or a solid tumor.

[0071] In embodiments, the cancer comprises an acute lymphoblastic leukemia; acute myeloid leukemia; adrenocortical carcinoma; AIDS-related cancers; AIDS-related lymphoma; anal cancer; appendix cancer; astrocytomas; atypical teratoid/rhabdoid tumor; basal cell carcinoma; bladder cancer; brain stem glioma; brain tumor (including brain stem glioma, central nervous system atypical teratoid/rhabdoid tumor, central nervous system embryonal tumors, astrocytomas, craniopharyngioma, ependymoblastoma, ependymoma, medulloblastoma, medulloepithelioma, pineal parenchymal tumors of intermediate differentiation, supratentorial primitive neuroectodermal tumors and pineoblastoma); breast cancer; bronchial tumors; Burkitt lymphoma; cancer of unknown primary site; carcinoid tumor; carcinoma of unknown primary site; central nervous system atypical teratoid/rhabdoid tumor; central nervous system embryonal tumors; cervical cancer; childhood cancers; chordoma; chronic lymphocytic leukemia; chronic myelogenous leukemia; chronic myeloproliferative disorders; colon cancer; colorectal cancer; craniopharyngioma; cutaneous T-cell lymphoma; endocrine pancreas islet cell tumors; endometrial cancer; ependymoblastoma; ependymoma; esophageal cancer; esthesioneuroblastoma; Ewing sarcoma; extracranial germ cell tumor; extragonadal germ cell tumor; extrahepatic bile duct cancer; gallbladder cancer; gastric (stomach) cancer; gastrointestinal carcinoid tumor; gastrointestinal stromal cell tumor; gastrointestinal stromal tumor (GIST); gestational trophoblastic tumor; glioma; hairy cell leukemia; head and neck cancer; heart cancer; Hodgkin lymphoma; hypopharyngeal cancer; intraocular melanoma; islet cell tumors; Kaposi sarcoma; kidney cancer; Langerhans cell histiocytosis; laryngeal cancer; lip cancer; liver cancer; malignant fibrous histiocytoma bone cancer; medulloblastoma; medulloepithelioma; melanoma; Merkel cell carcinoma; Merkel cell skin carcinoma; mesothelioma; metastatic squamous neck cancer with occult primary; mouth cancer; multiple endocrine neoplasia syndromes; multiple myeloma; multiple myeloma/plasma cell neoplasm; mycosis fungoides; myelodysplastic syndromes; myeloproliferative neoplasms; nasal cavity cancer; nasopharyngeal cancer; neuroblastoma; Non-Hodgkin lymphoma; nonmelanoma skin cancer; non-small cell lung cancer; oral cancer; oral cavity cancer; oropharyngeal cancer; osteosarcoma; other brain and spinal cord tumors; ovarian cancer; ovarian epithelial cancer; ovarian germ cell tumor; ovarian low malignant potential tumor; pancreatic cancer; papillomatosis; paranasal sinus cancer; parathyroid cancer; pelvic cancer; penile cancer; pharyngeal cancer; pineal parenchymal tumors of intermediate differentiation; pineoblastoma; pituitary tumor; plasma cell neoplasm/multiple myeloma; pleuropulmonary blastoma; primary central nervous system (CNS) lymphoma; primary hepatocellular liver cancer; prostate cancer; rectal cancer; renal cancer; renal cell (kidney) cancer; renal cell cancer; respiratory tract cancer; retinoblastoma; rhabdomyosarcoma; salivary gland cancer; Sezary syndrome; small cell lung cancer; small intestine cancer; soft tissue sarcoma; squamous cell carcinoma; squamous neck cancer; stomach (gastric) cancer; supratentorial primitive neuroectodermal tumors; T-cell lymphoma; testicular cancer; throat cancer; thymic carcinoma; thymoma; thyroid cancer; transitional cell cancer; transitional cell cancer of the renal pelvis and ureter; trophoblastic tumor; ureter cancer; urethral cancer; uterine cancer; uterine sarcoma; vaginal cancer; vulvar cancer; Waldenstrom macroglobulinemia; or Wilm's tumor. The methods of the invention can be used to characterize these and other cancers. Thus, characterizing a phenotype can be providing a diagnosis, prognosis or theranosis of one of the cancers disclosed herein.

[0072] In some embodiments, the cancer comprises an acute myeloid leukemia (AML), breast carcinoma, cholangiocarcinoma, colorectal adenocarcinoma, extrahepatic bile duct adenocarcinoma, female genital tract malignancy, gastric adenocarcinoma, gastroesophageal adenocarcinoma, gastrointestinal stromal tumors (GIST), glioblastoma, head and neck squamous carcinoma, leukemia, liver hepatocellular carcinoma, low grade glioma, lung bronchioloalveolar carcinoma (BAC), lung non-small cell lung cancer (NSCLC), lung small cell cancer (SCLC), lymphoma, male genital tract malignancy, malignant solitary fibrous tumor of the pleura (MSFT), melanoma, multiple myeloma, neuroendocrine tumor, nodal diffuse large B-cell lymphoma, non epithelial ovarian cancer (non-EOC), ovarian surface epithelial carcinoma, pancreatic adenocarcinoma, pituitary carcinomas, oligodendroglioma, prostatic adenocarcinoma, retroperitoneal or peritoneal carcinoma, retroperitoneal or peritoneal sarcoma, small intestinal malignancy, soft tissue tumor, thymic carcinoma, thyroid carcinoma, or uveal melanoma. The methods of the invention can be used to characterize these and other cancers. Thus, characterizing a phenotype can be providing a diagnosis, prognosis or theranosis of one of the cancers disclosed herein.

[0073] The phenotype can also be an inflammatory disease, immune disease, or autoimmune disease. For example, the disease may be inflammatory bowel disease (IBD), Crohn's disease (CD), ulcerative colitis (UC), pelvic inflammation, vasculitis, psoriasis, diabetes, autoimmune hepatitis, Multiple Sclerosis, Myasthenia Gravis, Type I diabetes, Rheumatoid Arthritis, Psoriasis, Systemic Lupus Erythematosis (SLE), Hashimoto's Thyroiditis, Grave's disease, Ankylosing Spondylitis Sjogrens Disease, CREST syndrome, Scleroderma, Rheumatic Disease, organ rejection, Primary Sclerosing Cholangitis, or sepsis.

[0074] The phenotype can also comprise a cardiovascular disease, such as atherosclerosis, congestive heart failure, vulnerable plaque, stroke, or ischemia. The cardiovascular disease or condition can be high blood pressure, stenosis, vessel occlusion or a thrombotic event.

[0075] The phenotype can also comprise a neurological disease, such as Multiple Sclerosis (MS), Parkinson's Disease (PD), Alzheimer's Disease (AD), schizophrenia, bipolar disorder, depression, autism, Prion Disease, Pick's disease, dementia, Huntington disease (HD), Down's syndrome, cerebrovascular disease, Rasmussen's encephalitis, viral meningitis, neurospsychiatric systemic lupus erythematosus (NPSLE), amyotrophic lateral sclerosis, Creutzfeldt-Jacob disease, Gerstmann-Straussler-Scheinker disease, transmissible spongiform encephalopathy, ischemic reperfusion damage (e.g. stroke), brain trauma, microbial infection, or chronic fatigue syndrome. The phenotype may also be a condition such as fibromyalgia, chronic neuropathic pain, or peripheral neuropathic pain.

[0076] The phenotype may also comprise an infectious disease, such as a bacterial, viral or yeast infection. For example, the disease or condition may be Whipple's Disease, Prion Disease, cirrhosis, methicillin-resistant Staphylococcus aureus, human immunodeficiency virus (HIV), hepatitis, syphilis, meningitis, malaria, tuberculosis, or influenza. In various embodiments, infected or immune cells, viral particles, such as HIV or HCV-like particles, or vesicles, are assessed to characterize a viral condition.

[0077] The phenotype can also comprise a perinatal or pregnancy related condition (e.g. preeclampsia or preterm birth), metabolic disease or condition, such as a metabolic disease or condition associated with iron metabolism. For example, hepcidin can be assayed to characterize an iron deficiency. The metabolic disease or condition can also be diabetes, inflammation, or a perinatal condition.

[0078] The compositions and methods of the invention can be used to characterize these and other diseases and disorders. Thus, characterizing a phenotype can be providing a diagnosis, prognosis or theranosis of a medical condition, disease or disorder, including without limitation one of the diseases and disorders disclosed herein.

### Subject

[0079] One or more phenotypes of a subject can be determined by analyzing a biological sample obtained from the subject. A subject or patient can include, but is not limited to, mammals such as bovine, avian, canine, equine, feline, ovine, porcine, or primate animals (including humans and non-human primates). A subject can also include a mammal of importance due to being endangered, such as a Siberian tiger; or economic importance, such as an animal raised on a farm for consumption by humans, or an animal of social importance to humans, such as an animal kept as a pet or in a zoo. Examples of such animals include, but are not limited to, carnivores such as cats and dogs; swine including pigs, hogs and wild boars; ruminants or ungulates such as cattle, oxen, sheep, giraffes, deer, goats, bison, camels or horses. Also included are birds that are endangered or kept in zoos, as well as fowl and more particularly domesticated fowl, e.g., poultry, such as turkeys and chickens, ducks, geese, guinea fowl. Also included are domesticated swine and horses (including race horses). In addition, any animal species connected to commercial activities are also included such as those animals connected to agriculture and aquaculture and other activities in which disease monitoring, diagnosis, and therapy selection are routine practice in husbandry for economic productivity and/or safety of the food chain.

[0080] The subject can have a pre-existing disease or condition, including without limitation cancer or other condition disclosed herein. Alternatively, the subject may not have any known pre-existing condition. The subject may also be non-responsive to an existing or past treatment for a disease or disorder.

### Samples

[0081] A sample used and/or assessed via the compositions and methods of the invention includes any relevant biological sample that can be used to characterize a phenotype of interest, including without limitation sections of tissues such as biopsy or tissue removed during surgical or other procedures, bodily fluids, autopsy samples, frozen sections taken for histological purposes, and cell cultures. Such samples include blood and blood fractions or products (e.g., serum, buffy coat, plasma, platelets, red blood cells, and the like), sputum, malignant effusion, cheek cells tissue, cultured cells (e.g., primary cultures, explants, and transformed cells), stool, urine, other biological or bodily fluids (e.g., prostatic fluid, gastric fluid, intestinal fluid, renal fluid, lung fluid, cerebrospinal fluid, and the like), etc. The sample can comprise biological material that is a fresh frozen & formalin fixed paraffin embedded (FFPE) block, formalin-fixed paraffin embedded, or is within an RNA preservative+formalin fixative. More than one sample of more than one type can be used for each patient.

[0082] The sample used in the methods described herein can be a formalin fixed paraffin embedded (FFPE) sample. The FFPE sample can be one or more of fixed tissue, unstained slides, bone marrow core or clot, core needle biopsy, malignant fluids and fine needle aspirate (FNA). In an embodiment, the fixed tissue comprises a tumor containing formalin fixed paraffin embedded (FFPE) block from a surgery or biopsy. In another embodiment, the unstained slides comprise unstained, charged, unbaked slides from a paraffin block. In another embodiment, bone marrow core or clot comprises a decalcified core. A formalin fixed core and/or clot can be paraffin-embedded. In still another embodiment, the core needle biopsy comprises 1, 2, 3, 4, 5, 6, 7, 8, 9, 10 or more, e.g., 3-6, paraffin embedded biopsy samples. An 18 gauge needle biopsy can be used. The malignant fluid can comprise a sufficient volume of fresh pleural/ascitic fluid to produce a 5×5×2 mm cell pellet. The fluid can be formalin fixed in a paraffin block. In an embodiment, the core needle biopsy comprises 1, 2, 3, 4, 5, 6, 7, 8, 9, 10 or more, e.g., 4-6, paraffin embedded aspirates.

[0083] A sample may be processed according to techniques understood by those in the art. A sample can be without limitation fresh, frozen or fixed cells or tissue. In some embodiments, a sample comprises formalin-fixed paraffin-embedded (FFPE) tissue, fresh tissue or fresh frozen (FF) tissue. A sample can comprise cultured cells, including primary or immortalized cell lines derived from a subject sample. A sample can also refer to an extract from a sample from a subject. For example, a sample can comprise DNA, RNA or protein extracted from a tissue or a bodily fluid. Many techniques and commercial kits are available for such purposes. The fresh sample from the individual can be treated with an agent to preserve RNA prior to further processing, e.g., cell lysis and extraction. Samples can include frozen samples collected for other purposes. Samples can be associated with relevant information such as age, gender, and clinical symptoms present in the subject; source of the sample; and methods of collection and storage of the sample. A sample is typically obtained from a subject, e.g., a human subject.

[0084] A biopsy comprises the process of removing a tissue sample for diagnostic or prognostic evaluation, and to the tissue specimen itself. Any biopsy technique known in the art can be applied to the molecular profiling methods of the present invention. The biopsy technique applied can depend on the tissue type to be evaluated (e.g., colon, prostate, kidney, bladder, lymph node, liver, bone marrow, blood cell, lung, breast, etc.), the size and type of the tumor (e.g., solid or suspended, blood or ascites), among other factors. Representative biopsy techniques include, but are not limited to, excisional biopsy, incisional biopsy, needle biopsy, surgical biopsy, and bone marrow biopsy. An “excisional biopsy” refers to the removal of an entire tumor mass with a small margin of normal tissue surrounding it. An “incisional biopsy” refers to the removal of a wedge of tissue that includes a cross-sectional diameter of the tumor. The invention can make use a “core-needle biopsy” of the tumor mass, or a “fine-needle aspiration biopsy” which generally obtains a suspension of cells from within the tumor mass. Biopsy techniques are discussed, for example, in Harrison's Principles of Internal Medicine, Kasper, et al., eds., 16th ed., 2005, Chapter 70, and throughout Part V.

[0085] Standard molecular biology techniques known in the art and not specifically described are generally followed as in Sambrook et al., Molecular Cloning: A Laboratory Manual, Cold Spring Harbor Laboratory Press, New York (1989), and as in Ausubel et al., Current Protocols in Molecular Biology, John Wiley and Sons, Baltimore, Md. (1989) and as in Perbal, A Practical Guide to Molecular Cloning, John Wiley & Sons, New York (1988), and as in Watson et al., Recombinant DNA, Scientific American Books, New York and in Birren et al (eds) Genome Analysis: A Laboratory Manual Series, Vols. 1-4 Cold Spring Harbor Laboratory Press, New York (1998) and methodology as set forth in U.S. Pat. Nos. 4,666,828; 4,683,202; 4,801,531; 5,192,659 and 5,272,057 and incorporated herein by reference. Polymerase chain reaction (PCR) can be carried out generally as in PCR Protocols: A Guide to Methods and Applications, Academic Press, San Diego, Calif. (1990).

[0086] The biological sample assessed using the compositions and methods of the invention can be any useful bodily or biological fluid, including but not limited to peripheral blood, sera, plasma, ascites, urine, cerebrospinal fluid (CSF), sputum, saliva, bone marrow, synovial fluid, aqueous humor, amniotic fluid, cerumen, breast milk, broncheoalveolar lavage fluid, semen (including prostatic fluid), Cowper's fluid or pre-ejaculatory fluid, female ejaculate, sweat, fecal matter, hair, tears, cyst fluid, pleural and peritoneal fluid, pericardial fluid, lymph, chyme, chyle, bile, interstitial fluid, menses, pus, sebum, vomit, vaginal secretions, mucosal secretion, stool water, pancreatic juice, lavage fluids from sinus cavities, bronchopulmonary aspirates or other lavage fluids, cells, cell culture, or a cell culture supernatant. A biological sample may also include the blastocyl cavity, umbilical cord blood, or maternal circulation which may be of fetal or maternal origin. The biological sample may also be a cell culture, tissue sample or biopsy from which microvesicles, circulating tumor cells (CTCs), and other circulating biomarkers may be obtained. For example, cells of interest can be cultured and microvesicles isolated from the culture. In various embodiments, biomarkers or more particularly biosignatures disclosed herein can be assessed directly from such biological samples (e.g., identification of presence or levels of nucleic acid or polypeptide biomarkers or functional fragments thereof) using various methods, such as extraction of nucleic acid molecules from blood, plasma, serum or any of the foregoing biological samples, use of protein or antibody arrays to identify polypeptide (or functional fragment) biomarker(s), as well as other array, sequencing, PCR and proteomic techniques known in the art for identification and assessment of nucleic acid and polypeptide molecules. In addition, one or more components present in such samples can be first isolated or enriched and further processed to assess the presence or levels of selected biomarkers, to assess a given biosignature (e.g., isolated microvesicles prior to profiling for protein and/or nucleic acid biomarkers).

[0087] Table 1 presents a non-limiting listing of diseases, conditions, or biological states and corresponding biological samples that may be used for analysis according to the methods of the invention.

TABLE 1
Examples of Biological Samples for Various Diseases, Conditions, or Biological States

| Illustrative Disease, Condition or Biological | |
|---|---|
| State | Illustrative Biological Samples |
| Cancers/neoplasms affecting the following tissue | Tumor, blood, serum, plasma, cerebrospinal fluid |
| types/bodily systems: breast, lung, ovarian, colon, | (CSF), urine, sputum, ascites, synovial fluid, |
| rectal, prostate, pancreatic, brain, bone, connective | semen, nipple aspirates, saliva, bronchoalveolar |
| tissue, glands, skin, lymph, nervous system, | lavage fluid, tears, oropharyngeal washes, feces, |
| endocrine, germ cell, genitourinary, | peritoneal fluids, pleural effusion, sweat, tears, |
| hematologic/blood, bone marrow, muscle, eye, | aqueous humor, pericardial fluid, lymph, chyme, |
| esophageal, fat tissue, thyroid, pituitary, spinal | chyle, bile, stool water, amniotic fluid, breast milk, |
| cord, bile duct, heart, gall bladder, bladder, testes, | pancreatic juice, cerumen, Cowper's fluid or pre- |
| cervical, endometrial, renal, ovarian, | ejaculatory fluid, female ejaculate, interstitial fluid, |
| digestive/gastrointestinal, stomach, head and neck, | menses, mucus, pus, sebum, vaginal lubrication, |
| liver, leukemia, respiratory/thorasic, cancers of | vomit |
| unknown primary (CUP) | |
| Neurodegenerative/neurological disorders: | Blood, serum, plasma, CSF, urine |
| Parkinson's disease, Alzheimer's Disease and | |
| multiple sclerosis, Schizophrenia, and bipolar | |
| disorder, spasticity disorders, epilepsy | |
| Cardiovascular Disease: atherosclerosis, | Blood, serum, plasma, CSF, urine |
| cardiomyopathy, endocarditis, vunerable plaques, | |
| infection | |
| Stroke: ischemic, intracerebral hemorrhage, | Blood, serum, plasma, CSF, urine |
| subarachnoid hemorrhage, transient ischemic | |
| attacks (TIA) | |
| Pain disorders: peripheral neuropathic pain and | Blood, serum, plasma, CSF, urine |
| chronic neuropathic pain, and fibromyalgia, | |
| Autoimmune disease: systemic and localized | Blood, serum, plasma, CSF, urine, synovial fluid |
| diseases, rheumatic disease, Lupus, Sjogren's | |
| syndrome | |
| Digestive system abnormalities: Barrett's | Blood, serum, plasma, CSF, urine |
| esophagus, irritable bowel syndrome, ulcerative | |
| colitis, Crohn's disease, Diverticulosis and | |
| Diverticulitis, Celiac Disease | |
| Endocrine disorders: diabetes mellitus, various | Blood, serum, plasma, CSF, urine |
| forms of Thyroiditis, adrenal disorders, pituitary | |
| disorders | |
| Diseases and disorders of the skin: psoriasis | Blood, serum, plasma, CSF, urine, synovial fluid, |
| | tears |
| Urological disorders: benign prostatic hypertrophy | Blood, serum, plasma, urine |
| (BPH), polycystic kidney disease, interstitial | |
| cystitis | |
| Hepatic disease/injury: Cirrhosis, induced | Blood, serum, plasma, urine |
| hepatotoxicity (due to exposure to natural or | |
| synthetic chemical sources) | |
| Kidney disease/injury: acute, sub-acute, chronic | Blood, serum, plasma, urine |
| conditions, Podocyte injury, focal segmental | |
| glomerulosclerosis | |
| Endometriosis | Blood, serum, plasma, urine, vaginal fluids |
| Osteoporosis | Blood, serum, plasma, urine, synovial fluid |
| Pancreatitis | Blood, serum, plasma, urine, pancreatic juice |
| Asthma | Blood, serum, plasma, urine, sputum, bronchiolar lavage |
| | fluid |
| Allergies | Blood, serum, plasma, urine, sputum, bronchiolar lavage |
| | fluid |
| Prion-related diseases | Blood, serum, plasma, CSF, urine |
| Viral Infections: HIV/AIDS | Blood, serum, plasma, urine |
| Sepsis | Blood, serum, plasma, urine, tears, nasal lavage |
| Organ rejection/transplantation | Blood, serum, plasma, urine, various lavage fluids |
| Differentiating conditions: adenoma versus | Blood, serum, plasma, urine, sputum, feces, colonic |
| hyperplastic polyp, irritable bowel syndrome (IBS) | lavage fluid |
| versus normal, classifying Dukes stages A, B, C, | |
| and/or D of colon cancer, adenoma with low-grade | |
| hyperplasia versus high-grade hyperplasia, | |
| adenoma versus normal, colorectal cancer versus | |
| normal, IBS versus. ulcerative colitis (UC) versus | |
| Crohn's disease (CD), | |
| Pregnancy related physiological states, conditions, or | Maternal serum, plasma, amniotic fluid, cord blood |
| affiliated diseases: genetic risk, adverse pregnancy | |
| outcomes | |

[0088] The methods of the invention can be used to characterize a phenotype using a blood sample or blood derivative. Blood derivatives include plasma and serum. Blood plasma is the liquid component of whole blood, and makes up approximately 55% of the total blood volume. It is composed primarily of water with small amounts of minerals, salts, ions, nutrients, and proteins in solution. In whole blood, red blood cells, leukocytes, and platelets are suspended within the plasma. Blood serum refers to blood plasma without fibrinogen or other clotting factors (i.e., whole blood minus both the cells and the clotting factors).

[0089] The biological sample may be obtained through a third party, such as a party not performing the analysis of the sample. For example, the sample may be obtained through a clinician, physician, or other health care manager of a subject from which the sample is derived. Alternatively, the biological sample may obtained by the same party analyzing the sample. In addition, biological samples be assayed, are archived (e.g., frozen) or ortherwise stored in under preservative conditions.

[0090] In various embodiments, the biological sample comprises a microvesicle or cell membrane fragment that is derived from a cell of origin and available extracellularly in a subject's biological fluid or extracellular milieu. Methods of the invention may include assessing one or more such microvesicles, including assessing populations thereof. A vesicle or microvesicle, as used herein, is a membrane vesicle that is shed from cells. Vesicles or membrane vesicles include without limitation: circulating microvesicles (cMVs), microvesicle, exosome, nanovesicle, dexosome, bleb, blebby, prostasome, microparticle, intralumenal vesicle, membrane fragment, intralumenal endosomal vesicle, endosomal-like vesicle, exocytosis vehicle, endosome vesicle, endosomal vesicle, apoptotic body, multivesicular body, secretory vesicle, phospholipid vesicle, liposomal vesicle, argosome, texasome, secresome, tolerosome, melanosome, oncosome, or exocytosed vehicle. Furthermore, although vesicles may be produced by different cellular processes, the methods of the invention are not limited to or reliant on any one mechanism, insofar as such vesicles are present in a biological sample and are capable of being characterized by the methods disclosed herein. Unless otherwise specified, methods that make use of a species of vesicle can be applied to other types of vesicles. Vesicles comprise spherical structures with a lipid bilayer similar to cell membranes which surrounds an inner compartment which can contain soluble components, sometimes referred to as the payload. In some embodiments, the methods of the invention make use of exosomes, which are small secreted vesicles of about 40-100 nm in diameter. For a review of membrane vesicles, including types and characterizations, see Thery et al., Nat Rev Immunol. 2009 August; 9(8):581-93. Some properties of different types of vesicles include those in Table 2:

TABLE 2
Vesicle Properties

| | | | | | | | Membrane | | Exosome- | | Apoptotic | |
|---|---|---|---|---|---|---|---|---|---|---|---|---|
| Feature | Exosomes | | Microvesicles | | Ectosomes | | particles | | like vesicles | | vesicles | |
| Size | 50-100 | nm | 100-1,000 | nm | 50-200 | nm | 50-80 | nm | 20-50 | nm | 50-500 | nm |
| Density in | 1.13-1.19 | g/ml | | | | | 1.04-1.07 | g/ml | 1.1 | g/ml | 1.16-1.28 | g/ml |
| sucrose | | | | | | | | | | | | |
| EM | Cup shape | | Irregular | | Bilamellar | | Round | | Irregular | | Heterogeneous | |
| appearance | | | shape, | | round | | | | shape | | | |
| | | | electron | | structures | | | | | | | |
| | | | dense | | | | | | | | | |
| Sedimentation | 100,000 | g | 10,000 | g | 160,000-200,000 | g | 100,000-200,000 | g | 175,000 | g | 1,200 | g, |
| | | | | | | | | | | | 10,000 | g, |
| | | | | | | | | | | | 100,000 | g |

| | | | | |
|---|---|---|---|---|
| Lipid | Enriched in | Expose PPS | Enriched in | No lipid |
| composition | cholesterol, | | cholesterol | rafts |
| | sphingomyelin | | and | |
| | and ceramide; | | diacylglycerol; | |
| | contains lipid | | expose PPS | |
| | rafts; expose | | | |
| | PPS | | | |

| Major protein | Tetraspanins | Integrins, | CR1 and | CD133; no | TNFRI | Histones |
|---|---|---|---|---|---|---|
| markers | (e.g., CD63, | selectins and | proteolytic | CD63 | | |
| | CD9), Alix, | CD40 ligand | enzymes; no | | | |
| | TSG101 | | CD63 | | | |
| Intracellular | Internal | Plasma | Plasma | Plasma | | |
| origin | compartments | membrane | membrane | membrane | | |
| | (endosomes) | | | | | |

Abbreviations:
phosphatidylserine (PPS);
electron microscopy (EM)

[0091] Vesicles include shed membrane bound particles, or “microparticles,” that are derived from either the plasma membrane or an internal membrane. Vesicles can be released into the extracellular environment from cells. Cells releasing vesicles include without limitation cells that originate from, or are derived from, the ectoderm, endoderm, or mesoderm. The cells may have undergone genetic, environmental, and/or any other variations or alterations. For example, the cell can be tumor cells. A vesicle can reflect any changes in the source cell, and thereby reflect changes in the originating cells, e.g., cells having various genetic mutations. In one mechanism, a vesicle is generated intracellularly when a segment of the cell membrane spontaneously invaginates and is ultimately exocytosed (see for example, Keller et al., Immunol. Lett. 107 (2): 102-8 (2006)). Vesicles also include cell-derived structures bounded by a lipid bilayer membrane arising from both herniated evagination (blebbing) separation and sealing of portions of the plasma membrane or from the export of any intracellular membrane-bounded vesicular structure containing various membrane-associated proteins of tumor origin, including surface-bound molecules derived from the host circulation that bind selectively to the tumor-derived proteins together with molecules contained in the vesicle lumen, including but not limited to tumor-derived microRNAs or intracellular proteins. Blebs and blebbing are further described in Charras et al., Nature Reviews Molecular and Cell Biology, Vol. 9, No. 11, p. 730-736 (2008). A vesicle shed into circulation or bodily fluids from tumor cells may be referred to as a “circulating tumor-derived vesicle.” When such vesicle is an exosome, it may be referred to as a circulating-tumor derived exosome (CTE). In some instances, a vesicle can be derived from a specific cell of origin. CTE, as with a cell-of-origin specific vesicle, typically have one or more unique biomarkers that permit isolation of the CTE or cell-of-origin specific vesicle, e.g., from a bodily fluid and sometimes in a specific manner. For example, a cell or tissue specific markers are used to identify the cell of origin. Examples of such cell or tissue specific markers are disclosed herein and can further be accessed in the Tissue-specific Gene Expression and Regulation (TiGER) Database, available at bioinfo.wilmer.jhu.edu/tiger/; Liu et al. (2008) TiGER: a database for tissue-specific gene expression and regulation. BMC Bioinformatics. 9:271; TissueDistributionDBs, available at genome.dkfz-heidelberg.de/menu/tissue_db/index.html.

[0092] A vesicle can have a diameter of greater than about 10 nm, 20 nm, or 30 nm. A vesicle can have a diameter of greater than 40 nm, 50 nm, 100 nm, 200 nm, 500 nm, 1000 nm, 1500 nm, 2000 nm or greater than 10,000 nm. A vesicle can have a diameter of about 20-2000 nm, about 20-1500 nm, about 30-1000 nm, about 30-800 nm, about 30-200 nm, or about 30-100 nm. In some embodiments, the vesicle has a diameter of less than 10,000 nm, 2000 nm, 1500 nm, 1000 nm, 800 nm, 500 nm, 200 nm, 100 nm, 50 nm, 40 nm, 30 nm, 20 nm or less than 10 nm. As used herein the term “about” in reference to a numerical value means that variations of 10% above or below the numerical value are within the range ascribed to the specified value. Typical sizes for various types of vesicles are shown in Table 2. Vesicles can be assessed to measure the diameter of a single vesicle or any number of vesicles. For example, the range of diameters of a vesicle population or an average diameter of a vesicle population can be determined. Vesicle diameter can be assessed using methods known in the art, e.g., imaging technologies such as electron microscopy. In an embodiment, a diameter of one or more vesicles is determined using optical particle detection. See, e.g., U.S. Pat. No. 7,751,053, entitled “Optical Detection and Analysis of Particles” and issued Jul. 6, 2010; and U.S. Pat. No. 7,399,600, entitled “Optical Detection and Analysis of Particles” and issued Jul. 15, 2010.

[0093] In some embodiments, the methods of the invention comprise assessing vesicles directly such as in a biological sample without prior isolation, purification, or concentration from the biological sample. For example, the amount of vesicles in the sample can by itself provide a biosignature that provides a diagnostic, prognostic or theranostic determination. Alternatively, the vesicle in the sample may be isolated, captured, purified, or concentrated from a sample prior to analysis. As noted, isolation, capture or purification as used herein comprises partial isolation, partial capture or partial purification apart from other components in the sample. Vesicle isolation can be performed using various techniques as described herein, e.g., chromatography, filtration, centrifugation, flow cytometry, affinity capture (e.g., to a planar surface or bead), and/or using microfluidics. FIGS. 9B-C present an overview of a method of the invention for assessing microvesicles using an aptamer pool.

[0094] Vesicles such as exosomes can be assessed to provide a phenotypic characterization by comparing vesicle characteristics to a reference. In some embodiments, surface antigens on a vesicle are assessed. The surface antigens can provide an indication of the anatomical origin and/or cellular of the vesicles and other phenotypic information, e.g., tumor status. For example, wherein vesicles found in a patient sample, e.g., a bodily fluid such as blood, serum or plasma, are assessed for surface antigens indicative of colorectal origin and the presence of cancer. The surface antigens may comprise any informative biological entity that can be detected on the vesicle membrane surface, including without limitation surface proteins, lipids, carbohydrates, and other membrane components. For example, positive detection of colon derived vesicles expressing tumor antigens can indicate that the patient has colorectal cancer. As such, methods of the invention can be used to characterize any disease or condition associated with an anatomical or cellular origin, by assessing, for example, disease-specific and cell-specific biomarkers of one or more vesicles obtained from a subject.

[0095] In another embodiment, the methods of the invention comprise assessing one or more vesicle payload to provide a phenotypic characterization. The payload with a vesicle comprises any informative biological entity that can be detected as encapsulated within the vesicle, including without limitation proteins and nucleic acids, e.g., genomic or cDNA, mRNA, or functional fragments thereof, as well as microRNAs (miRs). In addition, methods of the invention are directed to detecting vesicle surface antigens (in addition or exclusive to vesicle payload) to provide a phenotypic characterization. For example, vesicles can be characterized by using binding agents (e.g., antibodies or aptamers) that are specific to vesicle surface antigens, and the bound vesicles can be further assessed to identify one or more payload components disclosed therein. As described herein, the levels of vesicles with surface antigens of interest or with payload of interest can be compared to a reference to characterize a phenotype. For example, overexpression in a sample of cancer-related surface antigens or vesicle payload, e.g., a tumor associated mRNA or microRNA, as compared to a reference, can indicate the presence of cancer in the sample. The biomarkers assessed can be present or absent, increased or reduced based on the selection of the desired target sample and comparison of the target sample to the desired reference sample. Non-limiting examples of target samples include: disease; treated/not-treated; different time points, such as a in a longitudinal study; and non-limiting examples of reference sample: non-disease; normal; different time points; and sensitive or resistant to candidate treatment(s).

### Diagnostic Methods

[0096] The aptamers of the invention can be used in various methods to assess presence or level of biomarkers in a biological sample, e.g., biological entities of interest such as proteins, nucleic acids, or microvesicles. The biological entities can be part of larger entities, such as complexes, cells or tissue, or can be circulating in bodily fluids. The aptamers may be used to assess presence or level of the target molecule/s. Therefore, in various embodiments of the invention directed to diagnostics, prognostics or theranostics, one or more aptamers of the invention are configured in a ligand-target based assay, where one or more aptamer of the invention is contacted with a selected biological sample, where the or more aptamer associates with or binds to its target molecules. Aptamers of the invention are used to identify candidate biosignatures based on the biological samples assessed and biomarkers detected. In some embodiments, aptamer or oligonucleotide probes, or libraries thereof, may themselves provide a biosignature for a particular condition or disease. A biosignature refers to a biomarker profile of a biological sample comprising a presence, level or other characteristic that can be assessed (including without limitation a sequence, mutation, rearrangement, translocation, deletion, epigenetic modification, methylation, post-translational modification, allele, activity, complex partners, stability, half life, and the like) of one or more biomarker of interest. Biosignatures can be used to evaluate diagnostic and/or prognostic criteria such as presence of disease, disease staging, disease monitoring, disease stratification, or surveillance for detection, metastasis or recurrence or progression of disease. For example, methods of the invention using aptamers against microvesicle surface antigen are useful for correlating a biosignature comprising microvesicle antigens to a selected condition or disease. As another example, methods of the invention using aptamers against tissue are useful for correlating a biosignature comprising tissue antigens to a selected condition or disease. A biosignature can also be used clinically in making decisions concerning treatment modalities including therapeutic intervention. A biosignature can further be used clinically to make treatment decisions, including whether to perform surgery or what treatment standards should be used along with surgery (e.g., either pre-surgery or post-surgery). As an illustrative example, a biosignature of circulating biomarkers or biomarkers displayed on fixed tissue may indicate an aggressive form of cancer and may call for a more aggressive surgical procedure and/or more aggressive therapeutic regimen to treat the patient.

[0097] Characterizing a phenotype, such as providing a diagnosis, prognosis or theranosis, may comprise comparing a biosignature to a reference. For example, the level of a biomarker in a diseased state may be elevated or reduced as compared to a reference control without the disease, or with a different state of the disease. An oligonucleotide probe library according to the invention may be engineered to detect a certain phenotype and not another phenotype. As a non-limiting example, the oligonucleotide probe library may stain a cancer tissue using an immunoassay but not a non-cancer reference tissue. Alternately, the oligonucleotide probe library may stain a cancer tissue using an immunoassay at a detectable higher level than a non-cancer reference tissue. One of skill will appreciate that one may engineer an oligonucleotide probe library to stain a non-cancer tissue using an immunoassay at a detectable higher level than cancer tissue as well.

[0098] A biosignature can be used in any methods disclosed herein, e.g., to assess whether a subject is afflicted with disease, is at risk for developing disease or to assess the stage or progression of the disease. For example, a biosignature can be used to assess whether a subject has prostate cancer, colon cancer, or other cancer as described herein. See, e.g., section labeled “Phenotypes.” Furthermore, a biosignature can be used to determine a stage of a disease or condition, such as cancer.

[0099] A biosignature/biomarker profile comprising a microvesicle can include assessment of payload within the microvesicle. For example, one or more aptamer of the invention can be used to capture a microvesicle population, thereby providing readout of microvesicle antigens, and then the payload content within the captured microvesicles can be assessed, thereby providing further biomarker readout of the payload content.

[0100] A biosignature for characterizing a phenotype may comprise any number of useful criteria. The term “phenotype” as used herein can mean any trait or characteristic that is attributed to a biosignature/biomarker profile. A phenotype can be detected or identified in part or in whole using the compositions and/or methods of the invention. In some embodiments, at least one criterion is used for each biomarker. In some embodiments, at least 1, 2, 3, 4, 5, 6, 7, 8, 9, 10, 15, 20, 30, 40, 50, 60, 70, 80, 90 or at least 100 criteria are used. For example, for the characterizing of a cancer, a number of different criteria can be used when the subject is diagnosed with a cancer: 1) if the amount of a biomarker in a sample from a subject is higher than a reference value; 2) if the amount of a biomarker within specific cell types or specific microvesicles (e.g., microvesicles derived from a specific tissue or organ) is higher than a reference value; or 3) if the amount of a biomarker within a cell, tissue or microvesicle with one or more cancer specific biomarkers is higher than a reference value. Similar rules can apply if the amount of the biomarkers is less than or the same as the reference. The method can further include a quality control measure, such that the results are provided for the subject if the samples meet the quality control measure. In some embodiments, if the criteria are met but the quality control is questionable, the subject is reassessed.

[0101] A biosignature can be used in therapy related diagnostics to provide tests useful to diagnose a disease or choose the correct treatment regimen, such as provide a theranosis. Theranostics includes diagnostic testing that provides the ability to affect therapy or treatment of a diseased state. Theranostics testing provides a theranosis in a similar manner that diagnostics or prognostic testing provides a diagnosis or prognosis, respectively. As used herein, theranostics encompasses any desired form of therapy related testing, including predictive medicine, personalized medicine, integrated medicine, pharmacodiagnostics and Dx/Rx partnering. Therapy related tests can be used to predict and assess drug response in individual subjects, i.e., to provide personalized medicine. Predicting a drug response can be determining whether a subject is a likely responder or a likely non-responder to a candidate therapeutic agent, e.g., before the subject has been exposed or otherwise treated with the treatment. Assessing a drug response can be monitoring a response to a drug, e.g., monitoring the subject's improvement or lack thereof over a time course after initiating the treatment. Therapy related tests are useful to select a subject for treatment who is particularly likely to benefit from the treatment or to provide an early and objective indication of treatment efficacy in an individual subject. Thus, a biosignature as disclosed herein may indicate that treatment should be altered to select a more promising treatment, thereby avoiding the great expense of delaying beneficial treatment and avoiding the financial and morbidity costs of administering an ineffective drug(s).

[0102] The compositions and methods of the invention can be used to identify or detect a biosignature associated with a variety of diseases and disorders, which include, but are not limited to cardiovascular disease, cancer, infectious diseases, sepsis, neurological diseases, central nervous system related diseases, endovascular related diseases, and autoimmune related diseases. Therapy related diagnostics also aid in the prediction of drug toxicity, drug resistance or drug response. Therapy related tests may be developed in any suitable diagnostic testing format, which include, but are not limited to, e.g., immunohistochemical tests, clinical chemistry, immunoassay, cell-based technologies, nucleic acid tests or body imaging methods. Therapy related tests can further include but are not limited to, testing that aids in the determination of therapy, testing that monitors for therapeutic toxicity, or response to therapy testing. Thus, a biosignature can be used to predict or monitor a subject's response to a treatment. A biosignature can be determined at different time points for a subject after initiating, removing, or altering a particular treatment.

[0103] In some embodiments, the compositions and methods of the invention provide for a determination or prediction as to whether a subject is responding to a treatment is made based on a change in the amount of one or more components of a biosignature (e.g., biomarkers of interest), an amount of one or more components of a particular biosignature, or the biosignature detected for the components. In another embodiment, a subject's condition is monitored by determining a biosignature at different time points. The progression, regression, or recurrence of a condition is determined. Response to therapy can also be measured over a time course. Thus, the invention provides a method of monitoring a status of a disease or other medical condition in a subject, comprising isolating or detecting a biosignature from a biological sample from the subject, detecting the overall amount of the components of a particular biosignature, or detecting the biosignature of one or more components (such as the presence, absence, or expression level of a biomarker). The biosignatures are used to monitor the status of the disease or condition.

[0104] One or more novel biosignatures can also be identified by the methods of the invention. For example, one or more vesicles can be isolated from a subject that responds to a drug treatment or treatment regimen and compared to a reference, such as another subject that does not respond to the drug treatment or treatment regimen. Differences between the biosignatures can be determined and used to identify other subjects as responders or non-responders to a particular drug or treatment regimen.

[0105] In some embodiments, a biosignature is used to determine whether a particular disease or condition is resistant to a drug, in which case a physician need not waste valuable time with such drug treatment. To obtain early validation of a drug choice or treatment regimen, a biosignature is determined for a sample obtained from a subject. The biosignature is used to assess whether the particular subject's disease has the biomarker associated with drug resistance. Such a determination enables doctors to devote critical time as well as the patient's financial resources to effective treatments.

[0106] Biosignatures can be used in the theranosis of diseases such as cancer, e.g., identifying whether a subject suffering from a disease is a likely responder or non-responder to a particular treatment. The subject methods can be used to theranose cancers including without limitation those listed herein, e.g., in the “Phenotypes” section herein. These include without limitation lung cancer, non-small cell lung cancer small cell lung cancer (including small cell carcinoma (oat cell cancer), mixed small cell/large cell carcinoma, and combined small cell carcinoma), colon cancer, breast cancer, prostate cancer, liver cancer, pancreatic cancer, brain cancer, kidney cancer, ovarian cancer, stomach cancer, melanoma, bone cancer, gastric cancer, breast cancer, glioma, glioblastoma, hepatocellular carcinoma, papillary renal carcinoma, head and neck squamous cell carcinoma, leukemia, lymphoma, myeloma, or other solid tumors.

[0107] A biosignature of circulating biomarkers, including markers associated with a component present in a biological sample (e.g., cell, cell-fragment, cell-derived microvesicle), in a sample from a subject suffering from a cancer can be used select a candidate treatment for the subject. The biosignature can be determined according to the methods of the invention presented herein. In some embodiments, the candidate treatment comprises a standard of care for the cancer. The treatment can be a cancer treatment such as radiation, surgery, chemotherapy or a combination thereof. The cancer treatment can be a therapeutic such as anti-cancer agents and chemotherapeutic regimens. Further drug associations and rules that are used in embodiments of the invention are found in PCT/US2007/69286, filed May 18, 2007; PCT/US2009/60630, filed Oct. 14, 2009; PCT/2010/000407, filed Feb. 11, 2010; PCT/US12/41393, filed Jun. 7, 2012; PCT/US2013/073184, filed Dec. 4, 2013; PCT/US2010/54366, filed Oct. 27, 2010; PCT/US11/67527, filed Dec. 28, 2011; PCT/US15/13618, filed Jan. 29, 2015; and PCT/US16/20657, filed Mar. 3, 2016; each of which applications is incorporated herein by reference in its entirety.

### Biomarkers

[0108] The methods and compositions of the invention can be used in assays to detect the presence or level of one or more biomarker of interest. Given the adaptable nature of the invention, the biomarker can be any useful biomarker including those disclosed herein or in the literature, or to be discovered. In an embodiment, the biomarker comprises a protein or polypeptide. As used herein, “protein,” “polypeptide” and “peptide” are used interchangeably unless stated otherwise. The biomarker can be a nucleic acid, including DNA, RNA, and various subspecies of any thereof as disclosed herein or known in the art. The biomarker can comprise a lipid. The biomarker can comprise a carbohydrate. The biomarker can also be a complex, e.g., a complex comprising protein, nucleic acids, lipids and/or carbohydrates. In some embodiments, the biomarker comprises a microvesicle.

[0109] In an embodiment, the invention provides a method wherein a pool of aptamers is used to assess the presence and/or level of a population of cells or microvesicles of interest without knowing the precise antigen targeted by each member of the pool. See, e.g., FIGS. 9B-C. In other cases, biomarkers associated with cells or microvesicles are assessed according to the methods of the invention. The oligonucleotide pools of the invention can also used to assess cells and tissue whether or not the target biomarkers of the individual oligonucleotide aptamers are known. The invention further includes determining the targets of such oligonucleotide aptamer pools and members thereof.

[0110] A biosignature may comprise one type of biomarker or multiple types of biomarkers. As a non-limiting example, a biosignature can comprise multiple proteins, multiple nucleic acids, multiple lipids, multiple carbohydrates, multiple biomarker complexes, multiple microvesicles, or a combination of any thereof. For example, the biosignature may comprise one or more microvesicle, one or more protein, and one or more microRNA, wherein the one or more protein and/or one or more microRNA is optionally in association with the microvesicle as a surface antigen and/or payload, as appropriate. As another example, the biosignature may be an oligonucleotide pool signature, and the members of the oligonucleotide pool can associate with various biomarker or multiple types of biomarkers.

[0111] In some embodiments, microvesicles are detected using vesicle surface antigens. A commonly expressed vesicle surface antigen can be referred to as a “housekeeping protein,” or general vesicle biomarker. The biomarker can be CD63, CD9, CD81, CD82, CD37, CD53, Rab-5b, Annexin V or MFG-E8. Tetraspanins, a family of membrane proteins with four transmembrane domains, can be used as general vesicle biomarkers. The tetraspanins include CD151, CD53, CD37, CD82, CD81, CD9 and CD63. There have been over 30 tetraspanins identified in mammals, including the TSPAN1 (TSP-1), TSPAN2 (TSP-2), TSPAN3 (TSP-3), TSPAN4 (TSP-4, NAG-2), TSPAN5 (TSP-5), TSPAN6 (TSP-6), TSPAN7 (CD231, TALLA-1, A15), TSPAN8 (CO-029), TSPAN9 (NET-5), TSPAN10 (Oculospanin), TSPAN11 (CD151-like), TSPAN12 (NET-2), TSPAN13 (NET-6), TSPAN14, TSPAN15 (NET-7), TSPAN16 (TM4-B), TSPAN17, TSPAN18, TSPAN19, TSPAN20 (UP1b, UPK1B), TSPAN21 (UP1a, UPK1A), TSPAN22 (RDS, PRPH2), TSPAN23 (ROM1), TSPAN24 (CD151), TSPAN25 (CD53), TSPAN26 (CD37), TSPAN27 (CD82), TSPAN28 (CD81), TSPAN29 (CD9), TSPAN30 (CD63), TSPAN31 (SAS), TSPAN32 (TSSC6), TSPAN33, and TSPAN34. Other commonly observed vesicle markers include those listed in Table 3. One or more of these proteins can be useful biomarkers for the characterizing a phenotype using the subject methods and compositions.

TABLE 3
Proteins Observed in Microvesicles from Multiple Cell Types

| Class | Protein |
|---|---|
| Antigen Presentation | MHC class I, MHC class II, Integrins, Alpha 4 beta 1, Alpha M beta 2, |
| | Beta 2 |
| Immunoglobulin family | ICAM1/CD54, P-selection |
| Cell-surface peptidases | Dipeptidylpeptidase IV/CD26, Aminopeptidase n/CD13 |
| Tetraspanins | CD151, CD53, CD37, CD82, CD81, CD9 and CD63 |
| Heat-shock proteins | Hsp70, Hsp84/90 |
| Cytoskeletal proteins | Actin, Actin-binding proteins, Tubulin |
| Membrane transport | Annexin I, Annexin II, Annexin IV, Annexin V, Annexin VI, |
| and fusion | RAB7/RAP1B/RADGDI |
| Signal transduction | Gi2alpha/14-3-3, CBL/LCK |
| Abundant membrane | CD63, GAPDH, CD9, CD81, ANXA2, ENO1, SDCBP, MSN, MFGE8, |
| proteins | EZR, GK, ANXA1, LAMP2, DPP4, TSG101, HSPA1A, GDI2, CLTC, |
| | LAMP1, Cd86, ANPEP, TFRC, SLC3A2, RDX, RAP1B, RAB5C, |
| | RAB5B, MYH9, ICAM1, FN1, RAB11B, PIGR, LGALS3, ITGB1, |
| | EHD1, CLIC1, ATP1A1, ARF1, RAP1A, P4HB, MUC1, KRT10, HLA-A, |
| | FLOT1, CD59, C1orf58, BASP1, TACSTD1, STOM |
| Other Transmembrane | Cadherins: CDH1, CDH2, CDH12, CDH3, Deomoglein, DSG1, DSG2, |
| Proteins | DSG3, DSG4, Desmocollin, DSC1, DSC2, DSC3, Protocadherins, |
| | PCDH1, PCDH10, PCDH11x, PCDH11y, PCDH12, FAT, FAT2, FAT4, |
| | PCDH15, PCDH17, PCDH18, PCDH19; PCDH20; PCDH7, PCDH8, |
| | PCDH9, PCDHA1, PCDHA10, PCDHA11, PCDHA12, PCDHA13, |
| | PCDHA2, PCDHA3, PCDHA4, PCDHA5, PCDHA6, PCDHA7, |
| | PCDHA8, PCDHA9, PCDHAC1, PCDHAC2, PCDHB1, PCDHB10, |
| | PCDHB11, PCDHB12, PCDHB13, PCDHB14, PCDHB15, PCDHB16, |
| | PCDHB17, PCDHB18, PCDHB2, PCDHB3, PCDHB4, PCDHB5, |
| | PCDHB6, PCDHB7, PCDHB8, PCDHB9, PCDHGA1, PCDHGA10, |
| | PCDHGA11, PCDHGA12, PCDHGA2; PCDHGA3, PCDHGA4, |
| | PCDHGA5, PCDHGA6, PCDHGA7, PCDHGA8, PCDHGA9, |
| | PCDHGB1, PCDHGB2, PCDHGB3, PCDHGB4, PCDHGB5, |
| | PCDHGB6, PCDHGB7, PCDHGC3, PCDHGC4, PCDHGC5, CDH9 |
| | (cadherin 9, type 2 (T1-cadherin)), CDH10 (cadherin 10, type 2 (T2- |
| | cadherin)), CDH5 (VE-cadherin (vascular endothelial)), CDH6 (K- |
| | cadherin (kidney)), CDH7 (cadherin 7, type 2), CDH8 (cadherin 8, type |
| | 2), CDH11 (OB-cadherin (osteoblast)), CDH13 (T-cadherin - H-cadherin |
| | (heart)), CDH15 (M-cadherin (myotubule)), CDH16 (KSP-cadherin), |
| | CDH17 (LI cadherin (liver-intestine)), CDH18 (cadherin 18, type 2), |
| | CDH19 (cadherin 19, type 2), CDH20 (cadherin 20, type 2), CDH23 |
| | (cadherin 23, (neurosensory epithelium)), CDH10, CDH11, CDH13, |
| | CDH15, CDH16, CDH17, CDH18, CDH19, CDH22, CDH23, CDH24, |
| | CDH26, CDH28, CDH4, CDH5, CDH6, CDH7, CDH8, CDH9, |
| | CELSR1, CELSR2, CELSR3, CLSTN1, CLSTN2, CLSTN3, DCHS1, |
| | DCHS2, LOC389118, PCLKC, RESDA1, RET |

[0112] Any of the types of biomarkers described herein can be used and/or assessed via the subject methods and compositions. Exemplary biomarkers include without limitation those in Table 4. The markers can be detected as protein, RNA or DNA as appropriate, which can be circulating freely or in a complex with other biological molecules. As desired, the markers in Table 4 can also be used to detect tumor tissue or for capture and/or detection of vesicles for characterizing phenotypes as disclosed herein. In some cases, multiple capture and/or detectors are used to enhance the characterization. The markers can be detected as vesicle surface antigens and/or vesicle payload. The “Illustrative Class” indicates indications for which the markers are known markers. Those of skill will appreciate that the markers can also be used in alternate settings in certain instances. For example, a marker which can be used to characterize one type of disease may also be used to characterize another disease as appropriate. Consider a non-limiting example of a tumor marker which can be used as a biomarker for tumors from various lineages. The biomarker references in Tables 3 and 4, or through the specification, are those commonly used in the art. Gene aliases and descriptions can be found using a variety of online databases, including GeneCards® (www.genecards.org), HUGO Gene Nomenclature (www.genenames.org), Entrez Gene (www.ncbi.nlm.nih.gov/entrez/query.fcgi?db=gene), UniProtKB/Swiss-Prot (www.uniprot.org), UniProtKB/TrEMBL (www.uniprot.org), OMIM (www.ncbi.nlm.nih.gov/entrez/query.fcgi?db=OMIM), GeneLoc (genecards.weizmann.ac.il/geneloc/), and Ensembl (www.ensembl.org). Generally, gene symbols and names below correspond to those approved by HUGO, and protein names are those recommended by UniProtKB/Swiss-Prot. Common alternatives are provided as well. Where a protein name indicates a precursor, the mature protein is also implied. Throughout the application, gene and protein symbols may be used interchangeably and the meaning can be derived from context as necessary.

TABLE 4
Illustrative Biomarkers

| Illustrative | |
|---|---|
| Class | Biomarkers |
| Drug associated | ABCC1, ABCG2, ACE2, ADA, ADH1C, ADH4, AGT, AR, AREG, ASNS, BCL2, |
| targets and | BCRP, BDCA1, beta III tubulin, BIRC5, B-RAF, BRCA1, BRCA2, CA2, caveolin, |
| prognostic | CD20, CD25, CD33, CD52, CDA, CDKN2A, CDKN1A, CDKN1B, CDK2, |
| markers | CDW52, CES2, CK 14, CK 17, CK 5/6, c-KIT, c-Met, c-Myc, COX-2, Cyclin D1, |
| | DCK, DHFR, DNMT1, DNMT3A, DNMT3B, E-Cadherin, ECGF1, EGFR, EML4- |
| | ALK fusion, EPHA2, Epiregulin, ER, ERBR2, ERCC1, ERCC3, EREG, ESR1, |
| | FLT1, folate receptor, FOLR1, FOLR2, FSHB, FSHPRH1, FSHR, FYN, GART, |
| | GNA11, GNAQ, GNRH1, GNRHR1, GSTP1, HCK, HDAC1, hENT-1, Her2/Neu, |
| | HGF, HIF1A, HIG1, HSP90, HSP90AA1, HSPCA, IGF-1R, IGFRBP, IGFRBP3, |
| | IGFRBP4, IGFRBP5, IL13RA1, IL2RA, KDR, Ki67, KIT, K-RAS, LCK, LTB, |
| | Lymphotoxin Beta Receptor, LYN, MET, MGMT, MLH1, MMR, MRP1, MS4A1, |
| | MSH2, MSH5, Myc, NFKB1, NFKB2, NFKBIA, NRAS, ODC1, OGFR, p16, p21, |
| | p27, p53, p95, PARP-1, PDGFC, PDGFR, PDGFRA, PDGFRB, PGP, PGR, PI3K, |
| | POLA, POLA1, PPARG, PPARGC1, PR, PTEN, PTGS2, PTPN12, RAF1, RARA, |
| | ROS1, RRM1, RRM2, RRM2B, RXRB, RXRG, SIK2, SPARC, SRC, SSTR1, |
| | SSTR2, SSTR3, SSTR4, SSTR5, Survivin, TK1, TLE3, TNF, TOP1, TOP2A, |
| | TOP2B, TS, TUBB3, TXN, TXNRD1, TYMS, VDR, VEGF, VEGFA, VEGFC, |
| | VHL, YES1, ZAP70 |
| Drug associated | ABL1, STK11, FGFR2, ERBB4, SMARCB1, CDKN2A, CTNNB1, FGFR1, FLT3, |
| targets and | NOTCH1, NPM1, SRC, SMAD4, FBXW7, PTEN, TP53, AKT1, ALK, APC, |
| prognostic | CDH1, C-Met, HRAS, IDH1, JAK2, MPL, PDGFRA, SMO, VHL, ATM, CSF1R, |
| markers | FGFR3, GNAS, ERBB2, HNF1A, JAK3, KDR, MLH1, PTPN11, RB1, RET, c-Kit, |
| | EGFR, PIK3CA, NRAS, GNA11, GNAQ, KRAS, BRAF |
| Drug associated | ALK, AR, BRAF, cKIT, cMET, EGFR, ER, ERCC1, GNA11, HER2, IDH1, KRAS, |
| targets and | MGMT, MGMT promoter methylation, NRAS, PDGFRA, Pgp, PIK3CA, PR, |
| prognostic | PTEN, ROS1, RRM1, SPARC, TLE3, TOP2A, TOPO1, TS, TUBB3, VHL |
| markers | |
| Drug associated | ABL1, AKT1, ALK, APC, AR, ATM, BRAF, BRAF, BRCA1, BRCA2, CDH1, |
| targets | cKIT, cMET, CSF1R, CTNNB1, EGFR, EGFR (H-score), EGFRvIII, ER, ERBB2 |
| | (HER2), ERBB4, ERCC1, FBXW7, FGFR1, FGFR2, FLT3, GNA11, GNAQ, |
| | GNAS, HER2, HNF1A, HRAS, IDH1, IDH2, JAK2, JAK3, KDR (VEGFR2), |
| | KRAS, MGMT, MGMT Promoter Methylation, microsatellite instability (MSI), |
| | MLH1, MPL, MSH2, MSH6, NOTCH1, NPM1, NRAS, PD-1, PDGFRA, PD-L1, |
| | Pgp, PIK3CA, PMS2, PR, PTEN, PTPN11, RB1, RET, ROS1, RRM1, SMAD4, |
| | SMARCB1, SMO, SPARC, STK11, TLE3, TOP2A, TOPO1, TP53, TS, TUBB3, |
| | VHL |
| Drug associated | 1p19q co-deletion, ABL1, AKT1, ALK, APC, AR, ARAF, ATM, BAP1, BRAF, |
| targets | BRCA1, BRCA2, CDH1, CHEK1, CHEK2, cKIT, cMET, CSF1R, CTNNB1, |
| | DDR2, EGFR, EGFRvIII, ER, ERBB2 (HER2), ERBB3, ERBB4, ERCC1, FBXW7, |
| | FGFR1, FGFR2, FLT3, GNA11, GNAQ, GNAS, H3K36me3, HER2, HNF1A, |
| | HRAS, IDH1, IDH2, JAK2, JAK3, KDR (VEGFR2), KRAS, MDMT, MGMT, |
| | MGMT Methylation, Microsatellite instability, MLH1, MPL, MSH2, MSH6, NF1, |
| | NOTCH1, NPM1, NRAS, NY-ESO-1, PD-1, PDGFRA, PD-L1, Pgp, PIK3CA, |
| | PMS2, PR, PTEN, PTPN11, RAF1, RB1, RET, ROS1, ROS1, RRM1, SMAD4, |
| | SMARCB1, SMO, SPARC, STK11, TLE3, TOP2A, TOPO1, TP53, TRKA, TS, |
| | TUBB3, VHL, WT1 |
| Drug associated | ABL1, AKT1, ALK, APC, AR, ATM, BRAF, BRAF, BRCA1, BRCA2, CDH1, |
| targets | cKIT, cMET, CSF1R, CTNNB1, EGFR, EGFR (H-score), EGFRvIII, ER, ERBB2 |
| | (HER2), ERBB4, ERCC1, FBXW7, FGFR1, FGFR2, FLT3, GNA11, GNAQ, |
| | GNAS, HER2, HNF1A, HRAS, IDH1, IDH2, JAK2, JAK3, KDR (VEGFR2), |
| | KRAS, MGMT, MGMT Promoter Methylation, microsatellite instability (MSI), |
| | MLH1, MPL, MSH2, MSH6, NOTCH1, NPM1, NRAS, PD-1, PDGFRA, PD-L1, |
| | Pgp, PIK3CA, PMS2, PR, PTEN, PTPN11, RB1, RET, ROS1, RRM1, SMAD4, |
| | SMARCB1, SMO, SPARC, STK11, TLE3, TOP2A, TOPO1, TP53, TS, TUBB3, |
| | VHL |
| Drug associated | 1p19q, ALK, ALK (2p23), Androgen Receptor, BRCA, cMET, EGFR, EGFR, |
| targets | EGFRvIII, ER, ERCC1, Her2, Her2/Neu, MGMT, MGMT Promoter Methylation, |
| | microsatellite instability (MSI), MLH1, MSH2, MSH6, PD-1, PD-L1, PMS2, PR, |
| | PTEN, ROS1, RRM1, TLE3, TOP2A, TOP2A, TOPO1, TS, TUBB3 |
| Drug associated | TOP2A, Chromosome 17 alteration, PBRM1 (PB1/BAF180), BAP1, SETD2 (ANTI- |
| targets | HISTONE H3), MDM2, Chromosome 12 alteration, ALK, CTLA4, CD3, NY-ESO- |
| | 1, MAGE-A, TP, EGFR |
| 5-aminosalicyclic | μ-protocadherin, KLF4, CEBPα |
| acid (5-ASA) | |
| efficacy | |
| Cancer treatment | AR, AREG (Amphiregulin), BRAF, BRCA1, cKIT, cMET, EGFR, EGFR |
| associated | w/T790M, EML4-ALK, ER, ERBB3, ERBB4, ERCC1, EREG, GNA11, GNAQ, |
| markers | hENT-1, Her2, Her2 Exon 20 insert, IGF1R, Ki67, KRAS, MGMT, MGMT |
| | methylation, MSH2, MSI, NRAS, PGP (MDR1), PIK3CA, PR, PTEN, ROS1, ROS1 |
| | translocation, RRM1, SPARC, TLE3, TOPO1, TOPO2A, TS, TUBB3, VEGFR2 |
| Cancer treatment | AR, AREG, BRAF, BRCA1, cKIT, cMET, EGFR, EGFR w/T790M, EML4-ALK, |
| associated | ER, ERBB3, ERBB4, ERCC1, EREG, GNA11, GNAQ, Her2, Her2 Exon 20 insert, |
| markers | IGFR1, Ki67, KRAS, MGMT-Me, MSH2, MSI, NRAS, PGP (MDR-1), PIK3CA, |
| | PR, PTEN, ROS1 translocation, RRM1, SPARC, TLE3, TOPO1, TOPO2A, TS, |
| | TUBB3, VEGFR2 |
| Colon cancer | AREG, BRAF, EGFR, EML4-ALK, ERCC1, EREG, KRAS, MSI, NRAS, PIK3CA, |
| treatment | PTEN, TS, VEGFR2 |
| associated | |
| markers | |
| Colon cancer | AREG, BRAF, EGFR, EML4-ALK, ERCC1, EREG, KRAS, MSI, NRAS, PIK3CA, |
| treatment | PTEN, TS, VEGFR2 |
| associated | |
| markers | |
| Melanoma | BRAF, cKIT, ERBB3, ERBB4, ERCC1, GNA11, GNAQ, MGMT, MGMT |
| treatment | methylation, NRAS, PIK3CA, TUBB3, VEGFR2 |
| associated | |
| markers | |
| Melanoma | BRAF, cKIT, ERBB3, ERBB4, ERCC1, GNA11, GNAQ, MGMT-Me, NRAS, |
| treatment | PIK3CA, TUBB3, VEGFR2 |
| associated | |
| markers | |
| Ovarian cancer | BRCA1, cMET, EML4-ALK, ER, ERBB3, ERCC1, hENT-1, HER2, IGF1R, |
| treatment | PGP(MDR1), PIK3CA, PR, PTEN, RRM1, TLE3, TOPO1, TOPO2A, TS |
| associated | |
| markers | |
| Ovarian cancer | BRCA1, cMET, EML4-ALK (translocation), ER, ERBB3, ERCC1, HER2, PIK3CA, |
| treatment | PR, PTEN, RRM1, TLE3, TS |
| associated | |
| markers | |
| Breast cancer | BRAF, BRCA1, EGFR, EGFR T790M, EML4-ALK, ER, ERBB3, ERCC1, HER2, |
| treatment | Ki67, PGP (MDR1), PIK3CA, PR, PTEN, ROS1, ROS1 translocation, RRM1, |
| associated | TLE3, TOPO1, TOPO2A, TS |
| markers | |
| Breast cancer | BRAF, BRCA1, EGFR w/T790M, EML4-ALK, ER, ERBB3, ERCC1, HER2, Ki67, |
| treatment | KRAS, PIK3CA, PR, PTEN, ROS1 translocation, RRM1, TLE3, TOPO1, TOPO2A, |
| associated | TS |
| markers | |
| NSCLC cancer | BRAF, BRCA1, cMET, EGFR, EGFR w/T790M, EML4-ALK, ERCC1, Her2 Exon |
| treatment | 20 insert, KRAS, MSH2, PIK3CA, PTEN, ROS1 (trans), RRM1, TLE3, TS, |
| associated | VEGFR2 |
| markers | |
| NSCLC cancer | BRAF, cMET, EGFR, EGFR w/T790M, EML4-ALK, ERCC1, Her2 Exon 20 insert, |
| treatment | KRAS, MSH2, PIK3CA, PTEN, ROS1 translocation, RRM1, TLE3, TS |
| associated | |
| markers | |
| Mutated in | AKT1, ALK, APC, ATM, BRAF, CDH1, CDKN2A, c-Kit, C-Met, CSF1R, |
| cancers | CTNNB1, EGFR, ERBB2, ERBB4, FBXW7, FGFR1, FGFR2, FGFR3, FLT3, |
| | GNA11, GNAQ, GNAS, HNF1A, HRAS, IDH1, JAK2, JAK3, KDR, KRAS, |
| | MLH1, MPL, NOTCH1, NPM1, NRAS, PDGFRA, PIK3CA, PTEN, PTPN11, RB1, |
| | RET, SMAD4, SMARCB1, SMO, SRC, STK11, TP53, VHL |
| Mutated in | ALK, BRAF, BRCA1, BRCA2, EGFR, ERRB2, GNA11, GNAQ, IDH1, IDH2, |
| cancers | KIT, KRAS, MET, NRAS, PDGFRA, PIK3CA, PTEN, RET, SRC, TP53 |
| Mutated in | AKT1, HRAS, GNAS, MEK1, MEK2, ERK1, ERK2, ERBB3, CDKN2A, PDGFRB, |
| cancers | IFG1R, FGFR1, FGFR2, FGFR3, ERBB4, SMO, DDR2, GRB1, PTCH, SHH, PD1, |
| | UGT1A1, BIM, ESR1, MLL, AR, CDK4, SMAD4 |
| Mutated in | ABL, APC, ATM, CDH1, CSFR1, CTNNB1, FBXW7, FLT3, HNF1A, JAK2, |
| cancers | JAK3, KDR, MLH1, MPL, NOTCH1, NPM1, PTPN11, RB1, SMARCB1, STK11, |
| | VHL |
| Mutated in | ABL1, AKT1, AKT2, AKT3, ALK, APC, AR, ARAF, ARFRP1, ARID1A, ARID2, |
| cancers | ASXL1, ATM, ATR, ATRX, AURKA, AURKB, AXL, BAP1, BARD1, BCL2, |
| | BCL2L2, BCL6, BCOR, BCORL1, BLM, BRAF, BRCA1, BRCA2, BRIP1, BTK, |
| | CARD11, CBFB, CBL, CCND1, CCND2, CCND3, CCNE1, CD79A, CD79B, |
| | CDC73, CDH1, CDK12, CDK4, CDK6, CDK8, CDKN1B, CDKN2A, CDKN2B, |
| | CDKN2C, CEBPA, CHEK1, CHEK2, CIC, CREBBP, CRKL, CRLF2, CSF1R, |
| | CTCF, CTNNA1, CTNNB1, DAXX, DDR2, DNMT3A, DOT1L, EGFR, EMSY |
| | (C11orf30), EP300, EPHA3, EPHA5, EPHB1, ERBB2, ERBB3, ERBB4, ERG, |
| | ESR1, EZH2, FAM123B (WTX), FAM46C, FANCA, FANCC, FANCD2, FANCE, |
| | FANCF, FANCG, FANCL, FBXW7, FGF10, FGF14, FGF19, FGF23, FGF3, FGF4, |
| | FGF6, FGFR1, FGFR2, FGFR3, FGFR4, FLT1, FLT3, FLT4, FOXL2, GATA1, |
| | GATA2, GATA3, GID4 (C17orf39), GNA11, GNA13, GNAQ, GNAS, GPR124, |
| | GRIN2A, GSK3B, HGF, HRAS, IDH1, IDH2, IGF1R, IKBKE, IKZF1, IL7R, |
| | INHBA, IRF4, IRS2, JAK1, JAK2, JAK3, JUN, KAT6A (MYST3), KDM5A, |
| | KDM5C, KDM6A, KDR, KEAP1, KIT, KLHL6, KRAS, LRP1B, MAP2K1, |
| | MAP2K2, MAP2K4, MAP3K1, MCL1, MDM2, MDM4, MED12, MEF2B, MEN1, |
| | MET, MITF, MLH1, MLL, MLL2, MPL, MRE11A, MSH2, MSH6, MTOR, |
| | MUTYH, MYC, MYCL1, MYCN, MYD88, NF1, NF2, NFE2L2, NFKBIA, NKX2- |
| | 1, NOTCH1, NOTCH2, NPM1, NRAS, NTRK1, NTRK2, NTRK3, NUP93, PAK3, |
| | PALB2, PAX5, PBRM1, PDGFRA, PDGFRB, PDK1, PIK3CA, PIK3CG, PIK3R1, |
| | PIK3R2, PPP2R1A, PRDM1, PRKAR1A, PRKDC, PTCH1, PTEN, PTPN11, |
| | RAD50, RAD51, RAF1, RARA, RB1, RET, RICTOR, RNF43, RPTOR, RUNX1, |
| | SETD2, SF3B1, SMAD2, SMAD4, SMARCA4, SMARCB1, SMO, SOCS1, |
| | SOX10, SOX2, SPEN, SPOP, SRC, STAG2, STAT4, STK11, SUFU, TET2, |
| | TGFBR2, TNFAIP3, TNFRSF14, TOP1, TP53, TSC1, TSC2, TSHR, VHL, WISP3, |
| | WT1, XPO1, ZNF217, ZNF703 |
| Gene | ALK, BCR, BCL2, BRAF, EGFR, ETV1, ETV4, ETV5, ETV6, EWSR1, MLL, |
| rearrangement in | MYC, NTRK1, PDGFRA, RAF1, RARA, RET, ROS1, TMPRSS2 |
| cancer | |
| Cancer Related | ABL1, ACE2, ADA, ADH1C, ADH4, AGT, AKT1, AKT2, AKT3, ALK, APC, AR, |
| | ARAF, AREG, ARFRP1, ARID1A, ARID2, ASNS, ASXL1, ATM, ATR, ATRX, |
| | AURKA, AURKB, AXL, BAP1, BARD1, BCL2, BCL2L2, BCL6, BCOR, |
| | BCORL1, BCR, BIRC5 (survivin), BLM, BRAF, BRCA1, BRCA2, BRIP1, BTK, |
| | CA2, CARD11, CAV, CBFB, CBL, CCND1, CCND2, CCND3, CCNE1, CD33, |
| | CD52 (CDW52), CD79A, CD79B, CDC73, CDH1, CDK12, CDK2, CDK4, CDK6, |
| | CDK8, CDKN1B, CDKN2A, CDKN2B, CDKN2C, CEBPA, CES2, CHEK1, |
| | CHEK2, CIC, CREBBP, CRKL, CRLF2, CSF1R, CTCF, CTNNA1, CTNNB1, |
| | DAXX, DCK, DDR2, DHFR, DNMT1, DNMT3A, DNMT3B, DOT1L, EGFR, |
| | EMSY (C11orf30), EP300, EPHA2, EPHA3, EPHA5, EPHB1, ERBB2, ERBB3, |
| | ERBB4, ERBR2 (typo?), ERCC3, EREG, ERG, ESR1, ETV1, ETV4, ETV5, ETV6, |
| | EWSR1, EZH2, FAM123B (WTX), FAM46C, FANCA, FANCC, FANCD2, |
| | FANCE, FANCF, FANCG, FANCL, FBXW7, FGF10, FGF14, FGF19, FGF23, |
| | FGF3, FGF4, FGF6, FGFR1, FGFR2, FGFR3, FGFR4, FLT1, FLT3, FLT4, FOLR1, |
| | FOLR2, FOXL2, FSHB, FSHPRH1, FSHR, GART, GATA1, GATA2, GATA3, |
| | GID4 (C17orf39), GNA11, GNA13, GNAQ, GNAS, GNRH1, GNRHR1, GPR124, |
| | GRIN2A, GSK3B, GSTP1, HDAC1, HGF, HIG1, HNF1A, HRAS, HSPCA |
| | (HSP90), IDH1, IDH2, IGF1R, IKBKE, IKZF1, IL13RA1, IL2, IL2RA (CD25), |
| | IL7R, INHBA, IRF4, IRS2, JAK1, JAK2, JAK3, JUN, KAT6A (MYST3), KDM5A, |
| | KDM5C, KDM6A, KDR (VEGFR2), KEAP1, KIT, KLHL6, KRAS, LCK, LRP1B, |
| | LTB, LTBR, MAP2K1, MAP2K2, MAP2K4, MAP3K1, MAPK, MCL1, MDM2, |
| | MDM4, MED12, MEF2B, MEN1, MET, MGMT, MITF, MLH1, MLL, MLL2, |
| | MPL, MRE11A, MS4A1 (CD20), MSH2, MSH6, MTAP, MTOR, MUTYH, MYC, |
| | MYCL1, MYCN, MYD88, NF1, NF2, NFE2L2, NFKB1, NFKB2, NFKBIA, NGF, |
| | NKX2-1, NOTCH1, NOTCH2, NPM1, NRAS, NTRK1, NTRK2, NTRK3, NUP93, |
| | ODC1, OGFR, PAK3, PALB2, PAX5, PBRM1, PDGFC, PDGFRA, PDGFRB, |
| | PDK1, PGP, PGR (PR), PIK3CA, PIK3CG, PIK3R1, PIK3R2, POLA, PPARG, |
| | PPARGC1, PPP2R1A, PRDM1, PRKAR1A, PRKDC, PTCH1, PTEN, PTPN11, |
| | RAD50, RAD51, RAF1, RARA, RB1, RET, RICTOR, RNF43, ROS1, RPTOR, |
| | RRM1, RRM2, RRM2B, RUNX1, RXR, RXRB, RXRG, SETD2, SF3B1, SMAD2, |
| | SMAD4, SMARCA4, SMARCB1, SMO, SOCS1, SOX10, SOX2, SPARC, SPEN, |
| | SPOP, SRC, SST, SSTR1, SSTR2, SSTR3, SSTR4, SSTR5, STAG2, STAT4, |
| | STK11, SUFU, TET2, TGFBR2, TK1, TLE3, TMPRSS2, TNF, TNFAIP3, |
| | TNFRSF14, TOP1, TOP2, TOP2A, TOP2B, TP53, TS, TSC1, TSC2, TSHR, |
| | TUBB3, TXN, TYMP, VDR, VEGF (VEGFA), VEGFC, VHL, WISP3, WT1, XDH, |
| | XPO1, YES1, ZAP70, ZNF217, ZNF703 |
| Cancer Related | 5T4, ABI1, ABL1, ABL2, ACKR3, ACSL3, ACSL6, ACVR1B, ACVR2A, AFF1, |
| | AFF3, AFF4, AKAP9, AKT1, AKT2, AKT3, ALDH2, ALK, AMER1, |
| | ANG1/ANGPT1/TM7SF2, ANG2/ANGPT2/VPS51, APC, AR, ARAF, ARFRP1, |
| | ARHGAP26, ARHGEF12, ARID1A, ARID1B, ARID2, ARNT, ASPSCR1, ASXL1, |
| | ATF1, ATIC, ATM, ATP1A1, ATP2B3, ATR, ATRX, AURKA, AURKB, AXIN1, |
| | AXL, BAP1, BARD1, BBC3, BCL10, BCL11A, BCL11B, BCL2, BCL2L1, |
| | BCL2L11, BCL2L2, BCL3, BCL6, BCL7A, BCL9, BCOR, BCORL1, BCR, |
| | BIRC3, BLM, BMPR1A, BRAF, BRCA1, BRCA2, BRD3, BRD4, BRIP1, BTG1, |
| | BTK, BUB1B, c-KIT, C11orf30, c15orf21, C15orf65, C2orf44, CA6, CACNA1D, |
| | CALR, CAMTA1, CANT1, CARD11, CARS, CASC5, CASP8, CBFA2T3, CBFB, |
| | CBL, CBLB, CBLC, CCDC6, CCNB1IP1, CCND1, CCND2, CCND3, CCNE1, |
| | CD110, CD123, CD137, CD19, CD20, CD274, CD27L, CD38, CD4, CD74, |
| | CD79A, CD79B, CDC73, CDH1, CDH11, CDK12, CDK4, CDK6, CDK7, CDK8, |
| | CDK9, CDKN1A, CDKN1B, CDKN2A, CDKN2B, CDKN2C, CDX2, CEBPA, |
| | CHCHD7, CHD2, CHD4, CHEK1, CHEK2, CHIC2, Chk1, CHN1, CIC, CIITA, |
| | CLP1, CLTC, CLTCL1, CNBP, CNOT3, CNTRL, COL1A1, COPB1, CoREST, |
| | COX6C, CRAF, CREB1, CREB3L1, CREB3L2, CREBBP, CRKL, CRLF2, |
| | CRTC1, CRTC3, CSF1R, CSF3R, CTCF, CTLA4, CTNNA1, CTNNB1, CUL3, |
| | CXCR4, CYLD, CYP17A1, CYP2D6, DAXX, DDB2, DDIT3, DDR1, DDR2, |
| | DDX10, DDX5, DDX6, DEK, DICER1, DLL-4, DNAPK, DNM2, DNMT3A, |
| | DOT1L, EBF1, ECT2L, EGFR, EIF4A2, ELF4, ELK4, ELL, ELN, EML4, EP300, |
| | EPHA3, EPHA5, EPHA7, EPHA8, EPHB1, EPHB2, EPS15, ERBB2, ERBB3, |
| | ERBB4, ERC1, ERCC1, ERCC2, ERCC3, ERCC4, ERCC5, ERG, ERRFI1, ESR1, |
| | ETBR, ETV1, ETV4, ETV5, ETV6, EWSR1, EXT1, EXT2, EZH2, EZR, FAK, |
| | FAM46C, FANCA, FANCC, FANCD2, FANCE, FANCF, FANCG, FANCL, FAS, |
| | FAT1, FBXO11, FBXW7, FCRL4, FEV, FGF10, FGF14, FGF19, FGF2, FGF23, |
| | FGF3, FGF4, FGF6, FGFR1, FGFR1OP, FGFR2, FGFR3, FGFR4, FH, FHIT, |
| | FIP1L1, FKBP12, FLCN, FLI1, FLT1, FLT3, FLT4, FNBP1, FOXA1, FOXL2, |
| | FOXO1, FOXO3, FOXO4, FOXP1, FRS2, FSTL3, FUBP1, FUS, GABRA6, GAS7, |
| | GATA1, GATA2, GATA3, GATA4, GATA6, GID4, GITR, GLI1, GMPS, GNA11, |
| | GNA13, GNAQ, GNAS, GNRH1, GOLGA5, GOPC, GPC3, GPHN, GPR124, |
| | GRIN2A, GRM3, GSK3B, GUCY2C, H3F3A, H3F3B, HCK, HERPUD1, HEY1, |
| | HGF, HIP1, HIST1H3B, HIST1H4I, HLF, HMGA1, HMGA2, HMT, HNF1A, |
| | HNRNPA2B1, HOOK3, HOXA11, HOXA13, HOXA9, HOXC11, HOXC13, |
| | HOXD11, HOXD13, HRAS, HSD3B1, HSP90AA1, HSP90AB1, IAP, IDH1, IDH2, |
| | IGF1R, IGF2, IKBKE, IKZF1, IL2, IL21R, IL6, IL6ST, IL7R, INHBA, INPP4B, |
| | IRF2, IRF4, IRS2, ITGAV, ITGB1, ITK, JAK1, JAK2, JAK3, JAZF1, JUN, |
| | KAT6A, KAT6B, KCNJ5, KDM5A, KDM5C, KDM6A, KDR, KDSR, KEAP1, |
| | KEL, KIAA1549, KIF5B, KIR3DL1, KLF4, KLHL6, KLK2, KMT2A, KMT2C, |
| | KMT2D, KRAS, KTN1, LASP1, LCK, LCP1, LGALS3, LGR5, LHFP, LIFR, |
| | LMO1, LMO2, LOXL2, LPP, LRIG3, LRP1B, LSD1, LYL1, LYN, LZTR1, MAF, |
| | MAFB, MAGI2, MALT1, MAML2, MAP2K1, MAP2K2, MAP2K4, MAP3K1, |
| | MAPK1, MAPK11, MAX, MCL1, MDM2, MDM4, MDS2, MECOM, MED12, |
| | MEF2B, MEK1, MEK2, MEN1, MET, MITF, MKL1, MLF1, MLH1, MLLT1, |
| | MLLT10, MLLT11, MLLT3, MLLT4, MLLT6, MMP9, MN1, MNX1, MPL, MPS1, |
| | MRE11A, MS4A1, MSH2, MSH6, MSI2, MSN, MST1R, MTCP1, MTOR, MUC1, |
| | MUC16, MUTYH, MYB, MYC, MYCL, MYCN, MYD88, MYH11, MYH9, |
| | NACA, NAE1, NBN, NCKIPSD, NCOA1, NCOA2, NCOA4, NDRG1, NF1, NF2, |
| | NFE2L2, NFIB, NFKB2, NFKBIA, NIN, NKX2-1, NONO, NOTCH1, NOTCH2, |
| | NOTCH3, NPM1, NR4A3, NRAS, NSD1, NT5C2, NTRK1, NTRK2, NTRK3, |
| | NUMA1, NUP214, NUP93, NUP98, NUTM1, NUTM2B, OLIG2, OMD, P2RY8, |
| | PAFAH1B2, PAK3, PALB2, PARK2, PARP1, PATZ1, PAX3, PAX5, PAX7, |
| | PAX8, PBRM1, PBX1, PCM1, PCSK7, PDCD1, PDCD1LG2, PDE4DIP, PDGFB, |
| | PDGFRA, PDGFRB, PDK1, PER1, PHF6, PHOX2B, PICALM, PIK3C2B, |
| | PIK3CA, PIK3CB, PIK3CD, PIK3CG, PIK3R1, PIK3R2, PIM1, PKC, PLAG1, |
| | PLCG2, PML, PMS1, PMS2, POLD1, POLE, POT1, POU2AF1, POU5F1, PPARG, |
| | PPP2R1A, PRCC, PRDM1, PRDM16, PREX2, PRF1, PRKAR1A, PRKCI, PRKDC, |
| | PRLR, PRRX1, PRSS8, PSIP1, PTCH1, PTEN, PTK2, PTPN11, PTPRC, PTPRD, |
| | QKI, RABEP1, RAC1, RAD21, RAD50, RAD51, RAD51B, RAF1, RALGDS, |
| | RANBP17, RANBP2, RANKL, RAP1GDS1, RARA, RB1, RBM10, RBM15, |
| | RECQL4, REL, RET, RHOH, RICTOR, RMI2, RNF213, RNF43, ROS1, RPL10, |
| | RPL20, RPL5, RPN1, RPS6KB1, RPTOR, RUNX1, RUNx1T1, SBDS, SDC4, |
| | SDHA, SDHAF2, SDHB, SDHC, SDHD, SEPT5, SEPT6, SEPT9, SET, SETBP1, |
| | SETD2, SF3B1, SFPQ, SH2B3, SH3GL1, SLAMF7, SLC34A2, SLC45A3, SLIT2, |
| | SMAD2, SMAD3, SMAD4, SMARCA4, SMARCB1, SMARCE1, SMO, SNCAIP, |
| | SNX29, SOCS1, SOX10, SOX2, SOX9, SPECC1, SPEN, SPOP, SPTA1, SRC, |
| | SRGAP3, SRSF2, SRSF3, SS18, SS18L1, SSX1, SSX2, SSX4, STAG2, STAT3, |
| | STAT4, STAT5B, STEAP1, STIL, STK11, SUFU, SUZ12, SYK, TAF1, TAF15, |
| | TAL1, TAL2, TBL1XR1, TBX3, TCEA1, TCF12, TCF3, TCF7L2, TCL1A, TERC, |
| | TERT, TET1, TET2, TFE3, TFEB, TFG, TFPT, TFRC, TGFB1, TGFBR2, |
| | THRAP3, TIE2, TLX1, TLX3, TMPRSS2, TNFAIP3, TNFRSF14, TNFRSF17, |
| | TOP1, TOP2A, TP53, TPM3, TPM4, TPR, TRAF7, TRIM26, TRIM27, TRIM33, |
| | TRIP11, TRRAP, TSC1, TSC2, TSHR, TTL, U2AF1, UBA1, UBR5, USP6, |
| | VEGFA, VEGFB, VEGFR, VHL, VTI1A, WAS, WEE1, WHSC1, WHSC1L1, |
| | WIF1, WISP3, WNT11, WNT2B, WNT3, WNT3A, WNT4, WNT5A, WNT6, |
| | WNT7B, WRN, WT1, WWTR1, XPA, XPC, XPO1, YWHAE, ZAK, ZBTB16, |
| | ZBTB2, ZMYM2, ZNF217, ZNF331, ZNF384, ZNF521, ZNF703, ZRSR2 |
| Cancer Related | ABL2, ACSL3, ACSL6, AFF1, AFF3, AFF4, AKAP9, AKT3, ALDH2, APC, |
| | ARFRP1, ARHGAP26, ARHGEF12, ARID2, ARNT, ASPSCR1, ASXL1, ATF1, |
| | ATIC, ATM, ATP1A1, ATR, AURKA, AXIN1, AXL, BAP1, BARD1, BCL10, |
| | BCL11A, BCL2L11, BCL3, BCL6, BCL7A, BCL9, BCR, BIRC3, BLM, BMPR1A, |
| | BRAF, BRCA1, BRCA2, BRIP1, BUB1B, C11orf30, C2orf44, CACNA1D, CALR, |
| | CAMTA1, CANT1, CARD11, CARS, CASC5, CASP8, CBFA2T3, CBFB, CBL, |
| | CBLB, CCDC6, CCNB1IP1, CCND2, CD274, CD74, CD79A, CDC73, CDH11, |
| | CDKN1B, CDX2, CHEK1, CHEK2, CHIC2, CHN1, CIC, CIITA, CLP1, CLTC, |
| | CLTCL1, CNBP, CNTRL, COPB1, CREB1, CREB3L1, CREB3L2, CRTC1, |
| | CRTC3, CSF1R, CSF3R, CTCF, CTLA4, CTNNA1, CTNNB1, CYLD, CYP2D6, |
| | DAXX, DDR2, DDX10, DDX5, DDX6, DEK, DICER1, DOT1L, EBF1, ECT2L, |
| | ELK4, ELL, EML4, EPHA3, EPHA5, EPHB1, EPS15, ERBB3, ERBB4, ERC1, |
| | ERCC2, ERCC3, ERCC4, ERCC5, ERG, ESR1, ETV1, ETV5, ETV6, EWSR1, |
| | EXT1, EXT2, EZR, FANCA, FANCC, FANCD2, FANCE, FANCG, FANCL, FAS, |
| | FBXO11, FBXW7, FCRL4, FGF14, FGF19, FGF23, FGF6, FGFR1OP, FGFR4, FH, |
| | FHIT, FIP1L1, FLCN, FLI1, FLT1, FLT3, FLT4, FNBP1, FOXA1, FOXO1, |
| | FOXP1, FUBP1, FUS, GAS7, GID4, GMPS, GNA13, GNAQ, GNAS, GOLGA5, |
| | GOPC, GPHN, GPR124, GRIN2A, GSK3B, H3F3A, H3F3B, HERPUD1, HGF, |
| | HIP1, HMGA1, HMGA2, HNRNPA2B1, HOOK3, HSP90AA1, HSP90AB1, IDH1, |
| | IDH2, IGF1R, IKZF1, IL2, IL21R, IL6ST, IL7R, IRF4, ITK, JAK1, JAK2, JAK3, |
| | JAZF1, KDM5A, KEAP1, KIAA1549, KIF5B, KIT, KLHL6, KMT2A, KMT2C, |
| | KMT2D, KRAS, KTN1, LCK, LCP1, LGR5, LHFP, LIFR, LPP, LRIG3, LRP1B, |
| | LYL1, MAF, MALT1, MAML2, MAP2K2, MAP2K4, MAP3K1, MDM4, MDS2, |
| | MEF2B, MEN1, MITF, MLF1, MLH1, MLLT1, MLLT10, MLLT3, MLLT4, |
| | MLLT6, MNX1, MRE11A, MSH2, MSH6, MSI2, MTOR, MYB, MYCN, MYD88, |
| | MYH11, MYH9, NACA, NCKIPSD, NCOA1, NCOA2, NCOA4, NF1, NFE2L2, |
| | NFIB, NFKB2, NIN, NOTCH2, NPM1, NR4A3, NSD1, NT5C2, NTRK2, NTRK3, |
| | NUP214, NUP93, NUP98, NUTM1, PALB2, PAX3, PAX5, PAX7, PBRM1, PBX1, |
| | PCM1, PCSK7, PDCD1, PDCD1LG2, PDGFB, PDGFRA, PDGFRB, PDK1, PER1, |
| | PICALM, PIK3CA, PIK3R1, PIK3R2, PIM1, PML, PMS2, POLE, POT1, |
| | POU2AF1, PPARG, PRCC, PRDM1, PRDM16, PRKAR1A, PRRX1, PSIP1, |
| | PTCH1, PTEN, PTPN11, PTPRC, RABEP1, RAC1, RAD50, RAD51, RAD51B, |
| | RAF1, RALGDS, RANBP17, RAP1GDS1, RARA, RBM15, REL, RET, RMI2, |
| | RNF43, RPL20, RPL5, RPN1, RPTOR, RUNX1, RUNX1T1, SBDS, SDC4, |
| | SDHAF2, SDHB, SDHC, SDHD, 8-Sep, SET, SETBP1, SETD2, SF3B1, SH2B3, |
| | SH3GL1, SLC34A2, SMAD2, SMAD4, SMARCB1, SMARCE1, SMO, SNX29, |
| | SOX10, SPECC1, SPEN, SRGAP3, SRSF2, SRSF3, SS18, SS18L1, STAT3, |
| | STAT4, STAT5B, STIL, STK11, SUFU, SUZ12, SYK, TAF15, TCF12, TCF3, |
| | TCF7L2, TET1, TET2, TFEB, TFG, TFRC, TGFBR2, TLX1, TNFAIP3, |
| | TNFRSF14, TNFRSF17, TP53, TPM3, TPM4, TPR, TRAF7, TRIM26, TRIM27, |
| | TRIM33, TRIP11, TRRAP, TSC1, TSC2, TSHR, TTL, U2AF1, USP6, VEGFA, |
| | VEGFB, VTI1A, WHSC1, WHSC1L1, WiFi, WISP3, WRN, WWTR1, XPA, XPC, |
| | XPO1, YWHAE, ZMYM2, ZNF217, ZNF331, ZNF384, ZNF521, ZNF703 |
| Gene fusions and | AKT3, ALK, ARHGAP26, AXL, BRAF, BRD3/4, EGFR, ERG, ESR1, ETV1/4/5/6, |
| mutations in | EWSR1, FGFR1, FGFR2, FGFR3, FGR, INSR, MAML2, MAST1/2, MET, MSMB, |
| cancer | MUSK, MYB, NOTCH1/2, NRG1, NTRK1/2/3, NUMBL, NUTM1, PDGFRA/B, |
| | PIK3CA, PKN1, PPARG, PRKCA/B, RAF1, RELA, RET, ROS1, RSPO2/3, TERT, |
| | TFE3, TFEB, THADA, TMPRSS2 |
| Gene fusions and | ABL1 fusion to (ETV6, NUP214, RCSD1, RANBP2, SNX2, or ZMIZ1); ABL2 |
| mutations in | fusion to (PAG1 or RCSD1); CSF1R fusion to (SSBP2); PDGFRB fusion to (EBF1, |
| cancer | SSBP2, TNIP1 or ZEB2); CRLF2 fusion to (P2RY8); JAK2 fusion to (ATF7IP, BCR, |
| | ETV6, PAX5, PPFIBP1, SSBP2, STRN3, TERF2, or TPR); EPOR fusion to (IGH or |
| | IGK); IL2RB fusion to (MYH9); NTRK3 fusion to (ETV6); PTK2B fusion to (KDM6A |
| | or STAG2); TSLP fusion to (IQGAP2); TYK2 fusion to (MYB) |
| Cytohesions | cytohesin-1 (CYTH1), cytohesin-2 (CYTH2; ARNO), cytohesin-3 (CYTH3; Grp1; |
| | ARNO3), cytohesin-4 (CYTH4) |
| Cancer/Angio | Erb 2, Erb 3, Erb 4, UNC93a, B7H3, MUC1, MUC2, MUC16, MUC17, 5T4, |
| | RAGE, VEGF A, VEGFR2, FLT1, DLL4, Epcam |
| Tissue (Breast) | BIG H3, GCDFP-15, PR(B), GPR 30, CYFRA 21, BRCA 1, BRCA 2, ESR 1, ESR2 |
| Tissue (Prostate) | PSMA, PCSA, PSCA, PSA, TMPRSS2 |
| Inflammation/ | MFG-E8, IFNAR, CD40, CD80, MICB, HLA-DRb, IL-17-Ra |
| Immune | |

[0113] Examples of additional biomarkers that can be incorporated into the methods and compositions of the invention include without limitation those disclosed in International Patent Application Nos. PCT/US2009/62880, filed Oct. 30, 2009; PCT/US2009/006095, filed Nov. 12, 2009; PCT/US2011/26750, filed Mar. 1, 2011; PCT/US2011/031479, filed Apr. 6, 2011; PCT/US11/48327, filed Aug. 18, 2011; PCT/US2008/71235, filed Jul. 25, 2008; PCT/US10/58461, filed Nov. 30, 2010; PCT/US2011/21160, filed Jan. 13, 2011; PCT/US2013/030302, filed Mar. 11, 2013; PCT/US12/25741, filed Feb. 17, 2012; PCT/2008/76109, filed Sep. 12, 2008; PCT/US12/42519, filed Jun. 14, 2012; PCT/US12/50030, filed Aug. 8, 2012; PCT/US12/49615, filed Aug. 3, 2012; PCT/US12/41387, filed Jun. 7, 2012; PCT/US2013/072019, filed Nov. 26, 2013; PCT/US2014/039858, filed May 28, 2013; PCT/IB2013/003092, filed Oct. 23, 2013; PCT/US 13/76611, filed Dec. 19, 2013; PCT/US 14/53306, filed Aug. 28, 2014; and PCT/US 15/62184, filed Nov. 23, 2015; PCT/US 16/40157, filed Jun. 29, 2016; PCT/US 16/44595, filed Jul. 28, 2016; PCT/US16/21632, filed Mar. 9, 2016; and PCT/US17/23108, filed Mar. 18, 2017; each of which applications is incorporated herein by reference in its entirety.

[0114] In various embodiments of the invention, the biomarkers or biosignature used to detect or assess any of the conditions or diseases disclosed herein can comprise one or more biomarkers in one of several different categories of markers, wherein the categories include without limitation one or more of: 1) disease specific biomarkers; 2) cell- or tissue-specific biomarkers; 3) vesicle-specific markers (e.g., general vesicle biomarkers); 4) angiogenesis-specific biomarkers; and 5) immunomodulatory biomarkers. Examples of all such markers are disclosed herein and known to a person having ordinary skill in the art. Furthermore, a biomarker known in the art that is characterized to have a role in a particular disease or condition can be adapted for use as a target in compositions and methods of the invention. In further embodiments, such biomarkers of interest may be cellular or vesicular surface markers, or a combination of surface markers and soluble or payload markers (e.g., molecules enclosed by a microvesicle). The biomarkers assessed can be from a combination of sources. For example, a disease or disorder may be detected or characterized by assessing a combination of proteins, nucleic acids, vesicles, circulating biomarkers, biomarkers from a tissue sample, and the like. In addition, as noted herein, the biological sample assessed can be any biological fluid, or can comprise individual components present within such biological fluid (e.g., vesicles, nucleic acids, proteins, or complexes thereof).

### Biomarker Detection

[0115] The compositions and methods of the invention can be used to assess any useful biomarkers in a biological sample for characterizing a phenotype associated with the sample. Such biomarkers include all sorts of biological entities such as proteins, nucleic acids, lipids, carbohydrates, complexes of any thereof, and microvesicles.

[0116] The aptamers of the invention can be used to provide a biosignature in tissue or bodily fluids, e.g., by assessing various biomarkers therein. See, e.g., FIGS. 9B-C. The aptamers of the invention can also be used to assess levels or presence of their specific target molecule. See, e.g., FIG. 9A. In addition, aptamers of the invention are used to capture or isolated a component present in a biological sample that has the aptamer's target molecule present. For example, if a given surface antigen is present on a cell, cell fragment or cell-derived extracellular vesicle, a binding agent to the biomarker, including without limitation an aptamer provided by the invention, may be used to capture or isolate the cell, cell fragment or cell-derived extracellular vesicles. See, e.g., FIGS. 1A-B, 9A. Such captured or isolated entities may be further characterized to assess additional surface antigens or internal “payload” molecules, e.g., nucleic acid molecules, lipids, sugars, polypeptides or functional fragments thereof, or anything else present in the cellular milieu that may be used as a biomarker. Therefore, aptamers of the invention are used not only to assess one or more surface antigen of interest but are also used to separate a component present in a biological sample, where the components themselves can be comprised within the biosignature.

[0117] The methods of the invention can comprise multiplex analysis of at least 2, 3, 4, 5, 6, 7, 8, 9, 10, 11, 12, 13, 14, 15, 16, 17, 18, 19, 20, 25, 50, 75, 100, 200, 300, 400, 500, 600, 700, 800, 900, 1000, or more different biomarkers. For example, an oligonucleotide pool may contain any number of individual aptamers that can target different biomarkers. As another example, an assay can be performed with a plurality of particles that are differentially labeled. There can be at least 2, 3, 4, 5, 6, 7, 8, 9, 10, 11, 12, 13, 14, 15, 16, 17, 18, 19, 20, 25, 50, 75 or 100 differentially labeled particles. The particles may be externally labeled, such as with a tag, or they may be intrinsically labeled. Each differentially labeled particle can be coupled to a capture agent, such as a antibody or aptamer, and can be used to capture its target. The multiple capture agents can be selected to characterize a phenotype of interest, including capture agents against general vesicle biomarkers, cell-of-origin specific biomarkers, and disease biomarkers. One or more captured biomarkers can be detected by a plurality of binding agents. The binding agent can be directly labeled to facilitate detection. Alternatively, the binding agent is labeled by a secondary agent. For example, the binding agent may be an antibody or aptamer for a biomarker, wherein the binding agent is linked to biotin. A secondary agent comprises streptavidin linked to a reporter and can be added to detect the biomarker. In some embodiments, the captured vesicle is assayed for at least 2, 3, 4, 5, 6, 7, 8, 9, 10, 11, 12, 13, 14, 15, 16, 17, 18, 19, 20, 25, 50, 75 or 100 different biomarkers. For example, multiple detectors, i.e., detection of multiple biomarkers of a captured vesicle or population of vesicles, can increase the signal obtained, permitted increased sensitivity, specificity, or both, and the use of smaller amounts of samples. Detection can be with more than one biomarker, including without limitation more than one vesicle marker such as in any of Tables 3-4, and Tables 10-17.

[0118] An immunoassay based method (e.g., sandwich assay) can be used to detect a biomarker of interest. An example includes ELISA. A binding agent can be bound to a well. For example, a binding agent such as an aptamer or antibody to biomarker of interest can be attached to a well. A captured biomarker can be detected based on the methods described herein. FIG. 1A shows an illustrative schematic for a sandwich-type of immunoassay. The capture agent can be against a cellular or vesicular antigen of. In the figure, the captured entities are detected using fluorescently labeled binding agent (detection agent) against antigens of interest. Multiple capture binding agents can be used, e.g., in distinguishable addresses on an array or different wells of an immunoassay plate. The detection binding agents can be against the same antigen as the capture binding agent, or can be directed against other markers. The capture binding agent can be any useful binding agent, e.g., tethered aptamers, antibodies or lectins, and/or the detector antibodies can be similarly substituted, e.g., with detectable (e.g., labeled) aptamers, antibodies, lectins or other binding proteins or entities.

[0119] In an embodiment, one or more capture agents to a general vesicle biomarker, a cell-of-origin marker, and/or a disease marker are used along with detection agents against general vesicle biomarker, such as tetraspanin molecules including without limitation one or more of CD9, CD63 and CD81, or other markers in Table 3 herein. Examples of microvesicle surface antigens are disclosed herein, e.g. in Tables 3-4 and 10-17. Further biomarkers and detection techniques are disclosed in International Patent Application Nos. PCT/US2009/62880, filed Oct. 30, 2009; PCT/US2009/006095, filed Nov. 12, 2009; PCT/US2011/26750, filed Mar. 1, 2011; PCT/US2011/031479, filed Apr. 6, 2011; PCT/US 11/48327, filed Aug. 18, 2011; PCT/US2008/71235, filed Jul. 25, 2008; PCT/US 10/58461, filed Nov. 30, 2010; PCT/US2011/21160, filed Jan. 13, 2011; PCT/US2013/030302, filed Mar. 11, 2013; PCT/US12/25741, filed Feb. 17, 2012; PCT/2008/76109, filed Sep. 12, 2008; PCT/US12/42519, filed Jun. 14, 2012; PCT/US12/50030, filed Aug. 8, 2012; PCT/US12/49615, filed Aug. 3, 2012; PCT/US12/41387, filed Jun. 7, 2012; PCT/US2013/072019, filed Nov. 26, 2013; PCT/US2014/039858, filed May 28, 2013; PCT/IB2013/003092, filed Oct. 23, 2013; PCT/US13/76611, filed Dec. 19, 2013; PCT/US14/53306, filed Aug. 28, 2014; PCT/US15/62184, filed Nov. 23, 2015; PCT/US16/40157, filed Jun. 29, 2016; PCT/US16/44595, filed Jul. 28, 2016; PCT/US16/21632, filed Mar. 9, 2016; and PCT/US17/23108, filed Mar. 18, 2017; each of which applications is incorporated herein by reference in its entirety.

[0120] Techniques of detecting biomarkers or capturing sample components using an aptamer of the invention include the use of a planar substrate such as an array (e.g., biochip or microarray), with molecules immobilized to the substrate as capture agents that facilitate the detection of a particular biosignature. The array can be provided as part of a kit for assaying one or more biomarkers. Aptamers of the invention can be included in an array for detection and diagnosis of diseases including presymptomatic diseases. In some embodiments, an array comprises a custom array comprising biomolecules selected to specifically identify biomarkers of interest. Customized arrays can be modified to detect biomarkers that increase statistical performance, e.g., additional biomolecules that identifies a biosignature which lead to improved cross-validated error rates in multivariate prediction models (e.g., logistic regression, discriminant analysis, or regression tree models). In some embodiments, customized array(s) are constructed to study the biology of a disease, condition or syndrome and profile biosignatures in defined physiological states. Markers for inclusion on the customized array be chosen based upon statistical criteria, e.g., having a desired level of statistical significance in differentiating between phenotypes or physiological states. In some embodiments, standard significance of p-value=0.05 is chosen to exclude or include biomolecules on the microarray. The p-values can be corrected for multiple comparisons. As an illustrative example, nucleic acids extracted from samples from a subject with or without a disease can be hybridized to a high density microarray that binds to thousands of gene sequences. Nucleic acids whose levels are significantly different between the samples with or without the disease can be selected as biomarkers to distinguish samples as having the disease or not. A customized array can be constructed to detect the selected biomarkers. In some embodiments, customized arrays comprise low density microarrays, which refer to arrays with lower number of addressable binding agents, e.g., tens or hundreds instead of thousands. Low density arrays can be formed on a substrate. In some embodiments, customizable low density arrays use PCR amplification in plate wells, e.g., TaqMan® Gene Expression Assays (Applied Biosystems by Life Technologies Corporation, Carlsbad, Calif.).

[0121] An aptamer of the invention or other useful binding agent may be linked directly or indirectly to a solid surface or substrate. A solid surface or substrate can be any physically separable solid to which a binding agent can be directly or indirectly attached including, but not limited to, surfaces provided by microarrays and wells, particles such as beads, columns, optical fibers, wipes, glass and modified or functionalized glass, quartz, mica, diazotized membranes (paper or nylon), polyformaldehyde, cellulose, cellulose acetate, paper, ceramics, metals, metalloids, semiconductive materials, quantum dots, coated beads or particles, other chromatographic materials, magnetic particles; plastics (including acrylics, polystyrene, copolymers of styrene or other materials, polypropylene, polyethylene, polybutylene, polyurethanes, Teflon material, etc.), polysaccharides, nylon or nitrocellulose, resins, silica or silica-based materials including silicon and modified silicon, carbon, metals, inorganic glasses, plastics, ceramics, conducting polymers (including polymers such as polypyrole and polyindole); micro or nanostructured surfaces such as nucleic acid tiling arrays, nanotube, nanowire, or nanoparticulate decorated surfaces; or porous surfaces or gels such as methacrylates, acrylamides, sugar polymers, cellulose, silicates, or other fibrous or stranded polymers. In addition, as is known the art, the substrate may be coated using passive or chemically-derivatized coatings with any number of materials, including polymers, such as dextrans, acrylamides, gelatins or agarose. Such coatings can facilitate the use of the array with a biological sample.

[0122] An aptamer or other useful binding agent can be conjugated to a detectable entity or label. Appropriate labels include without limitation a magnetic label, a fluorescent moiety, an enzyme, a chemiluminescent probe, a metal particle, a non-metal colloidal particle, a polymeric dye particle, a pigment molecule, a pigment particle, an electrochemically active species, semiconductor nanocrystal or other nanoparticles including quantum dots or gold particles, fluorophores, quantum dots, or radioactive labels. Protein labels include green fluorescent protein (GFP) and variants thereof (e.g., cyan fluorescent protein and yellow fluorescent protein); and luminescent proteins such as luciferase, as described below. Radioactive labels include without limitation radioisotopes (radionuclides), such as ³H, ¹¹C, ¹⁴C, ¹⁸F, ³²P, ³⁵S, ⁶⁴Cu, ⁶⁸Ga, ⁸⁶Y, ⁹⁹Tc, ¹¹¹In, ¹²³I, ¹²⁴I, ¹²⁵I, ¹³¹I, ¹³³Xe, ¹⁷⁷Lu, ²¹¹At, or ²¹³Bi. Fluorescent labels include without limitation a rare earth chelate (e.g., europium chelate), rhodamine; fluorescein types including without limitation FITC, 5-carboxyfluorescein, 6-carboxy fluorescein; a rhodamine type including without limitation TAMRA; dansyl; Lissamine; cyanines; phycoerythrins; Texas Red; Cy3, Cy5, dapoxyl, NBD, Cascade Yellow, dansyl, PyMPO, pyrene, 7-diethylaminocoumarin-3-carboxylic acid and other coumarin derivatives, Marina Blue™, Pacific Blue™, Cascade Blue™, 2-anthracenesulfonyl, PyMPO, 3,4,9,10-perylene-tetracarboxylic acid, 2,7-difluorofluorescein (Oregon Green™ 488-X), 5-carboxyfluorescein, Texas Red™-X, Alexa Fluor 430, 5-carboxytetramethylrhodamine (5-TAMRA), 6-carboxytetramethylrhodamine (6-TAMRA), BODIPY FL, bimane, and Alexa Fluor 350, 405, 488, 500, 514, 532, 546, 555, 568, 594, 610, 633, 647, 660, 680, 700, and 750, and derivatives thereof, among many others. See, e.g., “The Handbook—A Guide to Fluorescent Probes and Labeling Technologies,” Tenth Edition, available on the internet at probes (dot) invitrogen (dot) com/handbook. The fluorescent label can be one or more of FAM, dRHO, 5-FAM, 6FAM, dR6G, JOE, HEX, VIC, TET, dTAMRA, TAMRA, NED, dROX, PET, BHQ, Gold540 and LIZ.

[0123] Using conventional techniques, an aptamer can be directly or indirectly labeled. In a non-limiting example, the label is attached to the aptamer through biotin-streptavidin/avidin chemistry. For example, synthesize a biotinylated aptamer, which is then capable of binding a streptavidin molecule that is itself conjugated to a detectable label; non-limiting example is streptavidin, phycoerythrin conjugated (SAPE)). Methods for chemical coupling using multiple step procedures include biotinylation, coupling of trinitrophenol (TNP) or digoxigenin using for example succinimide esters of these compounds. Biotinylation can be accomplished by, for example, the use of D-biotinyl-N-hydroxysuccinimide. Succinimide groups react effectively with amino groups at pH values above 7, and preferentially between about pH 8.0 and about pH 8.5. The labeling may comprise a secondary labeling system. As a non-limiting example, the aptamer can be conjugated to biotin or digoxigenin. Target bound aptamer can be detected using streptavidin/avidin or anti-digoxigenin antibodies, respectively.

[0124] Various enzyme-substrate labels may also be used in conjunction with a composition or method of the invention. Such enzyme-substrate labels are available commercially (e.g., U.S. Pat. No. 4,275,149). The enzyme generally catalyzes a chemical alteration of a chromogenic substrate that can be measured using various techniques. For example, the enzyme may catalyze a color change in a substrate, which can be measured spectrophotometrically. Alternatively, the enzyme may alter the fluorescence or chemiluminescence of the substrate. Examples of enzymatic labels include luciferases (e.g., firefly luciferase and bacterial luciferase; U.S. Pat. No. 4,737,456), luciferin, 2,3-dihydrophthalazinediones, malate dehydrogenase, urease, peroxidase such as horseradish peroxidase (HRP), alkaline phosphatase (AP), β-galactosidase, glucoamylase, lysozyme, saccharide oxidases (e.g., glucose oxidase, galactose oxidase, and glucose-6-phosphate dehydrogenase), heterocyclic oxidases (such as uricase and xanthine oxidase), lactoperoxidase, microperoxidase, and the like. Examples of enzyme-substrate combinations include, but are not limited to, horseradish peroxidase (HRP) with hydrogen peroxidase as a substrate, wherein the hydrogen peroxidase oxidizes a dye precursor (e.g., orthophenylene diamine (OPD) or 3,3′,5,5′-tetramethylbenzidine hydrochloride (TMB)); alkaline phosphatase (AP) with para-nitrophenyl phosphate as chromogenic substrate; and β-D-galactosidase (β-D-Gal) with a chromogenic substrate (e.g., p-nitrophenyl-β-D-galactosidase) or fluorogenic substrate 4-methylumbelliferyl-β-D-galactosidase.

[0125] Aptamer(s) can be linked to a substrate such as a planar substrate. A planar array generally contains addressable locations (e.g., pads, addresses, or micro-locations) of biomolecules in an array format. The size of the array will depend on the composition and end use of the array. Arrays can be made containing from 2 different molecules to many thousands. Generally, the array comprises from two to as many as 100,000 or more molecules, depending on the end use of the array and the method of manufacture. A microarray for use with the invention comprises at least one biomolecule that identifies or captures a biomarker present in a biosignature of interest, e.g., a cell, microRNA or other biomolecule or vesicle that makes up the biosignature. In some arrays, multiple substrates are used, either of different or identical compositions. Accordingly, planar arrays may comprise a plurality of smaller substrates.

[0126] The present invention can make use of many types of arrays for detecting a biomarker, e.g., a biomarker associated with a biosignature of interest. Useful arrays or microarrays include without limitation DNA microarrays, such as cDNA microarrays, oligonucleotide microarrays and SNP microarrays, microRNA arrays, protein microarrays, antibody microarrays, tissue microarrays, cellular microarrays (also called transfection microarrays), chemical compound microarrays, and carbohydrate arrays (glycoarrays). These arrays are described in more detail above. In some embodiments, microarrays comprise biochips that provide high-density immobilized arrays of recognition molecules (e.g., aptamers or antibodies), where biomarker binding is monitored indirectly (e.g., via fluorescence).

[0127] An array or microarray that can be used to detect a biosignature comprising one or more aptamers of the invention can be made according to the methods described in U.S. Pat. Nos. 6,329,209; 6,365,418; 6,406,921; 6,475,808; and 6,475,809, and U.S. patent application Ser. No. 10/884,269, each of which is herein incorporated by reference in its entirety. Custom arrays to detect specific can be made using the methods described in these patents. Commercially available microarrays can also be used to carry out the methods of the invention, including without limitation those from Affymetrix (Santa Clara, Calif.), Illumina (San Diego, Calif.), Agilent (Santa Clara, Calif.), Exiqon (Denmark), or Invitrogen (Carlsbad, Calif.). Custom and/or commercial arrays include arrays for detection proteins, nucleic acids, and other biological molecules and entities (e.g., cells, vesicles, virii) as described herein.

[0128] In some embodiments, multiple capture molecules are disposed on an array, e.g., proteins, peptides or additional nucleic acid molecules. In certain embodiments, the proteins are immobilized using methods and materials that minimize the denaturing of the proteins, that minimize alterations in the activity of the proteins, or that minimize interactions between the protein and the surface on which they are immobilized. The capture molecules can comprise one or more aptamer of the invention. In one embodiment, an array is constructed for the hybridization of a pool of aptamers. The array can then be used to identify pool members that bind a sample, thereby facilitating characterization of a phenotype.

[0129] Array surfaces useful may be of any desired shape, form, or size. Non-limiting examples of surfaces include chips, continuous surfaces, curved surfaces, flexible surfaces, films, plates, sheets, or tubes. Surfaces can have areas ranging from approximately a square micron to approximately 500 cm². The area, length, and width of surfaces may be varied according to the requirements of the assay to be performed. Considerations may include, for example, ease of handling, limitations of the material(s) of which the surface is formed, requirements of detection systems, requirements of deposition systems (e.g., arrayers), or the like.

[0130] In certain embodiments, it is desirable to employ a physical means for separating groups or arrays of binding islands or immobilized biomolecules: such physical separation facilitates exposure of different groups or arrays to different solutions of interest. Therefore, in certain embodiments, arrays are situated within microwell plates having any number of wells. In such embodiments, the bottoms of the wells may serve as surfaces for the formation of arrays, or arrays may be formed on other surfaces and then placed into wells. In certain embodiments, such as where a surface without wells is used, binding islands may be formed or molecules may be immobilized on a surface and a gasket having holes spatially arranged so that they correspond to the islands or biomolecules may be placed on the surface. Such a gasket is preferably liquid tight. A gasket may be placed on a surface at any time during the process of making the array and may be removed if separation of groups or arrays is no longer desired.

[0131] In some embodiments, the immobilized molecules can bind to one or more biomarkers present in a biological sample contacting the immobilized molecules. Contacting the sample typically comprises overlaying the sample upon the array.

[0132] Modifications or binding of molecules in solution or immobilized on an array can be detected using detection techniques known in the art. Examples of such techniques include immunological techniques such as competitive binding assays and sandwich assays; fluorescence detection using instruments such as confocal scanners, confocal microscopes, or CCD-based systems and techniques such as fluorescence, fluorescence polarization (FP), fluorescence resonant energy transfer (FRET), total internal reflection fluorescence (TIRF), fluorescence correlation spectroscopy (FCS); colorimetric/spectrometric techniques; surface plasmon resonance, by which changes in mass of materials adsorbed at surfaces are measured; techniques using radioisotopes, including conventional radioisotope binding and scintillation proximity assays (SPA); mass spectroscopy, such as matrix-assisted laser desorption/ionization mass spectroscopy (MALDI) and MALDI-time of flight (TOF) mass spectroscopy; ellipsometry, which is an optical method of measuring thickness of protein films; quartz crystal microbalance (QCM), a very sensitive method for measuring mass of materials adsorbing to surfaces; scanning probe microscopies, such as atomic force microscopy (AFM), scanning force microscopy (SFM) or scanning electron microscopy (SEM); and techniques such as electrochemical, impedance, acoustic, microwave, and IR/Raman detection. See, e.g., Mere L, et al., “Miniaturized FRET assays and microfluidics: key components for ultra-high-throughput screening,” Drug Discovery Today 4(8):363-369 (1999), and references cited therein; Lakowicz J R, Principles of Fluorescence Spectroscopy, 2nd Edition, Plenum Press (1999), or Jain K K: Integrative Omics, Pharmacoproteomics, and Human Body Fluids. In: Thongboonkerd V, ed., ed. Proteomics of Human Body Fluids: Principles, Methods and Applications. Volume 1: Totowa, N.J.: Humana Press, 2007, each of which is herein incorporated by reference in its entirety.

[0133] Microarray technology can be combined with mass spectroscopy (MS) analysis and other tools. Electrospray interface to a mass spectrometer can be integrated with a capillary in a microfluidics device. For example, one commercially available system contains eTag reporters that are fluorescent labels with unique and well-defined electrophoretic mobilities; each label is coupled to biological or chemical probes via cleavable linkages. The distinct mobility address of each eTag reporter allows mixtures of these tags to be rapidly deconvoluted and quantitated by capillary electrophoresis. This system allows concurrent gene expression, protein expression, and protein function analyses from the same sample Jain K K: Integrative Omics, Pharmacoproteomics, and Human Body Fluids. In: Thongboonkerd V, ed., ed. Proteomics of Human Body Fluids: Principles, Methods and Applications. Volume 1: Totowa, N.J.: Humana Press, 2007, which is herein incorporated by reference in its entirety.

[0134] A biochip can include components for a microfluidic or nanofluidic assay. A microfluidic device can be used for isolating or analyzing biomarkers, such as determining a biosignature. Microfluidic systems allow for the miniaturization and compartmentalization of one or more processes for detecting a biosignature, and other processes. The microfluidic devices can use one or more detection reagents in at least one aspect of the system, and such a detection reagent can be used to detect one or more biomarkers. Various probes, antibodies, proteins, or other binding agents can be used to detect a biomarker within the microfluidic system. The detection agents, e.g., oligonucleotide probes of the invention, may be immobilized in different compartments of the microfluidic device or be entered into a hybridization or detection reaction through various channels of the device.

[0135] Nanofabrication techniques are opening up the possibilities for biosensing applications that rely on fabrication of high-density, precision arrays, e.g., nucleotide-based chips and protein arrays otherwise known as heterogeneous nanoarrays. Nanofluidics allows a further reduction in the quantity of fluid analyte in a microchip to nanoliter levels, and the chips used here are referred to as nanochips. See, e.g., Unger M et al., Biotechniques 1999; 27(5):1008-14, Kartalov E P et al., Biotechniques 2006; 40(1):85-90, each of which are herein incorporated by reference in their entireties. Commercially available nanochips currently provide simple one step assays such as total cholesterol, total protein or glucose assays that can be run by combining sample and reagents, mixing and monitoring of the reaction. Gel-free analytical approaches based on liquid chromatography (LC) and nanoLC separations (Cutillas et al. Proteomics, 2005; 5:101-112 and Cutillas et al., Mol Cell Proteomics 2005; 4:1038-1051, each of which is herein incorporated by reference in its entirety) can be used in combination with the nanochips.

[0136] An array suitable for identifying a disease, condition, syndrome or physiological status can be included in a kit. A kit can include, an aptamer of the invention, including as non-limiting examples, one or more reagents useful for preparing molecules for immobilization onto binding islands or areas of an array, reagents useful for detecting binding of biomarkers to immobilized molecules, e.g., aptamers, and instructions for use.

[0137] Further provided herein is a rapid detection device that facilitates the detection of a particular biosignature in a biological sample. The device can integrate biological sample preparation with polymerase chain reaction (PCR) on a chip. The device can facilitate the detection of a particular biosignature of a vesicle in a biological sample, and an example is provided as described in Pipper et al., Angewandte Chemie, 47(21), p. 3900-3904 (2008), which is herein incorporated by reference in its entirety. A biosignature can be incorporated using micro-/nano-electrochemical system (MEMS/NEMS) sensors and oral fluid for diagnostic applications as described in Li et al., Adv Dent Res 18(1): 3-5 (2005), which is herein incorporated by reference in its entirety.

[0138] As an alternative to planar arrays, assays using particles, such as bead based assays are also capable of use with an aptamer of the invention. Aptamers are easily conjugated with commercially available beads. See, e.g., Srinivas et al. Anal. Chem. 2011 Oct. 21, Aptamer functionalized Microgel Particles for Protein Detection; See also, review article on aptamers as therapeutic and diagnostic agents, Brody and Gold, Rev. Mol. Biotech. 2000, 74:5-13.

[0139] Multiparametric assays or other high throughput detection assays using bead coatings with cognate ligands and reporter molecules with specific activities consistent with high sensitivity automation can be used. In a bead based assay system, a binding agent such as an antibody or aptamer can be immobilized on an addressable microsphere. Each binding agent for each individual binding assay can be coupled to a distinct type of microsphere (i.e., microbead) and the assay reaction takes place on the surface of the microsphere, such as depicted in FIG. 1B. In a non-limiting example, a binding agent for a cell or microvesicle can be a capture antibody or aptamer coupled to a bead. Dyed microspheres with discrete fluorescence intensities are loaded separately with their appropriate binding agent or capture probes. The different bead sets carrying different binding agents can be pooled as desired to generate custom bead arrays. Bead arrays are then incubated with the sample in a single reaction vessel to perform the assay.

[0140] Bead-based assays can be used with one or more aptamers of the invention. A bead substrate can provide a platform for attaching one or more binding agents, including aptamer(s). For multiplexing, multiple different bead sets (e.g., Illumina, Luminex) can have different binding agents (specific to different target molecules). For example, a bead can be conjugated to an aptamer of the invention used to detect the presence (quantitatively or qualitatively) of an antigen of interest, or it can also be used to isolate a component present in a selected biological sample (e.g., cell, cell-fragment or vesicle comprising the target molecule to which the aptamer is configured to bind or associate). Any molecule of organic origin can be successfully conjugated to a polystyrene bead through use of commercially available kits.

[0141] One or more aptamers of the invention can be used with any bead based substrate, including but not limited to magnetic capture method, fluorescence activated cell sorting (FACS) or laser cytometry. Magnetic capture methods can include, but are not limited to, the use of magnetically activated cell sorter (MACS) microbeads or magnetic columns. Examples of bead or particle based methods that can be modified to use an aptamer of the invention include methods and bead systems described in U.S. Pat. Nos. 4,551,435, 4,795,698, 4,925,788, 5,108,933, 5,186,827, 5,200,084 or 5,158,871; 7,399,632; 8,124,015; 8,008,019; 7,955,802; 7,445,844; 7,274,316; 6,773,812; 6,623,526; 6,599,331; 6,057,107; 5,736,330; International Patent Publication No. WO/2012/174282; WO/1993/022684.

[0142] Isolation or detection of circulating biomarkers, e.g., protein antigens, from a biological sample, or of the biomarker-comprising cells, cell fragments or vesicles may also be achieved using an aptamer of the invention in a cytometry process. As a non-limiting example, aptamers of the invention can be used in an assay comprising using a particle such as a bead or microsphere. The invention provides aptamers as binding agents, which may be conjugated to the particle. Flow cytometry can be used for sorting microscopic particles suspended in a stream of fluid. As particles pass through they can be selectively charged and on their exit can be deflected into separate paths of flow. It is therefore possible to separate populations from an original mix, such as a biological sample, with a high degree of accuracy and speed. Flow cytometry allows simultaneous multiparametric analysis of the physical and/or chemical characteristics of single cells flowing through an optical/electronic detection apparatus. A beam of light, usually laser light, of a single frequency (color) is directed onto a hydrodynamically focused stream of fluid. A number of detectors are aimed at the point where the stream passes through the light beam; one in line with the light beam (Forward Scatter or FSC) and several perpendicular to it (Side Scatter or SSC) and one or more fluorescent detectors.

[0143] Each suspended particle passing through the beam scatters the light in some way, and fluorescent chemicals in the particle may be excited into emitting light at a lower frequency than the light source. This combination of scattered and fluorescent light is picked up by the detectors, and by analyzing fluctuations in brightness at each detector (one for each fluorescent emission peak), it is possible to deduce various facts about the physical and chemical structure of each individual particle. FSC correlates with the cell size and SSC depends on the inner complexity of the particle, such as shape of the nucleus, the amount and type of cytoplasmic granules or the membrane roughness. Some flow cytometers have eliminated the need for fluorescence and use only light scatter for measurement.

[0144] Flow cytometers can analyze several thousand particles every second in “real time” and can actively separate out and isolate particles having specified properties. They offer high-throughput automated quantification, and separation, of the set parameters for a high number of single cells during each analysis session. Flow cytometers can have multiple lasers and fluorescence detectors, allowing multiple labels to be used to more precisely specify a target population by their phenotype. Thus, a flow cytometer, such as a multicolor flow cytometer, can be used to detect targets of interest using multiple fluorescent labels or colors. In some embodiments, the flow cytometer can also sort or isolate different targets of interest, such as by size or by different markers.

[0145] The flow cytometer may have one or more lasers, such as 1, 2, 3, 4, 5, 6, 7, 8, 9, 10 or more lasers. In some embodiments, the flow cytometer can detect more than one color or fluorescent label, such as at least 2, 3, 4, 5, 6, 7, 8, 9, 10, 11, 12, 13, 14, 15, 16, 17, 18, 19, or 20 different colors or fluorescent labels. For example, the flow cytometer can have at least 2, 3, 4, 5, 6, 7, 8, 9, 10, 11, 12, 13, 14, 15, 16, 17, 18, 19, or 20 fluorescence detectors.

[0146] Examples of commercially available flow cytometers include, but are not limited to the MoFlo™ XDP Cell Sorter (Beckman Coulter, Brea, Calif.), MoFlo™ Legacy Cell Sorter (Beckman Coulter, Brea, Calif.), BD FACSAria™ Cell Sorter (BD Biosciences, San Jose, Calif.), BD™ LSRII (BD Biosciences, San Jose, Calif.), and BD FACSCalibur™ (BD Biosciences, San Jose, Calif.). Use of multicolor or multi-fluor cytometers can be used in multiplex analysis. In some embodiments, the flow cytometer can sort, and thereby collect or sort more than one population of cells, microvesicles, or particles, based one or more characteristics. For example, two populations differ in size, such that the populations have a similar size range can be differentially detected or sorted. In another embodiment, two different populations are differentially labeled.

[0147] The data resulting from flow-cytometers can be plotted in 1 dimension to produce histograms or seen in 2 dimensions as dot plots or in 3 dimensions with newer software. The regions on these plots can be sequentially separated by a series of subset extractions which are termed gates. Specific gating protocols exist for diagnostic and clinical purposes especially in relation to hematology. The plots are often made on logarithmic scales. Because different fluorescent dye's emission spectra overlap, signals at the detectors have to be compensated electronically as well as computationally. Fluorophores for labeling biomarkers may include those described in Ormerod, Flow Cytometry 2nd ed., Springer-Verlag, New York (1999), and in Nida et al., Gynecologic Oncology 2005; 4 889-894 which is incorporated herein by reference. In a multiplexed assay, including but not limited to a flow cytometry assay, one or more different target molecules can be assessed using an aptamer of the invention.

[0148] One or more aptamer of the invention can be disposed on any useful planar or bead substrate. In one aspect of the invention one or more aptamer of the invention is disposed on a microfluidic device, thereby facilitating assessing, characterizing or isolating a component of a biological sample comprising a polypeptide antigen of interest or a functional fragment thereof. For example, the circulating antigen or a cell, cell fragment or cell-derived microvesicles comprising the antigen can be assessed using one or more aptamers of the invention (alternatively along with additional binding agents). Microfluidic devices, which may also be referred to as “lab-on-a-chip” systems, biomedical micro-electro-mechanical systems (bioMEMs), or multicomponent integrated systems, can be used for isolating and analyzing such entities. Such systems miniaturize and compartmentalize processes that allow for detection of biosignatures and other processes.

[0149] A microfluidic device can also be used for isolation of a cell, cell fragment or cell-derived microvesicles through size differential or affinity selection. For example, a microfluidic device can use one more channels for isolating entities from a biological sample based on size or by using one or more binding agents. A biological sample can be introduced into one or more microfluidic channels, which selectively allows the passage of the entity. The selection can be based on a property such as the size, shape, deformability, or biosignature.

[0150] In one embodiment, a heterogeneous population of cells, cell fragments, microvesicles or other biomarkers (e.g., protein complexes) is introduced into a microfluidic device, and one or more different homogeneous populations of such entities can be obtained. For example, different channels can have different size selections or binding agents to select for different populations of such entities. Thus, a microfluidic device can isolate a plurality of entities wherein at least a subset of the plurality comprises a different biosignature from another subset of the plurality. For example, the microfluidic device can isolate at least 2, 3, 4, 5, 6, 7, 8, 9, 10, 15, 20, 25, 30, 40, 50, 60, 70, 80, 90, or 100 different subsets, wherein each subset comprises a different biosignature.

[0151] In some embodiments, the microfluidic device can comprise one or more channels that permit further enrichment or selection of targets of interest. A population that has been enriched after passage through a first channel can be introduced into a second channel, which allows the passage of the desired population to be further enriched, such as through one or more binding agents present in the second channel.

[0152] Array-based assays and bead-based assays can be used with a microfluidic device. For example, the binding agent, such as an oligonucleotide probe, can be coupled to beads and the binding reaction between the beads and targets of the binding agent can be performed in a microfluidic device. Multiplexing can also be performed using a microfluidic device. Different compartments can comprise different binding agents for different target populations. In one embodiment, each population has a different biosignature. The hybridization reaction between the microsphere and target can be performed in a microfluidic device and the reaction mixture can be delivered to a detection device. The detection device, such as a dual or multiple laser detection system can be part of the microfluidic system and can use a laser to identify each bead or microsphere by its color-coding, and another laser can detect the hybridization signal associated with each bead.

[0153] Any appropriate microfluidic device can be used in the methods of the invention. Examples of microfluidic devices that may be used include but are not limited to those described in U.S. Pat. Nos. 7,591,936, 7,581,429, 7,579,136, 7,575,722, 7,568,399, 7,552,741, 7,544,506, 7,541,578, 7,518,726, 7,488,596, 7,485,214, 7,467,928, 7,452,713, 7,452,509, 7,449,096, 7,431,887, 7,422,725, 7,422,669, 7,419,822, 7,419,639, 7,413,709, 7,411,184, 7,402,229, 7,390,463, 7,381,471, 7,357,864, 7,351,592, 7,351,380, 7,338,637, 7,329,391, 7,323,140, 7,261,824, 7,258,837, 7,253,003, 7,238,324, 7,238,255, 7,233,865, 7,229,538, 7,201,881, 7,195,986, 7,189,581, 7,189,580, 7,189,368, 7,141,978, 7,138,062, 7,135,147, 7,125,711, 7,118,910, 7,118,661, 7,640,947, 7,666,361, 7,704,735; and International Patent Publication WO 2010/072410; each of which patents or applications are incorporated herein by reference in their entirety. Another example for use with methods disclosed herein is described in Chen et al., “Microfluidic isolation and transcriptome analysis of serum vesicles,” Lab on a Chip, Dec. 8, 2009 DOI: 10.1039/b916199f.

[0154] Other microfluidic devices for use with the invention include devices comprising elastomeric layers, valves and pumps, including without limitation those disclosed in U.S. Pat. Nos. 5,376,252, 6,408,878, 6,645,432, 6,719,868, 6,793,753, 6,899,137, 6,929,030, 7,040,338, 7,118,910, 7,144,616, 7,216,671, 7,250,128, 7,494,555, 7,501,245, 7,601,270, 7,691,333, 7,754,010, 7,837,946; U.S. Patent Application Nos. 2003/0061687, 2005/0084421, 2005/0112882, 2005/0129581, 2005/0145496, 2005/0201901, 2005/0214173, 2005/0252773, 2006/0006067; and EP Patent Nos. 0527905 and 1065378; each of which application is herein incorporated by reference.

[0155] The microfluidic device can have one or more binding agents attached to a surface in a channel, or present in a channel. For example, the microchannel can have one or more capture agents, such as an oligonucleotide probe of the invention. The surface of the channel can also be contacted with a blocking aptamer if desired. In one embodiment, a microchannel surface is treated with avidin/streptavidin and a capture agent, such as an antibody or aptamer, that is biotinylated can be injected into the channel to bind the avidin. In other embodiments, the capture agents are present in chambers or other components of a microfluidic device. The capture agents can also be attached to beads that can be manipulated to move through the microfluidic channels. In one embodiment, the capture agents are attached to magnetic beads. The beads can be manipulated using magnets.

[0156] A biological sample can be flowed into the microfluidic device, or a microchannel, at rates such as at least about 1, 2, 3, 4, 5, 6, 7, 8, 9, 10, 11, 12, 13, 14, 15, 16, 17, 18, 19, 20, 25, 30, 35, 40, 45, or 50 μl per minute, such as between about 1-50, 5-40, 5-30, 3-20 or 5-15 μl per minute. One or more targets of interest can be captured and directly detected in the microfluidic device. Alternatively, the captured target may be released and exit the microfluidic device prior to analysis. In another embodiment, one or more captured cells or microvesicles are lysed in the microchannel and the lysate can be analyzed. Lysis buffer can be flowed through the channel. The lysate can be collected and analyzed, such as performing RT-PCR, PCR, mass spectrometry, Western blotting, or other assays, to detect one or more biomarkers of the captured cells or microvesicles.

[0157] Microvesicles and related biomarkers can be analyzed using the oligonucleotide probes of the invention. Microvesicle isolation can be performed using various techniques as, including without limitation size exclusion chromatography, density gradient centrifugation, differential centrifugation, nanomembrane ultrafiltration, immunoabsorbent capture, affinity purification, affinity capture, immunoassay, immunoprecipitation, microfluidic separation, flow cytometry, polymeric isolation (e.g., using polyethylene glycol (PEG)) or combinations thereof. Methods and techniques for microvesicle and vesicular payload isolation and analysis are disclosed in International Patent Application Nos. PCT/US2009/62880, filed Oct. 30, 2009; PCT/US2009/006095, filed Nov. 12, 2009; PCT/US2011/26750, filed Mar. 1, 2011; PCT/US2011/031479, filed Apr. 6, 2011; PCT/US11/48327, filed Aug. 18, 2011; PCT/US2008/71235, filed Jul. 25, 2008; PCT/US10/58461, filed Nov. 30, 2010; PCT/US2011/21160, filed Jan. 13, 2011; PCT/US2013/030302, filed Mar. 11, 2013; PCT/US12/25741, filed Feb. 17, 2012; PCT/2008/76109, filed Sep. 12, 2008; PCT/US12/42519, filed Jun. 14, 2012; PCT/US12/50030, filed Aug. 8, 2012; PCT/US12/49615, filed Aug. 3, 2012; PCT/US12/41387, filed Jun. 7, 2012; PCT/US2013/072019, filed Nov. 26, 2013; PCT/US2014/039858, filed May 28, 2013; PCT/IB2013/003092, filed Oct. 23, 2013; PCT/US 13/76611, filed Dec. 19, 2013; PCT/US 14/53306, filed Aug. 28, 2014; and PCT/US 15/62184, filed Nov. 23, 2015; PCT/US 16/40157, filed Jun. 29, 2016; PCT/US 16/44595, filed Jul. 28, 2016; and PCT/US 16/21632, filed Mar. 9, 2016; each of which applications is incorporated herein by reference in its entirety.

[0158] The compositions and methods of the invention can be used in and with various immune assay formats. Immunoaffinity assays can be based on antibodies and aptamers selectively immunoreactive with proteins or other biomarkers of interest. These techniques include without limitation immunoprecipitation, Western blot analysis, molecular binding assays, enzyme-linked immunosorbent assay (ELISA), enzyme-linked immunofiltration assay (ELIFA), fluorescence activated cell sorting (FACS), immunohistochemistry (IHC) and the like. For example, an optional method of detecting the expression of a biomarker in a sample comprises contacting the sample with an antibody or aptamer against the biomarker, or an immunoreactive fragment thereof, or a recombinant protein containing an antigen binding region against the biomarker; and then detecting the binding of the biomarker in the sample. Various methods for producing antibodies and aptamers are known in the art. Such binding agents can be used to immunoprecipitate specific proteins from solution samples or to immunoblot proteins separated by, e.g., polyacrylamide gels. Immunocytochemical methods can also be used in detecting specific protein polymorphisms in tissues or cells. Other well-known immunoassay techniques can also be used including, e.g., ELISA, radioimmunoassay (RIA), immunoradiometric assays (IRMA) and immunoenzymatic assays (IEMA), including sandwich assays. See, e.g., U.S. Pat. Nos. 4,376,110 and 4,486,530, both of which are incorporated herein by reference.

[0159] In alternative methods, a sample may be contacted with an antibody or aptamer specific for a biomarker under conditions sufficient for a complex to form, and then detecting such complex. The presence of the biomarker may be detected in a number of ways, such as by Western blotting and ELISA procedures for assaying a wide variety of tissues and samples, including bodily fluids such as plasma or serum. A wide range of immunoassay techniques using such an assay format are available, see, e.g., U.S. Pat. Nos. 4,016,043, 4,424,279 and 4,018,653. These include both single-site and two-site or “sandwich” assays of the non-competitive types, as well as in the traditional competitive binding assays. These assays also include direct binding of a labelled antibody or aptamer to a target biomarker.

[0160] There are a number of variations of the sandwich assay technique which can be encompassed within the present invention. In a typical forward assay, an unlabeled binding agent, e.g., an antibody or aptamer, is immobilized on a solid substrate, and the sample to be tested brought into contact with the bound molecule. After a suitable period of of time sufficient to allow formation of an complex, a second binding agent specific to the antigen, labelled with a reporter molecule capable of producing a detectable signal is then added and incubated, allowing time sufficient for the formation of another complex comprising the labelled binding agent. Any unreacted material is washed away, and the presence of the antigen is determined by observation of a signal produced by the reporter molecule. The results may either be qualitative, by simple observation of the visible signal, or may be quantitated by comparing with a control sample containing known amounts of biomarker.

[0161] Variations on the above assay include a simultaneous assay, in which both sample and labelled binding agent are added simultaneously to the tethered binding agent. In a typical forward sandwich assay, a first binding agent, e.g., an antibody or aptamer, having specificity for a tissue/cell/biomarker or such target of interest is either covalently or passively bound to a solid surface. The solid surface is typically glass or a polymer, the most commonly used polymers being cellulose, polyacrylamide, nylon, polystyrene, polyvinyl chloride or polypropylene. The solid supports may be in the form of tubes, beads, discs of microplates, or any other surface suitable for conducting an immunoassay. The binding processes generally consist of cross-linking, covalently binding or physically adsorbing, the polymer-antibody complex to the support, which is then washed in preparation for the test sample. An aliquot of the sample to be tested is then added to the solid phase complex and incubated for a period of time sufficient (e.g., 2-40 minutes or overnight) and under suitable conditions (e.g., from room temperature to 40° C. such as between 25° C. and 32° C. inclusive) to allow binding of the target to the support. Following the incubation period, the support is washed and incubated with a second binding agent specific for a portion of the biomarker. The second binding agent is linked to a reporter molecule which is used to indicate the binding of the second binding agent to the molecular marker.

[0162] An alternative method involves immobilizing the target biomarkers in the sample and then exposing the immobilized target to specific binding agents, e.g., antibodies or aptamers, which may or may not be labelled with a reporter molecule. Depending on the amount of target and the strength of the reporter molecule signal, a bound target may be detectable by direct labelling with the binding agent. Alternatively, a second labelled binding agent, specific to the first binding agent, is exposed to the first target complex to form a tertiary complex. The complex is detected by the signal emitted by the reporter molecule. A “reporter molecule” includes molecule which, by its chemical nature, provides an analytically identifiable signal which allows the detection of antigen-bound complexes. Some commonly used reporter molecules in this type of assay include enzymes, fluorophores or radionuclide containing molecules (i.e. radioisotopes) and chemiluminescent molecules. Examples of such detectable labels are disclosed herein.

[0163] In the case of an enzyme immunoassay, an enzyme is conjugated to the secondary binding agent. Commonly used enzymes include horseradish peroxidase, glucose oxidase, β-galactosidase and alkaline phosphatase, amongst others. The substrates to be used with the specific enzymes are generally chosen for the production, upon hydrolysis by the corresponding enzyme, of a detectable color change. Examples of suitable enzymes include alkaline phosphatase and peroxidase. It is also possible to employ fluorogenic substrates, which yield a fluorescent product rather than the chromogenic substrates noted above. In all cases, the enzyme-labelled binding agent is added to the first bound molecular marker complex, allowed to bind, and then the excess reagent is washed away. A solution containing the appropriate substrate is then added to the tertiary complex comprising primary binding agent, antigen, and secondary binding agent. The substrate will react with the enzyme linked to the secondary binding agent, giving a qualitative visual signal, which may be further quantitated, usually spectrophotometrically, to give an indication of the amount of antigen which was present in the sample. Alternately, fluorescent compounds, such as fluorescein and rhodamine, may be chemically coupled to secondary binding agent without altering their binding capacity. When activated by illumination with light of a particular wavelength, the fluorochrome-labelled secondary binding agent adsorbs the light energy, inducing a state to excitability in the molecule, followed by emission of the light at a characteristic color visually detectable with a light microscope. As in the EIA, the fluorescent labelled secondary binding agent is allowed to bind to antigen complex. After washing off the unbound reagent, the remaining tertiary complex is then exposed to the light of the appropriate wavelength. The fluorescence observed indicates the presence of the molecular marker of interest. Immunofluorescence and EIA techniques are both very well established in the art. However, other reporter molecules, such as radioisotope, chemiluminescent or bioluminescent molecules, may also be employed.

[0164] Immunohistorchemistry (IHC) is a process of localizing antigens (e.g., proteins) in cells of a tissue using binding agents (e.g., antibodies or aptamers) specifically to antigens in the tissues. The antigen-binding binding agent can be conjugated or fused to a tag that allows its detection, e.g., via visualization. In some embodiments, the tag is an enzyme that can catalyze a color-producing reaction, such as alkaline phosphatase or horseradish peroxidase. The enzyme can be fused to the binding agent or non-covalently bound, e.g., using a biotin-avadin/streptavidin system. Alternatively, the binding agent can be tagged with a fluorophore, such as fluorescein, rhodamine, DyLight Fluor or Alexa Fluor. The binding agent can be directly tagged or it can itself be recognized by a secondary detection binding agent (antibody or antigen) that carries the tag. Using IHC, one or more proteins may be detected. The expression of a gene product can be related to its staining intensity compared to control levels. In some embodiments, the gene product is considered differentially expressed if its staining varies at least 1.2, 1.3, 1.4, 1.5, 1.6, 1.7, 1.8, 1.9, 2.0, 2.2, 2.5, 2.7, 3.0, 4, 5, 6, 7, 8, 9 or 10-fold in the sample versus the control.

[0165] IHC comprises the application of such immunoassay formats to histochemical techniques. In an illustrative example, a tissue section is mounted on a slide and is incubated with a binding agent. The binding agents are typically polyclonal or monoclonal antibodies, and can be aptamers such as oligonucleotide probes of the invention, specific to the antigen. The primary reaction comprises contacting the tissue section with this primary binding agent, forming primary complexes. The antigen-antibody signal is then amplified using a second binding agent conjugated to a complex of that can provide a visible signal, such as enzymes including without limitation peroxidase antiperoxidase (PAP), avidin-biotin-peroxidase (ABC) or avidin-biotin alkaline phosphatase. In the presence of substrate and chromogen, the enzyme forms a colored deposit at the sites of primary complexes. Immunofluorescence is an alternate approach to visualize antigens. In this technique, the primary signal is amplified using a second binding agent conjugated to a fluorochrome. On UV light absorption, the fluorochrome emits its own light at a longer wavelength (fluorescence), thus allowing localization of the primary complexes.

[0166] The invention provides methods of performing an IHC assay using an oligonucleotide probe library. This may be referred to as a polyligand histochemistry assay (PHC). As an example of this approach, a tissue section is contacted with an enriched oligonucleotide probe library. Members of the library can be labeled, e.g., with a biotin molecule, digoxigenin, or other label as appropriate. The bound library members are visualized using a secondary labeling system, e.g., streptavidin-horse radish peroxidase (SA-HRP) or anti-digoxigenin horse radish peroxidase. The resulting slides can be read and scored as in typical antibody based IHC methods. See Examples 19-31 within Int'l Application No. PCT/US 17/23108, filed Mar. 18, 2017; which application is incorporated herein by reference in its entirety.

### Oligonucleotide Probes/Aptamers

[0167] Aptamers have a number of desirable characteristics for use as therapeutics and diagnostics including high specificity and affinity, biological efficacy, and excellent pharmacokinetic properties. In addition, they offer certain advantages over antibodies and other protein biologics. For example, aptamers are produced by an entirely in vitro process, allowing for the rapid synthesis. In vitro selection allows the specificity and affinity of the aptamer to be tightly controlled. In addition, aptamers as a class have demonstrated little or no toxicity or immunogenicity. Whereas the efficacy of many monoclonal antibodies can be severely limited by immune response to antibodies themselves, it is difficult to elicit antibodies to aptamers most likely because aptamers cannot be presented by T-cells via the MHC and the immune response is generally trained not to recognize nucleic acid fragments. Whereas most currently approved antibody therapeutics are administered by intravenous infusion (typically over 2-4 hours), aptamers can be administered by subcutaneous injection. This difference is primarily due to the comparatively low solubility and thus large volumes necessary for most therapeutic mAbs. With good solubility (>150 mg/mL) and comparatively low molecular weight (aptamer: 10-50 kDa; antibody: 150 kDa), a weekly dose of aptamer may be delivered by injection in a volume of less than 0.5 mL. In addition, the small size of aptamers allows them to penetrate into areas of conformational constrictions that do not allow for antibodies or antibody fragments to penetrate, presenting yet another advantage of aptamer-based therapeutics or prophylaxis.

[0168] Aptamers are chemically synthesized and are readily scaled as needed to meet production demand for diagnostic or therapeutic applications. In addition, aptamers are chemically robust. They can be adapted to regain activity following exposure to factors such as heat and denaturants and can be stored for extended periods (>1 yr) at room temperature as lyophilized powders.

[0169] The classical method for generating an aptamer is with the process entitled “Systematic Evolution of Ligands by Exponential Enrichment” (“SELEX”) generally described in, e.g., U.S. patent application Ser. No. 07/536,428, filed Jun. 11, 1990, now abandoned, U.S. Pat. No. 5,475,096 entitled “Nucleic Acid Ligands”, and U.S. Pat. No. 5,270,163 (see also WO 91/19813) entitled “Nucleic Acid Ligands.” Each SELEX-identified nucleic acid ligand, i.e., each aptamer (or oligonucleotide probe), is a specific ligand of a given target compound or molecule. The SELEX process is based on the insight that nucleic acids have sufficient capacity for forming a variety of two- and three-dimensional structures and sufficient chemical versatility available within their monomers to act as ligands (i.e., form specific binding pairs) with any variety of chemical compounds, whether monomeric or polymeric. Molecules of any size or composition can serve as targets.

[0170] SELEX relies as a starting point upon a large library or pool of single stranded oligonucleotides comprising randomized sequences. The oligonucleotides can be modified or unmodified DNA, RNA, or DNA/RNA hybrids. In some examples, the pool comprises 100% random or partially random oligonucleotides. In other examples, the pool comprises random or partially random oligonucleotides containing at least one fixed and/or conserved sequence incorporated within randomized sequence. In other examples, the pool comprises random or partially random oligonucleotides containing at least one fixed and/or conserved sequence at its 5′ and/or 3′ end which may comprise a sequence shared by all the molecules of the oligonucleotide pool. Fixed sequences are sequences such as hybridization sites for PCR primers, promoter sequences for RNA polymerases (e.g., T3, T4, T7, and SP6), restriction sites, or homopolymeric sequences, such as poly A or poly T tracts, catalytic cores, sites for selective binding to affinity columns, and other sequences to facilitate cloning and/or sequencing of an oligonucleotide of interest. Conserved sequences are sequences, other than the previously described fixed sequences, shared by a number of aptamers that bind to the same target.

[0171] The oligonucleotides of the pool preferably include a randomized sequence portion as well as fixed sequences necessary for efficient amplification. Typically the oligonucleotides of the starting pool contain fixed 5′ and 3′ terminal sequences which flank an internal region of 30-50 random nucleotides. The randomized nucleotides can be produced in a number of ways including chemical synthesis and size selection from randomly cleaved cellular nucleic acids. Sequence variation in test nucleic acids can also be introduced or increased by mutagenesis before or during the selection/amplification iterations.

[0172] The random sequence portion of the oligonucleotide can be of any appropriate length and can comprise ribonucleotides and/or deoxyribonucleotides and can include modified or non-natural nucleotides or nucleotide analogs. See, e.g. U.S. Pat. Nos. 5,958,691; 5,660,985; 5,958,691; 5,698,687; 5,817,635; 5,672,695, and PCT Publication WO 92/07065. Random oligonucleotides can be synthesized from phosphodiester-linked nucleotides using solid phase oligonucleotide synthesis techniques well known in the art. See, e.g., Froehler et al., Nucl. Acid Res. 14:5399-5467 (1986) and Froehler et al., Tet. Lett. 27:5575-5578 (1986). Random oligonucleotides can also be synthesized using solution phase methods such as triester synthesis methods. See, e.g., Sood et al., Nucl. Acid Res. 4:2557 (1977) and Hirose et al., Tet. Lett., 28:2449 (1978). Typical syntheses carried out on automated DNA synthesis equipment yield 10¹⁴-10¹⁶ individual molecules, a number sufficient for most SELEX experiments. Sufficiently large regions of random sequence in the sequence design increases the likelihood that each synthesized molecule is likely to represent a unique sequence.

[0173] The starting library of oligonucleotides may be generated by automated chemical synthesis on a DNA synthesizer. To synthesize randomized sequences, mixtures of all four nucleotides are added at each nucleotide addition step during the synthesis process, allowing for random incorporation of nucleotides. As stated above, in one embodiment, random oligonucleotides comprise entirely random sequences; however, in other embodiments, random oligonucleotides can comprise stretches of nonrandom or partially random sequences. Partially random sequences can be created by adding the four nucleotides in different molar ratios at each addition step.

[0174] The starting library of oligonucleotides may be for example, RNA, DNA, or RNA/DNA hybrid. A starting RNA library can be generated by transcribing a DNA library in vitro using T7 RNA polymerase or modified T7 RNA polymerases and purified. The library is then mixed with the target under conditions favorable for binding and subjected to step-wise iterations of binding, partitioning and amplification, using the same general selection scheme, to achieve virtually any desired criterion of binding affinity and selectivity. More specifically, starting with a mixture containing the starting pool of nucleic acids, the SELEX method includes steps of: (a) contacting the mixture with the target under conditions favorable for binding; (b) partitioning unbound nucleic acids from those nucleic acids which have bound specifically to target molecules; (c) dissociating the nucleic acid-target complexes; (d) amplifying the nucleic acids dissociated from the nucleic acid-target complexes to yield a ligand-enriched mixture of nucleic acids; and (e) reiterating the steps of binding, partitioning, dissociating and amplifying through as many cycles as desired to yield highly specific, high affinity nucleic acid ligands to the target molecule. In those instances where RNA aptamers are being selected, the SELEX method further comprises the steps of: (i) reverse transcribing the nucleic acids dissociated from the nucleic acid-target complexes before amplification in step (d); and (ii) transcribing the amplified nucleic acids from step (d) before restarting the process.

[0175] Within a nucleic acid mixture containing a large number of possible sequences and structures, there is a wide range of binding affinities for a given target. A nucleic acid mixture comprising, for example, a 20 nucleotide randomized segment can have 4²⁰ candidate possibilities. Those which have the higher affinity constants for the target are most likely to bind to the target. After partitioning, dissociation and amplification, a second nucleic acid mixture is generated, enriched for the higher binding affinity candidates. Additional rounds of selection progressively favor better ligands until the resulting nucleic acid mixture is predominantly composed of only one or a few sequences. These can then be cloned, sequenced and individually tested for binding affinity as pure ligands or aptamers.

[0176] Cycles of selection and amplification are repeated until a desired goal is achieved. In the most general case, selection/amplification is continued until no significant improvement in binding strength is achieved on repetition of the cycle. The method is typically used to sample approximately 10¹⁴ different nucleic acid species but may be used to sample as many as about 10¹⁸ different nucleic acid species. Generally, nucleic acid aptamer molecules are selected in a 5 to 20 cycle procedure. In one embodiment, heterogeneity is introduced only in the initial selection stages and does not occur throughout the replicating process.

[0177] In one embodiment of SELEX, the selection process is so efficient at isolating those nucleic acid ligands that bind most strongly to the selected target, that only one cycle of selection and amplification is required. Such an efficient selection may occur, for example, in a chromatographic-type process wherein the ability of nucleic acids to associate with targets bound on a column operates in such a manner that the column is sufficiently able to allow separation and isolation of the highest affinity nucleic acid ligands.

[0178] In many cases, it is not necessarily desirable to perform the iterative steps of SELEX until a single nucleic acid ligand is identified. The target-specific nucleic acid ligand solution may include a family of nucleic acid structures or motifs that have a number of conserved sequences and a number of sequences which can be substituted or added without significantly affecting the affinity of the nucleic acid ligands to the target. By terminating the SELEX process prior to completion, it is possible to determine the sequence of a number of members of the nucleic acid ligand solution family. The invention provides for the identification of aptamer pools and uses thereof that jointly can be used to characterize a test sample. For example, the aptamer pools can be identified through rounds of positive and negative selection to identify cells, tissue or microvesicles indicative of a disease or condition. The invention further provides use of such aptamer pools to stain, detect and/or quantify such cells, tissue or microvesicles in a sample, thereby allowing a diagnosis, prognosis or theranosis to be provided.

[0179] A variety of nucleic acid primary, secondary and tertiary structures are known to exist. The structures or motifs that have been shown most commonly to be involved in non-Watson-Crick type interactions are referred to as hairpin loops, symmetric and asymmetric bulges, pseudoknots and myriad combinations of the same. Such motifs can typically be formed in a nucleic acid sequence of no more than 30 nucleotides. For this reason, it is often preferred that SELEX procedures with contiguous randomized segments be initiated with nucleic acid sequences containing a randomized segment of between about 20 to about 50 nucleotides and in some embodiments, about 30 to about 40 nucleotides. In one example, the 5′-fixed:random:3′-fixed sequence comprises a random sequence of about 30 to about 50 nucleotides. The random region may be referred to as the variable region herein.

[0180] The core SELEX method has been modified to achieve a number of specific objectives. For example, U.S. Pat. No. 5,707,796 describes the use of SELEX in conjunction with gel electrophoresis to select nucleic acid molecules with specific structural characteristics, such as bent DNA. U.S. Pat. No. 5,763,177 describes SELEX based methods for selecting nucleic acid ligands containing photoreactive groups capable of binding and/or photocrosslinking to and/or photoinactivating a target molecule. U.S. Pat. Nos. 5,567,588 and 5,861,254 describe SELEX based methods which achieve highly efficient partitioning between oligonucleotides having high and low affinity for a target molecule. U.S. Pat. No. 5,496,938 describes methods for obtaining improved nucleic acid ligands after the SELEX process has been performed. U.S. Pat. No. 5,705,337 describes methods for covalently linking a ligand to its target.

[0181] SELEX can also be used to obtain nucleic acid ligands that bind to more than one site on the target molecule, and to obtain nucleic acid ligands that include non-nucleic acid species that bind to specific sites on the target. SELEX provides means for isolating and identifying nucleic acid ligands which bind to any envisionable target, including large and small biomolecules such as nucleic acid-binding proteins and proteins not known to bind nucleic acids as part of their biological function as well as lipids, cofactors and other small molecules. For example, U.S. Pat. No. 5,580,737 discloses nucleic acid sequences identified through SELEX which are capable of binding with high affinity to caffeine and the closely related analog, theophylline.

[0182] Counter-SELEX is a method for improving the specificity of nucleic acid ligands to a target molecule by eliminating nucleic acid ligand sequences with cross-reactivity to one or more non-target molecules. Counter-SELEX is comprised of the steps of: (a) preparing a candidate mixture of nucleic acids; (b) contacting the candidate mixture with the target, wherein nucleic acids having an increased affinity to the target relative to the candidate mixture may be partitioned from the remainder of the candidate mixture; (c) partitioning the increased affinity nucleic acids from the remainder of the candidate mixture; (d) dissociating the increased affinity nucleic acids from the target; e) contacting the increased affinity nucleic acids with one or more non-target molecules such that nucleic acid ligands with specific affinity for the non-target molecule(s) are removed; and (f) amplifying the nucleic acids with specific affinity only to the target molecule to yield a mixture of nucleic acids enriched for nucleic acid sequences with a relatively higher affinity and specificity for binding to the target molecule. As described above for SELEX, cycles of selection and amplification are repeated until a desired goal is achieved.

[0183] A potential problem encountered in the use of nucleic acids as therapeutics and vaccines is that oligonucleotides in their phosphodiester form may be quickly degraded in body fluids by intracellular and extracellular enzymes such as endonucleases and exonucleases before the desired effect is manifest. The SELEX method thus encompasses the identification of high-affinity nucleic acid ligands containing modified nucleotides conferring improved characteristics on the ligand, such as improved in vivo stability or improved delivery characteristics. Examples of such modifications include chemical substitutions at the ribose and/or phosphate and/or base positions. SELEX identified nucleic acid ligands containing modified nucleotides are described, e.g., in U.S. Pat. No. 5,660,985, which describes oligonucleotides containing nucleotide derivatives chemically modified at the 2′ position of ribose, 5′ position of pyrimidines, and 8′ position of purines, U.S. Pat. No. 5,756,703 which describes oligonucleotides containing various 2′-modified pyrimidines, and U.S. Pat. No. 5,580,737 which describes highly specific nucleic acid ligands containing one or more nucleotides modified with 2′-amino (2′-NH₂), 2′-fluoro (2′-F), and/or 2′-O-methyl (2′-OMe) substituents.

[0184] Modifications of the nucleic acid ligands contemplated in this invention include, but are not limited to, those which provide other chemical groups that incorporate additional charge, polarizability, hydrophobicity, hydrogen bonding, electrostatic interaction, and fluxionality to the nucleic acid ligand bases or to the nucleic acid ligand as a whole. Modifications to generate oligonucleotide populations which are resistant to nucleases can also include one or more substitute internucleotide linkages, altered sugars, altered bases, or combinations thereof. Such modifications include, but are not limited to, 2′-position sugar modifications, 5-position pyrimidine modifications, 8-position purine modifications, modifications at exocyclic amines, substitution of 4-thiouridine, substitution of 5-bromo or 5-iodo-uracil; backbone modifications, phosphorothioate or allyl phosphate modifications, methylations, and unusual base-pairing combinations such as the isobases isocytidine and isoguanosine. Modifications can also include 3′ and 5′ modifications such as capping.

[0185] In one embodiment, oligonucleotides are provided in which the P(O)O group is replaced by P(O)S (“thioate”), P(S)S (“dithioate”), P(O)NR₂ (“amidate”), P(O)R, P(O)OR′, CO or CH₂ (“formacetal”) or 3′-amine (—NH—CH₂—CH₂—), wherein each R or R′ is independently H or substituted or unsubstituted alkyl. Linkage groups can be attached to adjacent nucleotides through an —O—, —N—, or —S— linkage. Not all linkages in the oligonucleotide are required to be identical. As used herein, the term phosphorothioate encompasses one or more non-bridging oxygen atoms in a phosphodiester bond replaced by one or more sulfur atoms.

[0186] In further embodiments, the oligonucleotides comprise modified sugar groups, for example, one or more of the hydroxyl groups is replaced with halogen, aliphatic groups, or functionalized as ethers or amines. In one embodiment, the 2′-position of the furanose residue is substituted by any of an O-methyl, O-alkyl, O-allyl, S-alkyl, S-allyl, or halo group. Methods of synthesis of 2′-modified sugars are described, e.g., in Sproat, et al., Nucl. Acid Res. 19:733-738 (1991); Cotten, et al., Nucl. Acid Res. 19:2629-2635 (1991); and Hobbs, et al., Biochemistry 12:5138-5145 (1973). Other modifications are known to one of ordinary skill in the art. Such modifications may be pre-SELEX process modifications or post-SELEX process modifications (modification of previously identified unmodified ligands) or may be made by incorporation into the SELEX process.

[0187] Pre-SELEX process modifications or those made by incorporation into the SELEX process yield nucleic acid ligands with both specificity for their SELEX target and improved stability, e.g., in vivo stability. Post-SELEX process modifications made to nucleic acid ligands may result in improved stability, e.g., in vivo stability without adversely affecting the binding capacity of the nucleic acid ligand.

[0188] The SELEX method encompasses combining selected oligonucleotides with other selected oligonucleotides and non-oligonucleotide functional units as described in U.S. Pat. Nos. 5,637,459 and 5,683,867. The SELEX method further encompasses combining selected nucleic acid ligands with lipophilic or non-immunogenic high molecular weight compounds in a diagnostic or therapeutic complex, as described, e.g., in U.S. Pat. Nos. 6,011,020, 6,051,698, and PCT Publication No. WO 98/18480. These patents and applications teach the combination of a broad array of shapes and other properties, with the efficient amplification and replication properties of oligonucleotides, and with the desirable properties of other molecules.

[0189] The identification of nucleic acid ligands to small, flexible peptides via the SELEX method has also been explored. U.S. Pat. No. 5,648,214 identified high affinity RNA nucleic acid ligands to an 11 amino acid.

[0190] Aptamers/oligonucleotide probes with desired specificity and binding affinity to the target(s) of interest to the present invention can be selected by the SELEX N process as described herein. As part of the SELEX process, the sequences selected to bind to the target are then optionally minimized to determine the minimal sequence having the desired binding affinity. The selected sequences and/or the minimized sequences are optionally optimized by performing random or directed mutagenesis of the sequence to increase binding affinity or alternatively to determine which positions in the sequence are essential for binding activity. Additionally, selections can be performed with sequences incorporating modified nucleotides to stabilize the aptamer molecules against degradation in vivo.

[0191] For an aptamer to be suitable for use as a therapeutic, it is preferably inexpensive to synthesize, and safe and stable in vivo. Wild-type RNA and DNA aptamers are typically not stable is vivo because of their susceptibility to degradation by nucleases. Resistance to nuclease degradation can be greatly increased by the incorporation of modifying groups at the 2′-position.

[0192] Fluoro and amino groups have been successfully incorporated into oligonucleotide pools from which aptamers have been subsequently selected. However, these modifications greatly increase the cost of synthesis of the resultant aptamer, and may introduce safety concerns in some cases because of the possibility that the modified nucleotides could be recycled into host DNA by degradation of the modified oligonucleotides and subsequent use of the nucleotides as substrates for DNA synthesis.

[0193] Aptamers that contain 2′-O-methyl (“2′-OMe”) nucleotides, as provided herein, may overcome one or more potential drawbacks. Oligonucleotides containing 2′-OMe nucleotides are nuclease-resistant and inexpensive to synthesize. Although 2′-OMe nucleotides are ubiquitous in biological systems, natural polymerases do not accept 2′-OMe NTPs as substrates under physiological conditions, thus there are no safety concerns over the recycling of 2′-OMe nucleotides into host DNA. The SELEX method used to generate 2′-modified aptamers is described, e.g., in U.S. Provisional Patent Application Ser. No. 60/430,761, filed Dec. 3, 2002, U.S. Provisional Patent Application Ser. No. 60/487,474, filed Jul. 15, 2003, U.S. Provisional Patent Application Ser. No. 60/517,039, filed Nov. 4, 2003, U.S. patent application Ser. No. 10/729,581, filed Dec. 3, 2003, and U.S. patent application Ser. No. 10/873,856, filed Jun. 21, 2004, entitled “Method for in vitro Selection of 2′-O-methyl substituted Nucleic Acids,” each of which is herein incorporated by reference in its entirety.

### Oligonucleotide Probe Methods

[0194] Nucleic acid sequences fold into secondary and tertiary motifs particular to their nucleotide sequence. These motifs position the positive and negative charges on the nucleic acid sequences in locations that enable the sequences to bind to specific locations on target molecules, including without limitation proteins and other amino acid sequences. These binding sequences are known in the field as aptamers. Due to the trillions of possible unique nucleotide sequences in even a relatively short stretch of nucleotides (e.g., 10, 11, 12, 13, 14, 15, 16, 17, 18, 19, 20, 21, 22, 23, 24, 25, 26, 27, 28, 29, 30, 31, 32, 33, 34, 35, 36, 37, 38, 39 or 40 nucleotides), a large variety of motifs can be generated, resulting in aptamers for almost any desired protein or other target.

[0195] As described above, aptamers can be created by randomly generating oligonucleotides of a specific length, typically 20-80 base pairs long, e.g., 20, 21, 22, 23, 24, 25, 26, 27, 28, 29, 30, 31, 32, 33, 34, 35, 36, 37, 38, 39, 40, 41, 42, 43, 44, 45, 46, 47, 48, 49, 50, 51, 52, 53, 54, 55, 56, 57, 58, 59, 60, 61, 62, 63, 64, 65, 66, 67, 68, 69, 70, 71, 72, 73, 74, 75, 76, 77, 78, 79 or 80 base pairs. These random oligonucleotides are then incubated with the target of interest (e.g., tissue, cell, microvesicle, protein, etc). After several wash steps, the oligonucleotides that bind to the target are collected and amplified. The amplified aptamers are iteratively added to the target and the process is repeated, often 15-20 times. A common version of this process known to those of skill in the art as the SELEX method.

[0196] The end result comprises one or more oligonucleotide probes/aptamers with high affinity to the target. The invention provides further processing of such resulting aptamers that can be use to provide desirable characteristics: 1) competitive binding assays to identify aptamers to a desired epitope; 2) motif analysis to identify high affinity binding aptamers in silico; and 3) aptamer selection assays to identify aptamers that can be used to detect a particular disease. The methods are described in more detail below and further in the Examples.

[0197] The invention further contemplates aptamer sequences that are highly homologous to the sequences that are discovered by the methods of the invention. “High homology” typically refers to a homology of 40% or higher, preferably 60% or higher, 70% or higher, more preferably 80% or higher, even more preferably 85%, 90%, 91%, 92%, 93%, 94%, 95%, 96%, 97%, 98%, 99% or higher between a polynucleotide sequence sequence and a reference sequence. In an embodiment, the reference sequence comprises the sequence of one or more aptamer provided herein. Percent homologies (also referred to as percent identity) are typically carried out between two optimally aligned sequences. Methods of alignment of sequences for comparison are well-known in the art. Optimal alignment of sequences and comparison can be conducted, e.g., using the algorithm in “Wilbur and Lipman, Proc Natl Acad Sci USA 80: 726-30 (1983)”. Homology calculations can also be performed using BLAST, which can be found on the NCBI server at: www.ncbi.nlm.nih.gov/BLAST/(Altschul S F, et al, Nucleic Acids Res. 1997; 25(17):3389-402; Altschul S F, et al, J Mol. Biol. 1990; 215(3):403-10). In the case of an isolated polynucleotide which is longer than or equivalent in length to the reference sequence, e.g., a sequence identified by the methods herein, the comparison is made with the full length of the reference sequence. Where the isolated polynucleotide is shorter than the reference sequence, e.g., shorter than a sequence identified by the methods herein, the comparison is made to a segment of the reference sequence of the same length (excluding any loop required by the homology calculation).

[0198] The invention further contemplates aptamer sequences that are functional fragments of the sequences that are discovered by the methods of the invention. In the context of an aptamer sequence, a “functional fragment” of the aptamer sequence may comprise a subsequence that binds to the same target as the full length sequence. In some instances, a candidate aptamer sequence is from a member of a library that contains a 5′ leader sequences and/or a 3′ tail sequence. Such leader sequences or tail sequences may serve to facilitate primer binding for amplification or capture, etc. In these embodiments, the functional fragment of the full length sequence may comprise the subsequence of the candidate aptamer sequence absent the leader and/or tail sequences.

[0199] Competitive Antibody Addition

[0200] Known aptamer production methods may involve eluting all bound aptamers from the target sequence. In some cases, this may not easily identify the desired aptamer sequence. For example, when trying to replace an antibody in an assay, it may be desirable to only collect aptamers that bind to the specific epitope of the antibody being replaced. The invention provides a method comprising addition of an antibody that is to be replaced to the aptamer/target reaction in order to allow for the selective collection of aptamers which bind to the antibody epitope. In an embodiment, the method comprises incubating a reaction mixture comprising randomly generated oligonucleotides with a target of interest, removing unbound aptamers from the reaction mixture that do not bind the target, adding an antibody to the reaction mixture that binds to that epitope of interest, and collecting the aptamers that are displaced by the antibody. The target can be a a biological entity such as disclosed herein, e.g., a protein.

[0201] Motif Analysis

[0202] In aptamer experiments, multiple aptamer sequences can be identified that bind to a given target. These aptamers will have various binding affinities. It can be time consuming and laborious to generate quantities of these many aptamers sufficient to assess the affinities of each. To identify large numbers of aptamers with the highest affinities without physically screening large subsets, the invention provides a method comprising the analysis of the two dimensional structure of one or more high affinity aptamers to the target of interest. In an embodiment, the method comprises screening the database for aptamers that have similar two-dimensional structures, or motifs, but not necessarily similar primary sequences. In an embodiment, the method comprises identifying a high affinity aptamer using traditional methods such as disclosed herein or known in the art (e.g. surface plasmon resonance binding assay), approximating the two-dimensional structure of the high affinity aptamer, and identifying aptamers from a pool of sequences that are predicted to have a similar two-dimensional structure to the high affinity aptamer. The method thereby provides a pool of candidates that also bind the target of interest. The two-dimensional structure of an oligo can be predicting using methods known in the art, e.g., via free energy (AG) calculations performed using a commercially available software program such as Vienna or mFold, for example as described in Mathews, D., Sabina, J., Zucker, M. & Turner, H. Expanded sequence dependence of thermodynamic parameters provides robust prediction of RNA secondary structure. J. Mol. Biol. 288, 911-940 (1999); Hofacker et al., Monatshefte f. Chemie 125: 167-188 (1994); and Hofacker, I. L. Vienna RNA secondary structure server. Nucleic Acids Res. 31, 3429-3431 (2003), the contents of which are incorporated herein by reference in their entirety. See FIGS. 2A-2B. The pool of sequences can be sequenced from a pool of randomly generated aptamer candidates using a high-throughput sequencing platform, such as the Ion Torrent platform from Thermo Fisher Scientific (Waltham, Mass.) or HiSeq/NextSeq/MiSeq platform from Illumina, Inc (San Diego, Calif.). Identifying aptamers from a pool of sequences that are predicted to have a similar two-dimensional structure to the high affinity aptamer may comprise loading the resulting sequences into the software program of choice to identify members of the pool of sequences with similar two-dimensional structures as the high affinity aptamer. The affinities of the pool of sequences can then be determined in situ, e.g., surface plasmon resonance binding assay or the like.

[0203] Aptamer Subtraction Methods

[0204] In order to develop an assay to detect a disease, for example, cancer, one typically screens a large population of known biomarkers from normal and diseased patients in order to identify markers that correlate with disease. This process works where discriminating markers are already described. In order to address this problem, the invention provides a method comprising subtracting out non-discriminating aptamers from a large pool of aptamers by incubating them initially with non-target tissue, microvesicles, cells, or other targets of interest. The non-target entities can be from a normal/healthy/non-diseased sample. The aptamers that did not bind to the normal non-target entities are then incubated with diseased entities. The aptamers that bind to the diseased entities but that did not bind the normal entities are then possible candidates for an assay to detect the disease. This process is independent of knowing the existence of a particular marker in the diseased sample.

[0205] Subtraction methods can be used to identify aptamers that preferentially recognize a desired population of targets. In an embodiment, the subtraction method is used to identify aptamers that preferentially recognize target from a diseased target population over a control (e.g., normal or non-diseased) population. The diseased target population may be a tissue or a population of cells or microvesicles from a diseased individual or individuals, whereas the control population comprises corresponding tissue, cells or microvesicles from a non-diseased individual or individuals. The disease can be a cancer or other disease disclosed herein or known in the art. Accordingly, the method provides aptamers that preferentially identify disease targets versus control targets.

[0206] Circulating microvesicles can be isolated from control samples, e.g., plasma from “normal” individuals that are absent a disease of interest, such as an absence of cancer. Vesicles in the sample are isolated using a method disclosed herein or as known in the art. For example, vesicles can be isolated from the plasma by one of the following methods: filtration, ultrafiltration, nanomembrane ultrafiltration, the ExoQuick reagent (System Biosciences, Inc., Mountain View, Calif.), centrifugation, ultracentrifugation, using a molecular crowding reagent (e.g., TEXIS from Life Technologies), polymer precipitation (e.g., polyethylene glycol (PEG)), affinity isolation, affinity selection, immunoprecipitation, chromatography, size exclusion, or a combination of any of these methods. The microvesicles isolated in each case will be a mixture of vesicle types and will be various sizes although ultracentrifugation methods may have more tendencies to produce exosomal-sized vesicles. Randomly generated oligonucleotide libraries (e.g., produced as described in the Examples herein) are incubated with the isolated normal vesicles. The aptamers that do not bind to these vesicles are isolated, e.g., by precipitating the vesicles (e.g, with PEG) and collecting the supernatant containing the non-binding aptamers. These non-binding aptamers are then contacted with vesicles isolated from diseased patients (e.g., using the same methods as described above) to allow the aptamers to recognize the disease vesicles. Next, aptamers that are bound to the diseased vesicles are collected. In an embodiment, the vesicles are isolated then lysed using a chaotropic agent (e.g., SDS or a similar detergent), and the aptamers are then captured by running the lysis mixture over an affinity column. The affinity column may comprise streptavidin beads in the case of biotin conjugated aptamer pools. The isolated aptamers are the amplified. The process can then then repeated, e.g., 1, 2, 3, 4, 5, 6, 7, 8, 9, 10, 11, 12, 13, 14, 15, 16, 17, 18, 19 or 20 or more times to achieve aptamers having a desired selectivity for the target.

[0207] In one aspect of the invention, an aptamer profile is identified that can be used to characterize a biological sample of interest. In an embodiment, a pool of randomly generated oligonucleotides, e.g., at least 10, 10², 10³, 10⁴, 10⁵, 10⁶, 10⁷, 10⁸, 10⁹, 10¹⁰, 10¹¹, 10¹², 10¹³, 10¹⁴, 10¹⁵, 10¹⁶, 10¹⁷, 10¹⁸, 10¹⁹ or at least 10²⁰ oligonucleotides, is contacted with a biological component or target of interest from a control population. The oligonucleotides that do not bind the biological component or target of interest from the control population are isolated and then contacted with a biological component or target of interest from a test population. The oligonucleotides that bind the biological component or target of interest from the test population are retained. The retained oligonucleotides can be used to repeat the process by contacting the retained oligonucleotides with the biological component or target of interest from the control population, isolating the retained oligonucleotides that do not bind the biological component or target of interest from the control population, and again contacting these isolated oligonucleotides with the biological component or target of interest from the test population and isolating the binding oligonucleotides. The “component” or “target” can be anything that is present in sample to which the oligonucleotides are capable of binding (e.g., tissue, cells, microvesicles, polypeptides, peptide, nucleic acid molecules, carbodyhrates, lipids, etc.). The process can be repeated any number of desired iterations, e.g., 1, 2, 3, 4, 5, 6, 7, 8, 9, 10, 11, 12, 13, 14, 15, 16, 17, 18, 19 or 20 or more times. The resulting oligonucleotides comprise aptamers that can differentially detect the test population versus the control. These aptamers provide an aptamer profile, which comprises a biosignature that is determined using one or more aptamer, e.g., a biosignature comprising a presence or level of the component or target which is detected using the one or more aptamer.

[0208] An exemplary process is illustrated in FIG. 3, which demonstrates the method to identify aptamer that preferentially recognize cancer exosomes using exosomes from normal (non-cancer) individuals as a control. In the figure, exosomes are exemplified but one of skill will appreciate that other microvesicles can be used in the same manner. The resulting aptamers can provide a profile that can differentially detect the cancer exosomes from the normal exosomes. One of skill will appreciate that the same steps can be used to derive an aptamer profile to characterize any disease or condition of interest. The process can also be applied with tissue, cells, or other targets of interest.

[0209] In an embodiment, the invention provides an isolated polynucleotide that encodes a polypeptide, or a fragment thereof, identified by the methods above. The invention further provides an isolated polynucleotide having a nucleotide sequence that is at least 60% identical to the nucleotide sequence identified by the methods above. More preferably, the isolated nucleic acid molecule is at least 65%, 70%, 75%, 80%, 85%, 90%, 91%, 92%, 93%, 94%, 95%, 96%, 97%, 98%, 99% or more, identical to the nucleotide sequence identified by the methods above. In the case of an isolated polynucleotide which is longer than or equivalent in length to the reference sequence, e.g., a sequence identified by the methods above, the comparison is made with the full length of the reference sequence. Where the isolated polynucleotide is shorter than the reference sequence, e.g., shorter than a sequence identified by the methods above, the comparison is made to a segment of the reference sequence of the same length (excluding any loop required by the homology calculation).

[0210] In a related aspect, the invention provides a method of characterizing a biological phenotype using an aptamer profile. The aptamer profile can be determined using the method above. The aptamer profile can be determined for a test sample and compared to a control aptamer profile. The phenotype may be a disease or disorder such as a cancer. Characterizing the phenotype can include without limitation providing a diagnosis, prognosis, or theranosis. Thus, the aptamer profile can provide a diagnostic, prognostic and/or theranostic readout for the subject from whom the test sample is obtained.

[0211] In another embodiment, an aptamer profile is determined for a test sample by contacting a pool of aptamer molecules to the test sample, contacting the same pool of aptamers to a control sample, and identifying one or more aptamer molecules that differentially bind a component or target in the test sample but not in the control sample (or vice versa). A “component” or “target” as used in the context of the biological test sample or control sample can be anything that is present in sample to which the aptamers are capable of binding (e.g., tissue, cells, microvesicles, polypeptides, peptide, nucleic acid molecules, carbodyhrates, lipids, etc.). For example, if a sample is a plasma or serum sample, the aptamer molecules may bind a polypeptide biomarker that is solely expressed or differentially expressed (over- or underexpressed) in a disease state as compared to a non-diseased subject. Comparison of the aptamer profile in the test sample as compared to the control sample may be based on qualitative and quantitative measure of aptamer binding (e.g., binding versus no binding, or level of binding in test sample versus different level of binding in the reference control sample).

[0212] In an aspect, the invention provides a method of identifying a target-specific aptamer profile, comprising contacting a biological test sample with a pool of aptamer molecules, contacting the pool to a control biological sample, identifying one or more aptamers that bind to a component in said test sample but not to the control sample, thereby identifying an aptamer profile for said biological test sample. In an embodiment, a pool of aptamers is selected against a disease sample and compared to a reference sample, the aptamers in a subset that bind to a component(s) in the disease sample but not in the reference sample can be sequenced using conventional sequencing techniques to identify the subset that bind, thereby identifying an aptamer profile for the particular disease sample. In this way, the aptamer profile provides an individualized platform for detecting disease in other samples that are screened. Furthermore, by selecting an appropriate reference or control sample, the aptamer profile can provide a diagnostic, prognostic and/or theranostic readout for the subject from whom the test sample is obtained.

[0213] In a related aspect, the invention provides a method of selecting a pool of aptamers, comprising: (a) contacting a biological control sample with a pool of oligonucleotides; (b) isolating a first subset of the pool of oligonucleotides that do not bind the biological control sample; (c) contacting the biological test sample with the first subset of the pool of oligonucleotides; and (d) isolating a second subset of the pool of oligonucleotides that bind the biological test sample, thereby selecting the pool of aptamers. The pool of oligonucleotides may comprise any number of desired sequences, e.g., at least 10, 10², 10³, 10⁴, 10⁵, 10⁶, 10⁷, 10⁸, 10⁹, 10¹⁰, 10¹¹, 10¹², 10¹³, 10¹⁴, 10¹⁵, 10¹⁶, 10¹⁷, 10¹⁸, 10¹⁹ or at least 10²⁰ oligonucleotides may be present in the starting pool. Steps (a)-(d) may be repeated to further hone the pool of aptamers. In an embodiment, these steps are repeated at least 1, 2, 3, 4, 5, 6, 7, 8, 9, 10, 11, 12, 13, 14, 15, 16, 17, 18, 19 or at least 20 times.

[0214] As described herein, the biological test sample and biological control sample may comprise tissues, cells, microvesicles, or biomarkers of interest. In an embodiment, the biological test sample and optionally biological control sample comprise a bodily fluid. The bodily fluid may comprise without limitation peripheral blood, sera, plasma, ascites, urine, cerebrospinal fluid (CSF), sputum, saliva, bone marrow, synovial fluid, aqueous humor, amniotic fluid, cerumen, breast milk, broncheoalveolar lavage fluid, semen, prostatic fluid, Cowper's fluid, pre-ejaculatory fluid, female ejaculate, sweat, fecal matter, hair, tears, cyst fluid, pleural fluid, peritoneal fluid, malignant fluid, pericardial fluid, lymph, chyme, chyle, bile, interstitial fluid, menses, pus, sebum, vomit, vaginal secretions, mucosal secretion, stool water, pancreatic juice, lavage fluids from sinus cavities, bronchopulmonary aspirates or other lavage fluids. The biological test sample and optionally biological control may also comprise a tumor sample, e.g., cells from a tumor or tumor tissue. In other embodiments, the biological test sample and optionally biological control sample comprise a cell culture medium. In embodiments, the biological test sample comprises a diseased sample and the biological control sample comprises a non-diseased sample. Accordingly, the pool of aptamers may be used to provide a diagnostic, prognostic and/or theranostic readout for the disease.

[0215] As noted, the invention can be used to assess microvesicles. Microvesicles are powerful biomarkers because the vesicles provide one biological entity that comprises multiple pieces of information. For example as described, a vesicle can have multiple surface antigens, each of which provides complementary information. Consider a cancer marker and a tissue specific marker. If both markers are individually present in a sample, e.g., both are circulating proteins or nucleic acids, it may not be ascertainable whether the cancer marker and the tissue specific marker are derived from the same anatomical locale. However, if both the cancer marker and the tissue specific marker are surface antigens on a single microvesicle, the vesicle itself links the two markers and provides an indication of a disease (via the cancer marker) and origin of the disease (via the tissue specific marker). Furthermore, the vesicle can have any number of surface antigens and also payload that can be assessed. Accordingly, the invention provides a method for identifying binding agents comprising contacting a plurality of extracellular microvesicles with a randomly generated library of binding agents, identifying a subset of the library of binding agents that have an affinity to one or more components of the extracellular microvesicles. The binding agents may comprise aptamers, antibodies, and/or any other useful type of binding agent disclosed herein or known in the art.

[0216] In a related aspect, the invention provides a method for identifying a plurality of target ligands comprising, (a) contacting a reference microvesicle population with a plurality of ligands that are capable of binding one or more microvesicle surface markers, (b) isolating a plurality of reference ligands, wherein the plurality of reference ligands comprise a subset of the plurality of ligands that do not have an affinity for the reference microvesicle population; (c) contacting one or more test microvesicle with the plurality of reference ligands; and (d) identifying a subset of ligands from the plurality of reference ligands that form complexes with a surface marker on the one or more test microvesicle, thereby identifying the plurality of target ligands. The term “ligand” can refer a molecule, or a molecular group, that binds to another chemical entity to form a larger complex. Accordingly, a binding agent comprises a ligand. The plurality of ligands may comprise aptamers, antibodies and/or other useful binding agents described herein or known in the art. The process can also be applied to tissue samples. See, e.g., Examples 19-31 in International Patent Application PCT/US 17/23108, filed Mar. 18, 2017; which application is incorporated herein in its entirety.

[0217] The invention further provides kits comprising one or more reagent to carry out the methods above. In an embodiment, the one or more reagent comprises a library of potential binding agents that comprises one or more of an aptamer, antibody, and other useful binding agents described herein or known in the art.

[0218] Negative and Positive Aptamer Selection

[0219] Aptamers can be used in various biological assays, including numerous types of assays which rely on a binding agent. For example, aptamers can be used instead of or along side antibodies in various immunoassay formats, such as sandwich assays, flow cytometry and IHC. The invention provides an aptamer screening method that identifies aptamers that do not bind to any surfaces (substrates, tubes, filters, beads, other antigens, etc.) throughout the assay steps and bind specifically to an antigen of interest. The assay relies on negative selection to remove aptamers that bind non-target antigen components of the final assay. The negative selection is followed by positive selection to identify aptamers that bind the desired antigen.

[0220] In an aspect, the invention provides a method of identifying an aptamer specific to a target of interest, comprising (a) contacting a pool of candidate aptamers with one or more assay components, wherein the assay components do not comprise the target of interest; (b) recovering the members of the pool of candidate aptamers that do not bind to the one or more assay components in (a); (c) contacting the members of the pool of candidate aptamers recovered in (b) with the target of interest in the presence of one or more confounding target; and (d) recovering a candidate aptamer that binds to the target of interest in step (c), thereby identifying the aptamer specific to the target of interest. In the method, steps (a) and (b) provide negative selection to remove aptamers that bind non-target entities. Conversely, steps (c) and (d) provide positive selection by identifying aptamers that bind the target of interest but not other confounding targets, e.g., other antigens that may be present in a biological sample which comprises the target of interest. The pool of candidate aptamers may comprise at least 10, 10², 10³, 10⁴, 10⁵, 10⁶, 10⁷, 10⁸, 10⁹, 10¹⁰, 10¹¹, 10¹², 10¹³, 10¹⁴, 10¹⁵, 10¹⁶, 10¹⁷, 10¹⁸, 10¹⁹ or at least 10²⁰ nucleic acid sequences. One illustrative approach for performing the method is provided in Example 7 of PCT/US2016/044595, filed Jul. 28, 2016 and incorporated by reference herein in its entirety

[0221] In some embodiments, steps (a)-(b) are optional. In other embodiments, steps (a)-(b) are repeated at least 1, 2, 3, 4, 5, 6, 7, 8, 9, 10, 11, 12, 13, 14, 15, 16, 17, 18, 19 or at least 20 times before positive selection in step (c) is performed. The positive selection can also be performed in multiple rounds. Steps (c)-(d) can be repeated at least 1, 2, 3, 4, 5, 6, 7, 8, 9, 10, 11, 12, 13, 14, 15, 16, 17, 18, 19 or at least 20 times before identifying the aptamer specific to the target of interest. Multiple rounds may provide improved stringency of selection.

[0222] In some embodiments, the one or more assay components contacted with the aptamer pool during negative selection comprise one or more of a substrate, a bead, a planar array, a column, a tube, a well, or a filter. One of skill will appreciate that the assay components can include any substance that may be part of a desired biological assay.

[0223] The target of interest can be any appropriate entity that can be detected when recognized by an aptamer. In an embodiment, the target of interest comprises a protein or polypeptide. As used herein, “protein,” “polypeptide” and “peptide” are used interchangeably unless stated otherwise. The target of interest can be a nucleic acid, including DNA, RNA, and various subspecies of any thereof as disclosed herein or known in the art. The target of interest can comprise a lipid. The target of interest can comprise a carbohydrate. The target of interest can also be a complex, e.g., a complex comprising protein, nucleic acids, lipids and/or carbohydrates. In some embodiments, the target of interest comprises a tissue, cell, or microvesicle. In such cases, the aptamer may be a binding agent to a surface antigen or disease antigen.

[0224] The surface antigen can be a biomarker of a disease or disorder. In such cases, the aptamer may be used to provide a diagnosis, prognosis or theranosis of the disease or disorder. For example, the one or more protein may comprise one or more of PSMA, PCSA, B7H3, EpCam, ADAM-10, BCNP, EGFR, IL1B, KLK2, MMP7, p53, PBP, SERPINB3, SPDEF, SSX2, and SSX4. These markers can be used detect a prostate cancer. Additional surface antigens and disease antigens are provided in Tables 3-4 herein and Table 4 of International Patent Application PCT/US2016/040157, filed Jun. 29, 2016, and published as WO2017004243 on Jan. 5, 2017.

[0225] The one or more confounding target can be an antigen other than the target of interest. For example, a confounding target can be another entity that may be present in a sample to be assayed. As a non-limiting example, consider that the sample to be assessed is a tissue or blood sample from an individual. The target of interest may be a protein, e.g., a surface antigen, which is present in the sample. In this case, a confounding target could be selected from any other antigen that is likely to be present in the sample. Accordingly, the positive selection should provide candidate aptamers that recognize the target of interest but have minimal, if any, interactions with the confounding targets. In some embodiments, the target of interest and the one or more confounding target comprise the same type of biological entity, e.g., all protein, all nucleic acid, all carbohydrate, or all lipids. As a non-limiting example, the target of interest can be a protein selected from the group consisting of SSX4, SSX2, PBP, KLK2, SPDEF, and EpCAM, and the one or more confounding target comprises the other members of this group. In other embodiments, the target of interest and the one or more confounding target comprise different types of biological entities, e.g., any combination of protein, nucleic acid, carbohydrate, and lipids. The one or more confounding targets may also comprise different types of biological entities, e.g., any combination of protein, nucleic acid, carbohydrate, and lipids.

[0226] In an embodiment, the invention provides an isolated polynucleotide, or a fragment thereof, identified by the methods above. The invention further provides an isolated polynucleotide having a nucleotide sequence that is at least 60% identical to the nucleotide sequence identified by the methods above. The isolated polynucleotide is also referred to as an aptamer or oligonucleotide probe. More preferably, the isolated nucleic acid molecule is at least 65%, 70%, 75%, 80%, 85%, 90%, 91%, 92%, 93%, 94%, 95%, 96%, 97%, 98%, 99% or more, identical to the nucleotide sequence identified by the methods above. In the case of an isolated polynucleotide which is longer than or equivalent in length to the reference sequence, e.g., a sequence identified by the methods above, the comparison is made with the full length of the reference sequence. Where the isolated polynucleotide is shorter than the reference sequence, e.g., shorter than a sequence identified by the methods above, the comparison is made to a segment of the reference sequence of the same length (excluding any loop required by the homology calculation).

[0227] In a related aspect, the invention provides a method of selecting a group of aptamers, comprising: (a) contacting a pool of aptamers to a population of microvesicles from a first sample; (b) enriching a subpool of aptamers that show affinity to the population of microvesicles from the first sample; (c) contacting the subpool to a second population of microvesicles from a second sample; and (d) depleting a second subpool of aptamers that show affinity to the second population of microvesicles from the second sample, thereby selecting the group of aptamers that have preferential affinity for the population of microvesicles from the first sample. The first sample and/or second sample may comprise a biological fluid such as disclosed herein. For example, the biological fluid may include without limitation blood, a blood derivative, plasma, serum or urine. The first sample and/or second sample may also be derived from a cell culture.

[0228] In another related aspect, the invention provides a method of selecting a group of aptamers, comprising: (a) contacting a pool of aptamers to a tissue from a first sample; (b) enriching a subpool of aptamers that show affinity to the tissue from the first sample; (c) contacting the subpool to a second tissue from a second sample; and (d) depleting a second subpool of aptamers that show affinity to the second tissue from the second sample, thereby selecting the group of aptamers that have preferential affinity for the tissue from the first sample as compared to the second sample. The first sample and/or second sample may comprise a fixed tissue such as disclosed herein. For example, the fixed tissue may include FFPE tissue. The first sample and/or second sample may comprise a tumor sample.

[0229] In an embodiment, the first sample comprises a cancer sample and the second sample comprises a control sample, such as a non-cancer sample. The first sample and/or and the second sample may each comprise a pooled sample. For example, the first sample and/or second sample can comprise bodily fluid from 2, 3, 4, 5, 6, 7, 8, 9, 10, 11, 12, 13, 14, 15, 16, 17, 18, 19, 20, 25, 30, 40, 50, 60, 70, 80, 90, 100 or more than 100 individuals. In such cases, the members of a pool may be chosen to represent a desired phenotype. In a non-limiting example, the members of the first sample pool may be from patients with a cancer and the members of the second sample pool may be from non-cancer controls. With tissue samples, the first sample may comprise tissues from different individuals, e.g., from 2, 3, 4, 5, 6, 7, 8, 9, 10, 11, 12, 13, 14, 15, 16, 17, 18, 19, 20, 25, 30, 40, 50, 60, 70, 80, 90, 100 or more than 100 individuals. As a non-limiting example, the first sample may comprise a fixed tissue from each individual.

[0230] Steps (a)-(d) can be repeated a desired number of times in order to further enrich the pool in aptamers that have preferential affinity for the target from the first sample. For example, steps (a)-(d) can be repeated 1, 2, 3, 4, 5, 6, 7, 8, 9, 10, 11, 12, 13, 14, 15, 16, 17, 18, 19, 20 or more than 20 times. The output from step (d) can be used as the input to repeated step (a). In embodiment, the first sample and/or second sample are replaced with a different sample before repeating steps (a)-(d). In a non-limiting example, members of a first sample pool may be from patients with a cancer and members of a second sample pool may be from non-cancer controls. During subsequent repetitions of steps (a)-(d), the first sample pool may comprise samples from different cancer patients than in the prior round/s. Similarly, the second sample pool may comprise samples from different controls than in the prior round/s.

[0231] In still another related aspect, the invention provides a method of enriching a plurality of oligonucleotides, comprising: (a) contacting a first sample with the plurality of oligonucleotides; (b) fractionating the first sample contacted in step (a) and recovering members of the plurality of oligonucleotides that fractionated with the first sample; (c) contacting the recovering members of the plurality of oligonucleotides from step (b) with a second sample; (d) fractionating the second sample contacted in step (c) and recovering members of the plurality of oligonucleotides that did not fractionate with the second sample; (e) contacting the recovering members of the plurality of oligonucleotides from step (d) with a third sample; and (f) fractionating the third sample contacted in step (a) and recovering members of the plurality of oligonucleotides that fractionated with the third sample; thereby enriching the plurality of oligonucleotides. The samples can be of any appropriate form as described herein, e.g., tissue, cells, microvesicles, etc. The first and third samples may have a first phenotype while the second sample has a second phenotype. Thus, positive selection occurs for the samples associated with the first phenotype and negative selection occurs for the samples associated with the second phenotype. In one non-limiting example of such selection schemes as described in Example 18 of PCT/US2016/044595, filed Jul. 28, 2016, the first phenotype comprises biopsy-positive breast cancer and the second phenotype comprises non-breast cancer (biopsy-negative or healthy).

[0232] In some embodiments, the first phenotype comprises a medical condition, disease or disorder and the second phenotype comprises a healthy state or a different state of the medical condition, disease or disorder. The first phenotype can be a healthy state and the second phenotype comprises a medical condition, disease or disorder. The medical condition, disease or disorder can be any detectable medical condition, disease or disorder, including without limitation a cancer, a premalignant condition, an inflammatory disease, an immune disease, an autoimmune disease or disorder, a cardiovascular disease or disorder, neurological disease or disorder, infectious disease or pain. Various types of such conditions are disclosed herein. See, e.g., Section “Phenotypes” herein.

[0233] Any useful method to isolate microvesicles in whole or in part can be used to fractionate the samples as appropriate. Several useful techniques are described herein. In an embodiment, the fractionating comprises ultracentrifugation in step (b) and polymer precipitation in steps (d) and (f). In other embodiments, polymer precipitation is used in all steps. The polymer can be polyethylene glycol (PEG). Any appropriate form of PEG may be used. For example, the PEG may be PEG 8000. The PEG may be used at any appropriate concentration. For example, the PEG can be used at a concentration of 1%, 2%, 3%, 4%, 5%, 6%, 7%, 8%, 9%, 10%, 11%, 12%, 13%, 14% or 15% to isolate the microvesicles. In some embodiments, the PEG is used at a concentration of 6%.

[0234] When the sample comprises an FFPE tissue sample, the sample can be subjected to epitope retrival, also known as antigen retrival, prior to the enrichment process. Although tissue fixation is useful for the preservation of tissue morphology, this process can also have a negative impact on immuno detection methods. For example, fixation can alter protein biochemistry such that the epitope of interest is masked and can no longer bind to the primary antibody. Masking of the epitope can be caused by cross-linking of amino acids within the epitope, cross-linking unrelated peptides at or near an epitope, altering the conformation of an epitope, or altering the electrostatic charge of the antigen. Epitope retrieval refers to any technique in which the masking of an epitope is reversed and epitope-recognition is restored. Techniques for epitope retrieval are known in the art. For example, enzymes including Proteinase K, Trypsin, and Pepsin have been used successfully to restore epitope binding. Without being bound by theory, the mechanism of action may be the cleavage of peptides that may be masking the epitope. Heating the sample may also reverse some cross-links and allows for restoration of secondary or tertiary structure of the epitope. Change in pH or cation concentration may also influence epitope availability.

[0235] The contacting can be performed in the presence of a competitor, which may reduce non-specific binding events. Any useful competitor can be used. In an embodiment, the competitor comprises at least one of salmon sperm DNA, tRNA, dextran sulfate and carboxymethyl dextran. As desired, different competitors or competitor concentrations can be used at different contacting steps.

[0236] The method can be repeated to achieve a desired enrichment. In an embodiment, steps (a)-(f) are repeated at least once. These steps can be repeated 1, 2, 3, 4, 5, 6, 7, 8, 9, 10, 11, 12, 13, 14, 15, 16, 17, 18, 19, 20, or more than 20 times as desired. At the same time, each of the contacting steps can be repeated as desired. In some embodiments, the method further comprises: (i) repeating steps (a)-(b) at least once prior to step (c), wherein the recovered members of the plurality of oligonucleotides that fractionated with the first sample in step (b) are used as the input plurality of oligonucleotides for the repetition of step (a); (ii) repeating steps (c)-(d) at least once prior to step (e), wherein the recovered members of the plurality of oligonucleotides that did not fractionate with the second sample in step (d) are used as the input plurality of oligonucleotides for the repetition of step (c); and/or (iii) repeating steps (e)-(f) at least once, wherein the recovered members of the plurality of oligonucleotides that fractionated with the third sample in step (f) are used as the input plurality of oligonucleotides for the repetition of step (e). Repetitions (i)-(iii) can be repeated any desired number of times, e.g., (i)-(iii) can be repeated 1, 2, 3, 4, 5, 6, 7, 8, 9, 10, 11, 12, 13, 14, 15, 16, 17, 18, 19, 20 or more than 20 times. In an embodiment, (i)-(iii) each comprise three repetitions.

[0237] The method may further comprise identifying the members of the selected group of aptamers or oligonucleotides, e.g., by DNA sequencing. The sequencing may be performed by Next Generation sequencing as desired and after or before any desired step in the method.

[0238] The method may also comprise identifying the targets of the selected group of aptamers/oligonucleotides. Useful methods to identify such targets are disclosed herein. In a non-limiting example, an enriched oligonucleotide library is contacted with an appropriate sample (e.g., the first or third sample), the library is cross-linked to the sample, and the library is recovered. Proteins cross-linked with the recovered library are identified, e.g., by mass spectrometry.

[0239] Oligonucleotide Probe Target Identification

[0240] The methods and kits above can be used to identify binding agents that differentiate between two target populations. The invention further provides methods of identifying the targets of such binding agents. For example, the methods may further comprise identifying a surface marker of a cell or microvesicle that is recognized by the binding agent.

[0241] In an embodiment, the invention provides a method of identifying a target of a binding agent comprising: (a) contacting the binding agent with the target to bind the target with the binding agent, wherein the target comprises a surface antigen of a cell or microvesicle; (b) disrupting the cell or microvesicle under conditions which do not disrupt the binding of the target with the binding agent; (c) isolating the complex between the target and the binding agent; and (d) identifying the target bound by the binding agent. The binding agent can be a binding agent identified by the methods above, e.g., an oligonucleotide probe, ligand, antibody, or other useful binding agent that can differentiate between two target populations, e.g., by differentiating between biomarkers thereof.

[0242] An illustrative schematic for carrying on the method is shown in FIG. 4. The figure shows a binding agent 402, here an oligonucleotide probe or aptamer for purposes of illustration, tethered to a substrate 401. The binding agent 402 can be covalently attached to substrate 401. The binding agent 402 may also be non-covalently attached. For example, binding agent 402 can comprise a label which can be attracted to the substrate, such as a biotin group which can form a complex with an avidin/streptavidin molecule that is covalently attached to the substrate. This can allow a complex to be formed between the aptamer and a target cell or particle (e.g., a microvesicle) while in solution, followed by capture of the aptamer using the biotin label. The binding agent 402 binds to a surface antigen 403 of such target cell or microvesicle 404. In the step signified by arrow (i), the cell or microvesicle 405 is disrupted while leaving the complex between the binding agent 402 and surface antigen 403 intact. Disrupted cell or microvesicle 405 is removed, e.g., via washing or buffer exchange, in the step signified by arrow (ii). In the step signified by arrow (iii), the surface antigen 403 is released from the binding agent 402. The surface antigen 403 can be analyzed to determine its identity using methods disclosed herein and/or known in the art. The target of the method can be any useful biological entity associated with a cell or microvesicle. For example, the target may comprise a protein, nucleic acid, lipid or carbohydrate, or other biological entity disclosed herein or known in the art.

[0243] In some embodiments of the method, the target is cross-linked to the binding agent prior disrupting the cell or microvesicle. Without being bound by theory, this step may assist in maintaining the complex between the binding agent and the target during the disruption process. Any useful method of crosslinking disclosed herein or known in the art can be used. In embodiments, the cross-linking comprises photocrosslinking, an imidoester crosslinker, dimethyl suberimidate, an N-Hydroxysuccinimide-ester crosslinker, bissulfosuccinimidyl suberate (BS3), an aldehyde, acrolein, crotonaldehyde, formaldehyde, a carbodiimide crosslinker, N,N′-dicyclohexylcarbodiimide (DDC), N,N′-diisopropylcarbodiimide (DIC), 1-Ethyl-3-[3-dimethylaminopropyl]carbodiimide hydrochloride (EDC or EDAC), Succinimidyl-4-(N-maleimidomethyl)cyclohexane-1-carboxylate (SMCC), a Sulfosuccinimidyl-4-(N-maleimidomethyl)cyclohexane-1-carboxylate (Sulfo-SMCC), a Sulfo-N-hydroxysuccinimidyl-2-(6-[biotinamido]-2-(p-azido benzamido)-hexanoamido) ethyl-1,3′-dithioproprionate (Sulfo-SBED), 2-[N2-(4-Azido-2,3,5,6-tetrafluorobenzoyl)-N6-(6-biotin-amidocaproyl)-L-lysinyl]ethyl methanethiosulfonate (Mts-Atf-Biotin; available from Thermo Fisher Scientific Inc, Rockford Ill.), 2-{N2-[N6-(4-Azido-2,3,5,6-tetrafluorobenzoyl-6-amino-caproyl)-N6-(6-biotinamidocaproyl)-L-lysinylamido]}ethyl methanethiosultonate (Mts-Atf-LC-Biotin; available from Thermo Fisher Scientific Inc), a photoreactive amino acid (e.g., L-Photo-Leucine and L-Photo-Methionine, see, e.g., Suchanek, M., et al. (2005). Photo-leucine and photo-methionine allow identification of protein-protein interactions. Nat. Methods 2:261-267), an N-Hydroxysuccinimide (NHS) crosslinker, an NHS-Azide reagent (e.g., NHS-Azide, NHS-PEG4-Azide, NHS-PEG12-Azide; each available from Thermo Fisher Scientific, Inc.), an NHS-Phosphine reagent (e.g., NHS-Phosphine, Sulfo-NHS-Phosphine; each available from Thermo Fisher Scientific, Inc.), or any combination or modification thereof.

[0244] A variety of methods can be used to disrupt the cell or microvesicle. For example, the cellular or vesicular membrane can be disrupted using mechanical forces, chemical agents, or a combination thereof. In embodiments, disrupting the cell or microvesicle comprises use of one or more of a detergent, a surfactant, a solvent, an enzyme, or any useful combination thereof. The enzyme may comprise one or more of lysozyme, lysostaphin, zymolase, cellulase, mutanolysin, a glycanase, a protease, and mannase. The detergent or surfactant may comprise one or more of a octylthioglucoside (OTG), octyl beta-glucoside (OG), a nonionic detergent, Triton X, Tween 20, a fatty alcohol, a cetyl alcohol, a stearyl alcohol, cetostearyl alcohol, an oleyl alcohol, a polyoxyethylene glycol alkyl ether (Brij), octaethylene glycol monododecyl ether, pentaethylene glycol monododecyl ether, a polyoxypropylene glycol alkyl ether, a glucoside alkyl ether, decyl glucoside, lauryl glucoside, octyl glucoside, a polyoxyethylene glycol octylphenol ethers, a polyoxyethylene glycol alkylphenol ether, nonoxynol-9, a glycerol alkyl ester, glyceryl laurate, a polyoxyethylene glycol sorbitan alkyl esters, polysorbate, a sorbitan alkyl ester, cocamide MEA, cocamide DEA, dodecyldimethylamine oxide, a block copolymers of polyethylene glycol and polypropylene glycol, poloxamers, polyethoxylated tallow amine (POEA), a zwitterionic detergent, 3-[(3-cholamidopropyl)dimethylammonio]-1-propanesulfonate (CHAPS), a linear alkylbenzene sulfonate (LAS), a alkyl phenol ethoxylate (APE), cocamidopropyl hydroxysultaine, a betaine, cocamidopropyl betaine, lecithin, an ionic detergent, sodium dodecyl sulfate (SDS), cetrimonium bromide (CTAB), cetyl trimethylammonium chloride (CTAC), octenidine dihydrochloride, cetylpyridinium chloride (CPC), benzalkonium chloride (BAC), benzethonium chloride (BZT), 5-Bromo-5-nitro-1,3-dioxane, dimethyldioctadecylammonium chloride, dioctadecyldimethylammonium bromide (DODAB), sodium deoxycholate, nonyl phenoxypolyethoxylethanol (Tergitol-type NP-40; NP-40), ammonium lauryl sulfate, sodium laureth sulfate (sodium lauryl ether sulfate (SLES)), sodium myreth sulfate, an alkyl carboxylate, sodium stearate, sodium lauroyl sarcosinate, a carboxylate-based fluorosurfactant, perfluorononanoate, perfluorooctanoate (PFOA or PFO), and a biosurfactant. Mechanical methods of disruption that can be used comprise without limitation mechanical shear, bead milling, homogenation, microfluidization, sonication, French Press, impingement, a colloid mill, decompression, osmotic shock, thermolysis, freeze-thaw, desiccation, or any combination thereof.

[0245] As shown in FIG. 4, the binding agent may be tethered to a substrate. The binding agent can be tethered before or after the complex between the binding agent and target is formed. The substrate can be any useful substrate such as disclosed herein or known in the art. In an embodiment, the substrate comprises a microsphere. In another embodiment, the substrate comprises a planar substrate. In another embodiment, the substrate comprises column material. The binding agent can also be labeled. Isolating the complex between the target and the binding agent may comprise capturing the binding agent via the label. As a non-limiting example, the label can be a biotin label. In such cases, the binding agent can be attached to the substrate via a biotin-avidin/streptavidin binding event.

[0246] Methods of identifying the target after release from the binding agent will depend on the type of target of interest. For example, when the target comprises a protein, identifying the target may comprise use of mass spectrometry (MS), peptide mass fingerprinting (PMF; protein fingerprinting), sequencing, N-terminal amino acid analysis, C-terminal amino acid analysis, Edman degradation, chromatography, electrophoresis, two-dimensional gel electrophoresis (2D gel), antibody array, and immunoassay. Nucleic acids can be identified by amplification, hybridization or sequencing.

[0247] One of skill will appreciate that the method can be used to identify any appropriate target, including those not associated with a membrane. For example, with respect to the FIG. 4, all steps except for the step signified by arrow (i) (i.e., disrupting the cell or microvesicle 405), could be performed for a tissue lysate or a circulating target such as a protein, nucleic acid, lipid, carbohydrate, or combination thereof. The target can be any useful target, including without limitation a tissue, a cell, an organelle, a protein complex, a lipoprotein, a carbohydrate, a microvesicle, a virus, a membrane fragment, a small molecule, a heavy metal, a toxin, a drug, a nucleic acid, mRNA, microRNA, a protein-nucleic acid complex, and various combinations, fragments and/or complexes of any of these.

[0248] In an aspect, the invention provides a method of identifying at least one protein associated with at least one cell or microvesicle in a biological sample, comprising: a) contacting the at least one cell or microvesicle with an oligonucleotide probe library, b) isolating at least one protein bound by at least one member of the oligonucleotide probe library in step a); and c) identifying the at least one protein isolated in step b). The isolating can be performed using any useful method such as disclosed herein, e.g., by immunopreciption or capture to a substrate. Similarly, the identifying can be performed using any useful method such as disclosed herein, including without limitation use of mass spectrometry, 2-D gel electrophoresis or an antibody array.

[0249] The targets identified by the methods of the invention can be detected, e.g., using the oligonucleotide probes of the invention, for various purposes as desired. For example, an identified surface antigen can be used to detect a cell or microvesicle displaying such antigen. In an aspect, the invention provides a method of detecting at least one cell or microvesicle in a biological sample comprising contacting the biological sample with at least one binding agent to at least one surface antigen and detecting the at least one cell or microvesicle recognized by the binding agent to the at least one protein. In an embodiment, the at least one surface antigen is selected from Tables 3-4 herein. The at least one surface antigen can be selected those disclosed in International Patent Application Nos. PCT/US2009/62880, filed Oct. 30, 2009; PCT/US2009/006095, filed Nov. 12, 2009; PCT/US2011/26750, filed Mar. 1, 2011; PCT/US2011/031479, filed Apr. 6, 2011; PCT/US11/48327, filed Aug. 18, 2011; PCT/US2008/71235, filed Jul. 25, 2008; PCT/US10/58461, filed Nov. 30, 2010; PCT/US2011/21160, filed Jan. 13, 2011; PCT/US2013/030302, filed Mar. 11, 2013; PCT/US12/25741, filed Feb. 17, 2012; PCT/2008/76109, filed Sep. 12, 2008; PCT/US12/42519, filed Jun. 14, 2012; PCT/US12/50030, filed Aug. 8, 2012; PCT/US12/49615, filed Aug. 3, 2012; PCT/US12/41387, filed Jun. 7, 2012; PCT/US2013/072019, filed Nov. 26, 2013; PCT/US2014/039858, filed May 28, 2013; PCT/IB2013/003092, filed Oct. 23, 2013; PCT/US 13/76611, filed Dec. 19, 2013; PCT/US 14/53306, filed Aug. 28, 2014; and PCT/US 15/62184, filed Nov. 23, 2015; PCT/US 16/40157, filed Jun. 29, 2016; PCT/US 16/44595, filed Jul. 28, 2016; PCT/US16/21632, filed Mar. 9, 2016; and PCT/US17/23108, filed Mar. 18, 2017; each of which applications is incorporated herein by reference in its entirety. The at least one surface antigen can be a protein in any of Tables 10-17 herein. See Example 6. The at least one binding agent may comprise any useful binding agent, including without limitation a nucleic acid, DNA molecule, RNA molecule, antibody, antibody fragment, aptamer, peptoid, zDNA, peptide nucleic acid (PNA), locked nucleic acid (LNA), lectin, peptide, dendrimer, membrane protein labeling agent, chemical compound, or a combination thereof. In some embodiments, the at least one binding agent comprises at least one oligonucleotide, such as an oligonucleotide probe as provided herein. The cell can be part of a tissue.

[0250] The at least one binding agent can be used to capture and/or detect the at least one cell or microvesicle, which can be a circulating cell or microvesicle, including without limitation a microvesicle shed into bodily fluids. Methods of detecting soluble biomarkers and circulating cells or microvesicles using binding agents are provided herein. See, e.g., FIGS. 1A-B, which figures describe sandwich assay formats. In some embodiments, the at least one binding agent used to capture the at least one cell or microvesicle is bound to a substrate. Any useful substrate can be used, including without limitation a planar array, a column matrix, or a microbead. See, e.g., FIGS. 1A-B. In some embodiments, the at least one binding agent used to detect the at least one cell or microvesicle is labeled. Various useful labels are provided herein or known in the art, including without limitation a magnetic label, a fluorescent moiety, an enzyme, a chemiluminescent probe, a metal particle, a non-metal colloidal particle, a polymeric dye particle, a pigment molecule, a pigment particle, an electrochemically active species, a semiconductor nanocrystal, a nanoparticle, a quantum dot, a gold particle, a fluorophore, or a radioactive label.

[0251] In an embodiment, the detecting is used to characterize a phenotype. The phenotype can be any appropriate phenotype of interest. In some embodiments, the phenotype is a disease or disorder. The characterizing may comprise providing diagnostic, prognostic and/or theranostic information for the disease or disorder. The characterizing may be performed by comparing a presence or level of the at least one cell or microvesicle to a reference. The reference can be selected per the characterizing to be performed. For example, when the phenotype comprises a disease or disorder, the reference may comprise a presence or level of the at least one microvesicle in a sample from an individual or group of individuals without the disease or disorder. The comparing can be determining whether the presence or level of the cell or microvesicle differs from that of the reference. In some embodiments, the detected cell or microvesicle is found at higher levels in a healthy sample as compared to a diseased sample. In another embodiment, the detected cell or microvesicle is found at higher levels in a diseased sample as compared to a healthy sample. When multiplex assays are performed, e.g., using a plurality of binding agents to different biomarkers, some antigens may be observed at a higher level in the biological samples as compared to the reference whereas other antigens may be observed at a lower level in the biological samples as compared to the reference.

[0252] The method can be used to detect the at least one cell or microvesicle in any appropriate biological sample. For example, the biological sample may comprise a bodily fluid, tissue sample or cell culture. The bodily fluid or tissue sample can be from a subject having or suspected of having a medical condition, a disease or a disorder. Thus, the method can be used to provide a diagnostic, prognostic, or theranostic read out for the subject. Any appropriate bodily fluid can be used, including without limitation peripheral blood, sera, plasma, ascites, urine, cerebrospinal fluid (CSF), sputum, saliva, bone marrow, synovial fluid, aqueous humor, amniotic fluid, cerumen, breast milk, broncheoalveolar lavage fluid, semen, prostatic fluid, cowper's fluid or pre-ejaculatory fluid, female ejaculate, sweat, fecal matter, hair oil, tears, cyst fluid, pleural and peritoneal fluid, pericardial fluid, lymph, chyme, chyle, bile, interstitial fluid, menses, pus, sebum, vomit, vaginal secretions, mucosal secretion, stool water, pancreatic juice, lavage fluids from sinus cavities, bronchopulmonary aspirates, blastocyl cavity fluid, or umbilical cord blood.

[0253] The method of the invention can be used to detect or characterize any appropriate disease or disorder of interest, including without limitation Breast Cancer, Alzheimer's disease, bronchial asthma, Transitional cell carcinoma of the bladder, Giant cellular osteoblastoclastoma, Brain Tumor, Colorectal adenocarcinoma, Chronic obstructive pulmonary disease (COPD), Squamous cell carcinoma of the cervix, acute myocardial infarction (AMI)/acute heart failure, Chron's Disease, diabetes mellitus type II, Esophageal carcinoma, Squamous cell carcinoma of the larynx, Acute and chronic leukemia of the bone marrow, Lung carcinoma, Malignant lymphoma, Multiple Sclerosis, Ovarian carcinoma, Parkinson disease, Prostate adenocarcinoma, psoriasis, Rheumatoid Arthritis, Renal cell carcinoma, Squamous cell carcinoma of skin, Adenocarcinoma of the stomach, carcinoma of the thyroid gland, Testicular cancer, ulcerative colitis, or Uterine adenocarcinoma.

[0254] In some embodiments, the disease or disorder comprises a cancer, a premalignant condition, an inflammatory disease, an immune disease, an autoimmune disease or disorder, a cardiovascular disease or disorder, neurological disease or disorder, infectious disease or pain. The cancer can include without limitation one of acute lymphoblastic leukemia; acute myeloid leukemia; adrenocortical carcinoma; AIDS-related cancers; AIDS-related lymphoma; anal cancer; appendix cancer; astrocytomas; atypical teratoid/rhabdoid tumor; basal cell carcinoma; bladder cancer; brain stem glioma; brain tumor (including brain stem glioma, central nervous system atypical teratoid/rhabdoid tumor, central nervous system embryonal tumors, astrocytomas, craniopharyngioma, ependymoblastoma, ependymoma, medulloblastoma, medulloepithelioma, pineal parenchymal tumors of intermediate differentiation, supratentorial primitive neuroectodermal tumors and pineoblastoma); breast cancer; bronchial tumors; Burkitt lymphoma; cancer of unknown primary site; carcinoid tumor; carcinoma of unknown primary site; central nervous system atypical teratoid/rhabdoid tumor; central nervous system embryonal tumors; cervical cancer; childhood cancers; chordoma; chronic lymphocytic leukemia; chronic myelogenous leukemia; chronic myeloproliferative disorders; colon cancer; colorectal cancer; craniopharyngioma; cutaneous T-cell lymphoma; endocrine pancreas islet cell tumors; endometrial cancer; ependymoblastoma; ependymoma; esophageal cancer; esthesioneuroblastoma; Ewing sarcoma; extracranial germ cell tumor; extragonadal germ cell tumor; extrahepatic bile duct cancer; gallbladder cancer; gastric (stomach) cancer; gastrointestinal carcinoid tumor; gastrointestinal stromal cell tumor; gastrointestinal stromal tumor (GIST); gestational trophoblastic tumor; glioma; hairy cell leukemia; head and neck cancer; heart cancer; Hodgkin lymphoma; hypopharyngeal cancer; intraocular melanoma; islet cell tumors; Kaposi sarcoma; kidney cancer; Langerhans cell histiocytosis; laryngeal cancer; lip cancer; liver cancer; lung cancer; malignant fibrous histiocytoma bone cancer; medulloblastoma; medulloepithelioma; melanoma; Merkel cell carcinoma; Merkel cell skin carcinoma; mesothelioma; metastatic squamous neck cancer with occult primary; mouth cancer; multiple endocrine neoplasia syndromes; multiple myeloma; multiple myeloma/plasma cell neoplasm; mycosis fungoides; myelodysplastic syndromes; myeloproliferative neoplasms; nasal cavity cancer; nasopharyngeal cancer; neuroblastoma; Non-Hodgkin lymphoma; nonmelanoma skin cancer; non-small cell lung cancer; oral cancer; oral cavity cancer; oropharyngeal cancer; osteosarcoma; other brain and spinal cord tumors; ovarian cancer; ovarian epithelial cancer; ovarian germ cell tumor; ovarian low malignant potential tumor; pancreatic cancer; papillomatosis; paranasal sinus cancer; parathyroid cancer; pelvic cancer; penile cancer; pharyngeal cancer; pineal parenchymal tumors of intermediate differentiation; pineoblastoma; pituitary tumor; plasma cell neoplasm/multiple myeloma; pleuropulmonary blastoma; primary central nervous system (CNS) lymphoma; primary hepatocellular liver cancer; prostate cancer; rectal cancer; renal cancer; renal cell (kidney) cancer; renal cell cancer; respiratory tract cancer; retinoblastoma; rhabdomyosarcoma; salivary gland cancer; Sezary syndrome; small cell lung cancer; small intestine cancer; soft tissue sarcoma; squamous cell carcinoma; squamous neck cancer; stomach (gastric) cancer; supratentorial primitive neuroectodermal tumors; T-cell lymphoma; testicular cancer; throat cancer; thymic carcinoma; thymoma; thyroid cancer; transitional cell cancer; transitional cell cancer of the renal pelvis and ureter; trophoblastic tumor; ureter cancer; urethral cancer; uterine cancer; uterine sarcoma; vaginal cancer; vulvar cancer; Waldenstrom macroglobulinemia; or Wilm's tumor. The premalignant condition can include without limitation Barrett's Esophagus. The autoimmune disease can include without limitation one of inflammatory bowel disease (IBD), Crohn's disease (CD), ulcerative colitis (UC), pelvic inflammation, vasculitis, psoriasis, diabetes, autoimmune hepatitis, multiple sclerosis, myasthenia gravis, Type I diabetes, rheumatoid arthritis, psoriasis, systemic lupus erythematosis (SLE), Hashimoto's Thyroiditis, Grave's disease, Ankylosing Spondylitis Sjogrens Disease, CREST syndrome, Scleroderma, Rheumatic Disease, organ rejection, Primary Sclerosing Cholangitis, or sepsis. The cardiovascular disease can include without limitation one of atherosclerosis, congestive heart failure, vulnerable plaque, stroke, ischemia, high blood pressure, stenosis, vessel occlusion or a thrombotic event. The neurological disease can include without limitation one of Multiple Sclerosis (MS), Parkinson's Disease (PD), Alzheimer's Disease (AD), schizophrenia, bipolar disorder, depression, autism, Prion Disease, Pick's disease, dementia, Huntington disease (HD), Down's syndrome, cerebrovascular disease, Rasmussen's encephalitis, viral meningitis, neurospsychiatric systemic lupus erythematosus (NPSLE), amyotrophic lateral sclerosis, Creutzfeldt-Jacob disease, Gerstmann-Straussler-Scheinker disease, transmissible spongiform encephalopathy, ischemic reperfusion damage (e.g. stroke), brain trauma, microbial infection, or chronic fatigue syndrome. The pain can include without limitation one of fibromyalgia, chronic neuropathic pain, or peripheral neuropathic pain. The infectious disease can include without limitation one of a bacterial infection, viral infection, yeast infection, Whipple's Disease, Prion Disease, cirrhosis, methicillin-resistant Staphylococcus aureus, HIV, HCV, hepatitis, syphilis, meningitis, malaria, tuberculosis, or influenza. One of skill will appreciate that oligonucleotide probes or plurality of oligonucleotides or methods of the invention can be used to assess any number of these or other related diseases and disorders.

[0255] In a related aspect, the invention provides a kit comprising a reagent for carrying out the methods herein. In still another related aspect, the invention provides for use of a reagent for carrying out the methods. The reagent may comprise at least one binding agent to the at least one protein. The binding agent may be an oligonucleotide probe as provided herein.

[0256] Sample Characterization

[0257] The oligonucleotide probe/aptamers of the invention can be used to characterize a biological sample. For example, an oligonucleotide probe or oligonucleotide probe library can be used to provide a biosignature for the sample. The biosignature can indicate a characteristic of the sample, such as a diagnosis, prognosis or theranosis of a disease or disorder associated with the sample. In some embodiments, the biosignature comprises a presence or level of one or more biomarker present in the sample. In some embodiments, biosignature comprises a presence or level of the oligonucleotide probe or members of the oligonucleotide probe library that associated with the sample (e.g., by forming a complex with the sample).

[0258] In an aspect, the invention provides an aptamer comprising a nucleic acid sequence that is at least about 50, 55, 60, 65, 70, 75, 80, 85, 90, 95, 96, 97, 98, 99 or 100 percent homologous to any one of SEQ ID NOs. 1-23022; or a functional variation or fragment of any preceding sequence. A functional variation or fragment includes a sequence comprising modifications that is still capable of binding a target molecule, wherein the modifications comprise without limitation at least one of a deletion, insertion, point mutation, truncation or chemical modification. In a related aspect, the invention provides a method of characterizing a disease or disorder, comprising: (a) contacting a biological test sample with one or more aptamer of the invention, e.g., any of those in this paragraph or modifications thereof; (b) detecting a presence or level of a complex between the one or more aptamer and the target bound by the one or more aptamer in the biological test sample formed in step (a); (c) contacting a biological control sample with the one or more aptamer; (d) detecting a presence or level of a complex between the one or more aptamer and the target bound by the one or more aptamer in the biological control sample formed in step (c); and (e) comparing the presence or level detected in steps (b) and (d), thereby characterizing the disease or disorder.

[0259] The biological test sample and biological control sample can each comprise a tissue sample, a cell culture, or a biological fluid. In some embodiments, the biological test sample and biological control sample comprise the same sample type, e.g., both the test and control samples are tissue samples or both are fluid samples. In other embodiments, different sample types may be used for the test and control samples. For example, the control sample may comprise an engineered or otherwise artificial sample. In some embodiments, the tissue samples comprise fixed samples.

[0260] The biological fluid may comprise a bodily fluid. The bodily fluid may include without limitation one or more of peripheral blood, sera, plasma, ascites, urine, cerebrospinal fluid (CSF), sputum, saliva, bone marrow, synovial fluid, aqueous humor, amniotic fluid, cerumen, breast milk, broncheoalveolar lavage fluid, semen, prostatic fluid, cowper's fluid or pre-ejaculatory fluid, female ejaculate, sweat, fecal matter, hair, tears, cyst fluid, pleural and peritoneal fluid, pericardial fluid, lymph, chyme, chyle, bile, interstitial fluid, menses, pus, sebum, vomit, vaginal secretions, mucosal secretion, stool water, pancreatic juice, lavage fluids from sinus cavities, bronchopulmonary aspirates, blastocyl cavity fluid, or umbilical cord blood. In some embodiments, the bodily fluid comprises blood, serum or plasma.

[0261] The biological fluid may comprise microvesicles. For example, the biological fluid can be a tissue, cell culture, or bodily fluid which comprises microvesicles released from cells in the sample. The microvesicles can be circulating microvesicles. The biological fluid may comprise cells. For example, the biological fluid can be a tissue, cell culture, or bodily fluid which comprises cells circulating in the sample.

[0262] The one or more aptamer can bind a target biomarker, e.g., a biomarker useful in characterizing the sample. The biomarker may comprise a polypeptide or fragment thereof, or other useful biomarker described herein or known in the art (lipid, carbohydrate, complex, nucleic acid, etc). In embodiments, the polypeptide or fragment thereof is soluble or membrane bound. Membrane bound polypeptides may comprise a cellular surface antigen or a microvesicle surface antigen. The biomarker can be a biomarker selected from Table 3 or Table 4. The biomarker can be selected from one of International Patent Application Nos. PCT/US2009/62880, filed Oct. 30, 2009; PCT/US2009/006095, filed Nov. 12, 2009; PCT/US2011/26750, filed Mar. 1, 2011; PCT/US2011/031479, filed Apr. 6, 2011; PCT/US11/48327, filed Aug. 18, 2011; PCT/US2008/71235, filed Jul. 25, 2008; PCT/US 10/58461, filed Nov. 30, 2010; PCT/US2011/21160, filed Jan. 13, 2011; PCT/US2013/030302, filed Mar. 11, 2013; PCT/US12/25741, filed Feb. 17, 2012; PCT/2008/76109, filed Sep. 12, 2008; PCT/US12/42519, filed Jun. 14, 2012; PCT/US12/50030, filed Aug. 8, 2012; PCT/US12/49615, filed Aug. 3, 2012; PCT/US12/41387, filed Jun. 7, 2012; PCT/US2013/072019, filed Nov. 26, 2013; PCT/US2014/039858, filed May 28, 2013; PCT/IB2013/003092, filed Oct. 23, 2013; PCT/US 13/76611, filed Dec. 19, 2013; PCT/US 14/53306, filed Aug. 28, 2014; and PCT/US 15/62184, filed Nov. 23, 2015; PCT/US 16/40157, filed Jun. 29, 2016; PCT/US 16/44595, filed Jul. 28, 2016; PCT/US16/21632, filed Mar. 9, 2016; and PCT/US17/23108, filed Mar. 18, 2017; each of which applications is incorporated herein by reference in its entirety.

[0263] The characterizing can comprises a diagnosis, prognosis or theranosis of the disease or disorder. Various diseases and disorders can be characterized using the compositions and methods of the invention, including without limitation a cancer, a premalignant condition, an inflammatory disease, an immune disease, an autoimmune disease or disorder, a cardiovascular disease or disorder, a neurological disease or disorder, an infectious disease, and/or pain. See, e.g., section herein “Phenotypes” for further details. In embodiments, the disease or disorder comprises a proliferative or neoplastic disease or disorder. For example, the disease or disorder can be a cancer. In some embodiments, the cancer comprises a breast cancer, ovarian cancer, prostate cancer, lung cancer, colorectal cancer, melanoma, pancreatic cancer, kidney cancer, or brain cancer.

[0264] FIG. 9A is a schematic 900 showing an assay configuration that can be used to detect and/or quantify a target of interest using one or more oligonucleotide probe of the invention. Capture aptamer 902 is attached to substrate 901. The substrate can be a planar substrate, well, microbead, or other useful substrate as disclosed herein or known in the art. Target of interest 903 is bound by capture aptamer 902. The target of interest can be any appropriate entity that can be detected when recognized by an aptamer or other binding agent. The target of interest may comprise a protein or polypeptide, a nucleic acid, including DNA, RNA, and various subspecies thereof, a lipid, a carbohydrate, a complex, e.g., a complex comprising protein, nucleic acids, lipids and/or carbohydrates. In some embodiments, the target of interest comprises a tissue, cell or microvesicle. The target of interest can be a cellular surface antigen or microvesicle surface antigen. The target of interest may be a biomarker, e.g., as disclosed herein or Table 4 of International Patent Application PCT/US2016/040157, filed Jun. 29, 2016, and published as WO2017004243 on Jan. 5, 2017; which application is incorporated herein in its entirety. The target of interest can be isolated from a sample using various techniques as described herein, e.g., chromatography, filtration, centrifugation, flow cytometry, affinity capture (e.g., to a planar surface, column or bead), and/or using microfluidics. Detection aptamer 904 is also bound to target of interest 903. Detection aptamer 904 carries label 905 which can be detected to identify target captured to substrate 901 via capture aptamer 902. The label can be a fluorescent, radiolabel, enzyme, or other detectable label as disclosed herein. Either capture aptamer 902 or detection aptamer 904 can be substituted with another binding agent, e.g., an antibody. For example, the target may be captured with an antibody and detected with an aptamer, or vice versa. When the target of interest comprises a complex, the capture and detection agents (aptamer, antibody, etc) can recognize the same or different targets. For example, when the target is a cell or microvesicle, the capture agent may recognize one surface antigen while the detection agent recognizes another surface antigen. Alternately, the capture and detection agents can recognize the same surface antigen.

[0265] The aptamers of the invention may be identified and/or used for various purposes in the form of DNA or RNA. Unless otherwise specified, one of skill in the art will appreciate that an aptamer may generally be synthesized in various forms of nucleic acid. The aptamers may also carry various chemical modifications and remain within the scope of the invention.

[0266] In some embodiments, an aptamer of the invention is modified to comprise at least one chemical modification. The modification may include without limitation a chemical substitution at a sugar position; a chemical substitution at a phosphate position; and a chemical substitution at a base position of the nucleic acid. In some embodiments, the modification is selected from the group consisting of: biotinylation, incorporation of a fluorescent label, incorporation of a modified nucleotide, a 2′-modified pyrimidine, 3′ capping, conjugation to an amine linker, conjugation to a high molecular weight, non-immunogenic compound, conjugation to a lipophilic compound, conjugation to a drug, conjugation to a cytotoxic moiety, and labeling with a radioisotope, or other modification as disclosed herein. The position of the modification can be varied as desired. For example, the biotinylation, fluorescent label, or cytotoxic moiety can be conjugated to the 5′ end of the aptamer. The biotinylation, fluorescent label, or cytotoxic moiety can also be conjugated to the 3′ end of the aptamer.

[0267] In some embodiments, the cytotoxic moiety is encapsulated in a nanoparticle. The nanoparticle can be selected from the group consisting of: liposomes, dendrimers, and comb polymers. In other embodiments, the cytotoxic moiety comprises a small molecule cytotoxic moiety. The small molecule cytotoxic moiety can include without limitation vinblastine hydrazide, calicheamicin, vinca alkaloid, a cryptophycin, a tubulysin, dolastatin-10, dolastatin-15, auristatin E, rhizoxin, epothilone B, epithilone D, taxoids, maytansinoids and any variants and derivatives thereof. In still other embodiments, the cytotoxic moiety comprises a protein toxin. For example, the protein toxin can be selected from the group consisting of diphtheria toxin, ricin, abrin, gelonin, and Pseudomonas exotoxin A. Non-immunogenic, high molecular weight compounds for use with the invention include polyalkylene glycols, e.g., polyethylene glycol. Appropriate radioisotopes include yttrium-90, indium-111, iodine-131, lutetium-177, copper-67, rhenium-186, rhenium-188, bismuth-212, bismuth-213, astatine-211, and actinium-225. The aptamer may be labeled with a gamma-emitting radioisotope.

[0268] In some embodiments of the invention, an active agent is conjugated to the aptamer. For example, the active agent may be a therapeutic agent or a diagnostic agent. The therapeutic agent may be selected from the group consisting of tyrosine kinase inhibitors, kinase inhibitors, biologically active agents, biological molecules, radionuclides, adriamycin, ansamycin antibiotics, asparaginase, bleomycin, busulphan, cisplatin, carboplatin, carmustine, capecotabine, chlorambucil, cytarabine, cyclophosphamide, camptothecin, dacarbazine, dactinomycin, daunorubicin, dexrazoxane, docetaxel, doxorubicin, etoposide, epothilones, floxuridine, fludarabine, fluorouracil, gemcitabine, hydroxyurea, idarubicin, ifosfamide, irinotecan, lomustine, mechlorethamine, mercaptopurine, melphalan, methotrexate, rapamycin (sirolimus), mitomycin, mitotane, mitoxantrone, nitrosurea, paclitaxel, pamidronate, pentostatin, plicamycin, procarbazine, rituximab, streptozocin, teniposide, thioguanine, thiotepa, taxanes, vinblastine, vincristine, vinorelbine, taxol, combretastatins, discodermolides, transplatinum, anti-vascular endothelial growth factor compounds (“anti-VEGFs”), anti-epidermal growth factor receptor compounds (“anti-EGFRs”), 5-fluorouracil and derivatives, radionuclides, polypeptide toxins, apoptosis inducers, therapy sensitizers, enzyme or active fragment thereof, and combinations thereof.

[0269] Oligonucleotide Pools to Characterize a Sample

[0270] The complexity and heterogeneity present in biology challenges the understanding of biological systems and disease. Diversity exists at various levels, e.g., within and between cells, tissues, individuals and disease states. See, e.g., FIG. 10A. FIG. 10B overviews various biological entities that can be assessed to characterize such samples. As shown in FIG. 10B, as one moves from assessing DNA, to RNA, to protein, and finally to protein complexes, the amount of diversity and complexity increases dramatically. The oligonucleotide probe library method of the invention can be used characterize complex biological sources, e.g., tissue samples, cells, circulating tumor cells, microvesicles, and complexes such as protein and proteolipid complexes.

[0271] Current methods to characterize biological samples may not adequately address such complexity and diversity. As shown in FIG. 10C, such current methods often have a trade off between measuring diversity and complexity. As an example, consider high throughput sequencing technology. Next generation approaches may query many 1000s of molecular targets in a single assay. However, such approaches only probe individual DNA and/or RNA molecules, and thus miss out on the great diversity of proteins and biological complexes. On the other hand, flow cytometry can probe biological complexes, but are limited to a small number of pre-defined ligands. For example, a single assay can probe a handful of differentially labeled antibodies to pre-defined targets.

[0272] The oligonucleotide probe libraries of the invention address the above challenges. The size of the starting library can be adjusted to measure as many different entities as there are library members. For example, the initial untrained oligonucleotide library has the potential to measure 10¹² or more biological features. A larger and/or different library can be constructed as desired. The technology is adapted to find differences between samples without assumptions about what “should be different.” For example, the probe library may distinguish based on individual proteins, protein modifications, protein complexes, lipids, nucleic acids, different folds or conformations, or whatever is there that distinguishes a sample of interest. Thus, the method provides an unbiased approach to identify differences in biological samples that can be used to identify different populations of interest.

[0273] In the context herein, the use of the oligonucleotide library probe to assess a sample may be referred to as Adaptive Dynamic Artificial Poly-ligand Targeting, or ADAPT™ (alternately referred to as Topological Oligonucleotide Profiling: TOP™). Although as noted the terms aptamer and oligonucleotides are typically used interchangeable herein, some differences between “classic” individual aptamers and ADAPT probes are as follows. Individual aptamers may comprise individual oligonucleotides selected to bind to a known specific target in an antibody-like “key-in-lock” binding mode. They may be evaluated individually based on specificity and binding affinity to the intended target. However, ADAPT probes may comprise a library of oligonucleotides intended to produce multi-probe signatures. The ADAPT probes comprise numerous potential binding modalities (electrostatic, hydrophobic, Watson-Crick, multi-oligo complexes, etc.). The ADAPT probe signatures have the potential to identify heterogeneous patient subpopulations. For example, a single ADAPT library can be assembled to differentiate multiple biological states. Unlike classic single aptamers, the binding targets may or may not be isolated or identified. It will be understood that screening methods that identify individual aptamers, e.g., SELEX, can also be used to enrich a naive library of oligonucleotides to identify a ADAPT probe library.

[0274] The general method of the invention is outlined in FIG. 10D. One input to the method comprises a randomized oligonucleotide library with the potential to measure 10¹² or more biological features. As outlined in the figure, the method identifies a desired number (e.g., ˜10⁵-10⁶) that are different between two input sample types. The randomized oligonucleotide library is contacted with a first and a second sample type, and oligonucleotides that bind to each sample are identified. The bound oligonucleotide populations are compared and oligonucleotides that specifically bind to one or the other biological input sample are retained for the oligonucleotide probe library, whereas oligonucleotides that bind both biological input samples are discarded. This trained oligonucleotide probe library can then be contacted with a new test sample and the identities of oligonucleotides that bind the test sample are determined. The test sample is characterized based on the profile of oligonucleotides that bound. See, e.g., FIG. 10H.

[0275] Extracellular vesicles provide an attractive vehicle to profile the biological complexity and diversity driven by many inter-related sources. There can be a great deal of heterogeneity between patient-to-patient microvesicle populations, or even in microvesicle populations from a single patient under different conditions (e.g., stress, diet, exercise, rest, disease, etc). Diversity of molecular phenotypes within microvesicle populations in various disease states, even after microvesicle isolation and sorting by vesicle biomarkers, can present challenges identifying surface binding ligands. This situation is further complicated by vesicle surface-membrane protein complexes. The oligonucleotide probe library can be used to address such challenges and allow for characterization of biological phenotypes. The approach combines the power of diverse oligonucleotide libraries and high throughput (next-generation) sequencing technologies to probe the complexity of extracellular microvesicles. See FIG. 10E.

[0276] ADAPT™ profiling may provide quantitative measurements of dynamic events in addition to detection of presence/absence of various biomarkers in a sample. For example, the binding probes may detect protein complexes or other post-translation modifications, allowing for differentiation of samples with the same proteins but in different biological configurations. Such configurations are illustrated in FIGS. 10F-G. In FIG. 10F, microvesicles with various surface markers are shown from an example microvesicle sample population: Sample Population A. The indicated Bound Probing Oligonucleotides 1001 are contacted to two surface markers 1002 and 1003 in a given special relationship. Here, probes unique to these functional complexes and spatial relationships may be retained. In contrast, in microvesicle Sample Population B shown in FIG. 10F, the two surface markers 1002 and 1003 are found in disparate spatial relationship. Here, probes 1001 are not bound due to absence of the spatial relationship of the interacting components 1002 and 1003. Such principles also apply to surface antigens of cells, viral particles, cell debris, and the like.

[0277] An illustrative approach 1010 for using ADAPT profiling to assess a sample is shown in FIG. 10H. The probing library 1011 is mixed with sample 1012. The sample can be as described herein, e.g., a bodily fluid from a subject having or suspected of having a disease. The probes are allowed to bind the sample 1020 and the microvesicles are pelleted 1015. The supernatant 1014 comprising unbound oligonucleotides is discarded. Oligonucleotide probes bound to the pellet 1015 are eluted 1016 and sequenced 1017. The profile 1018 generated by the bound oligonucleotide probes as determined by the sequencing 1017 is used to characterize the sample 1012. For example, the profile 1018 can be compared to a reference, e.g., to determine if the profile is similar or different from a reference profile indicative of a disease or healthy state, or other phenotypic characterization of interest. The comparison may indicate the presence of a disease, provide a diagnosis, prognosis or theranosis, or otherwise characterize a phenotype associated with the sample 1012. FIG. 10I illustrates another schematic for using ADAPT profiling to characterize a phenotype. A patient sample such as a bodily fluid disclosed herein is collected 1021. The sample is contacted with the ADAPT library pool 1022. Microvesicles (MVs) are isolated from the contacted sample 1023, e.g., using ultracentrifugation, filtration, polymer precipitation or other appropriate technique or combination of techniques disclosed herein. Oligonucleotides that bound the isolated microvesicles are collected and identity is determined 1024. The identity of the bound oligonucleotides can be determined by any useful technique such as sequencing, high throughput sequencing (e.g., NGS), amplification including without limitation qPCR, or hybridization such as to a planar or particle based array. The identity of the bound oligonucleotides is used to characterize the sample, e.g., as containing disease related microvesicles. Such principles also apply to analysis of cells, viral particles, cell debris, and the like.

[0278] The approaches outlined in FIG. 10 can be adapted to any desired sample type, e.g., tissues, cells, microvesicles, circulating biomarkers, viral particles, and constituents of any of these.

[0279] In an aspect, the invention provides a method of characterizing a sample by contacting the sample with a pool of different oligonucleotides (which can be referred to as an aptamer pool or oligonucleotide probe library), and determining the frequency at which various oligonucleotides in the pool bind the sample. For example, a pool of oligonucleotides is identified that preferentially bind to tissues, cells or microvesicles from cancer patients as compared to non-cancer patients. A test sample, e.g., from a patient suspected of having the cancer, is collected and contacted with the pool of oligonucleotides. Oligonucleotides that bind the test sample are eluted from the test sample, collected and identified, and the composition of the bound oligonucleotides is compared to those known to bind cancer samples. Various sequencing, amplification and hybridization techniques can be used to identify the eluted oligonucleotides. For example, when a large pool of oligonucleotides is used, oligonucleotide identification can be performed by high throughput methods such as next generation sequencing or via hybridization. If the test sample is bound by the oligonucleotide pool in a similar manner (e.g., as determined by bioinformatics classification methods) to the sample from cancer patients, then the test sample is indicative of cancer as well. Using this method, a pool of oligonucleotides that bind one or more antigen can be used to characterize the sample without necessarily knowing the precise target of each member of the pool of oligonucleotides. Thus, the pool of oligonucleotides provide a biosignature.

[0280] In an aspect, the invention provides a method for characterizing a condition for a test sample comprising: contacting a sample with a plurality of oligonucleotide capable of binding one or more target(s) present in the sample, identifying a set of oligonucleotides that form a complex with the sample wherein the set is predetermined to characterize a condition for the sample, thereby characterizing a condition for a sample. The sample can be any useful sample such as disclosed herein, e.g., a tissue, cell, microvesicle, or biomarker sample, or any useful combination thereof.

[0281] In an related aspect, the invention provides a method for identifying a set of oligonucleotides associated with a test sample, comprising: (a) contacting a sample with a plurality of oligonucleotides, isolating a set of oligonucleotides that form a complex with the sample, (b) determining sequence and/or copy number for each of the oligonucleotides, thereby identifying a set of oligonucleotides associated with the test sample. The sample can be any useful sample such as disclosed herein, e.g., a tissue, cell, microvesicle, or biomarker sample, or any useful combination thereof.

[0282] In still another related aspect, the invention provides a method of diagnosing a sample as cancerous or predisposed to be cancerous, comprising contacting the sample with a plurality of oligonucleotides that are predetermined to preferentially form a complex with a cancer sample as compared to a non-cancer sample. The sample can be any useful sample such as disclosed herein, e.g., a tissue, cell, microvesicle, or biomarker sample, or any useful combination thereof.

[0283] The oligonucleotides can be identified by sequencing, e.g., by dye termination (Sanger) sequencing or high throughput methods. High throughput methods can comprise techiques to rapidly sequence a large number of nucleic acids, including next generation techniques such as Massively parallel signature sequencing (MPSS; Polony sequencing; 454 pyrosequencing; Illumina (Solexa; MiSeq/HiSeq/NextSeq/etc) sequencing; SOLiD sequencing; Ion Torrent semiconductor sequencing; DNA nanoball sequencing; Heliscope single molecule sequencing; Single molecule real time (SMRT) sequencing, or other methods such as Nanopore DNA sequencing; Tunnelling currents DNA sequencing; Sequencing by hybridization; Sequencing with mass spectrometry; Microfluidic Sanger sequencing; Microscopy-based techniques; RNAP sequencing; In vitro virus high-throughput sequencing. The oligonucleotides may also be identified by hybridization techniques. For example, a microarray having addressable locals to hybridize and thereby detect the various members of the pool can be used. Alternately, detection can be based on one or more differentially labelled oligonucleotides that hybridize with various members of the oligonucleotide pool. The detectable signal of the label can be associated with a nucleic acid molecule that hybridizes with a stretch of nucleic acids present in various oligonucleotides. The stretch can be the same or different as to one or more oligonucleotides in a library. The detectable signal can comprise fluorescence agents, including color-coded barcodes which are known, such as in U.S. Patent Application Pub. No. 20140371088, 2013017837, and 20120258870. Other detectable labels (metals, radioisotopes, etc) can be used as desired.

[0284] The plurality or pool of oligonucleotides can comprise any desired number of oligonucleotides to allow characterization of the sample. In various embodiments, the pool comprises at least 2, 3, 4, 5, 6, 7, 8, 9, 10, 11, 12, 13, 14, 15, 16, 17, 18, 19, 20, 25, 30, 40, 50, 60, 70, 80, 90, 100, 150, 200, 250, 300, 350, 400, 450, 500, 600, 700, 800, 900, 1000, 2000, 3000, 4000, 5000, 6000, 7000, 8000, 9000, or at least 10000 different oligonucleotide members.

[0285] The plurality of oligonucleotides can be pre-selected through one or more steps of positive or negative selection, wherein positive selection comprises selection of oligonucleotides against a sample having substantially similar characteristics compared to the test sample, and wherein negative selection comprises selection of oligonucleotides against a sample having substantially different characteristics compared to the test sample. Substantially similar characteristics mean that the samples used for positive selection are representative of the test sample in one or more characteristic of interest. For example, the samples used for positive selection can be from cancer patients or cell lines and the test sample can be a sample from a patient having or suspected to have a cancer. Substantially different characteristics mean that the samples used for negative selection differ from the test sample in one or more phenotype/characteristic of interest. For example, the samples used for negative selection can be from individuals or cell lines that do not have cancer (e.g., “normal,” “healthy” or otherwise “control” samples) and the test sample can be a sample from a patient having or suspected to have a cancer. The cancer can be a breast cancer, ovarian cancer, prostate cancer, lung cancer, colorectal cancer, melanoma, brain cancer, pancreatic cancer, kidney cancer, or other cancer such as disclosed herein.

[0286] By selecting samples representative of the desired phenotypes to detect and/or distinguish, the characterizing can comprise a diagnosis, prognosis or theranosis for any number of diseases or disorders. Various diseases and disorders can be characterized using the compositions and methods of the invention, including without limitation a cancer, a premalignant condition, an inflammatory disease, an immune disease, an autoimmune disease or disorder, a cardiovascular disease or disorder, a neurological disease or disorder, an infectious disease, and/or pain. See, e.g., section herein “Phenotypes” for further details. In embodiments, the disease or disorder comprises a proliferative or neoplastic disease or disorder. For example, the disease or disorder can be a cancer.

[0287] FIG. 9B is a schematic 910 showing use of an oligonucleotide pool to characterize a phenotype of a sample, such as those listed above. A pool of oligonucleotides to a target of interest is provided 911. For example, the pool of oligonucleotides can be enriched to target a tissue, cell, microvesicle biomarker, or any combination thereof. The members of the pool may bind different targets (e.g., different proteins) or different epitopes of the same target (e.g., different epitopes of a single protein). The pool is contacted with a test sample to be characterized 912. For example, the test sample may be a biological sample from an individual having or suspected of having a given disease or disorder. The mixture is washed to remove unbound oligonucleotides. The remaining oligonucleotides are eluted or otherwise disassociated from the sample and collected 913. The collected oligonucleotides are identified, e.g., by sequencing or hybridization 914. The presence and/or copy number of the identified is used to characterize the phenotype 915.

[0288] FIG. 9C is a schematic 920 showing an implementation of the method in FIG. 9B. A pool of oligonucleotides identified as binding a microvesicle population is provided 919. The input sample comprises a test sample comprising microvesicles 922. For example, the test sample may be a biological sample from an individual having or suspected of having a given disease or disorder. The pool is contacted with the isolated microvesicles to be characterized 923. The microvesicle population can be isolated before or after the contacting 923 from the sample using various techniques as described herein, e.g., chromatography, filtration, ultrafiltration, centrifugation, ultracentrifugation, flow cytometry, affinity capture (e.g., to a planar surface, column or bead), polymer precipitation, and/or using microfluidics. The mixture is washed to remove unbound oligonucleotides and the remaining oligonucleotides are eluted or otherwise disassociated from the sample and collected 924. The collected oligonucleotides are identified 925 and the presence and/or copy number of the retained oligonucleotides is used to characterize the phenotype 926 as above.

[0289] As noted, in embodiment of FIG. 9C, the pool of oligonucleotides 919 is directly contacted with a biological sample that comprises or is expected to comprise microvesicles. Microvesicles are thereafter isolated from the sample and the mixture is washed to remove unbound oligonucleotides and the remaining oligonucleotides are disassociated and collected 924. The following steps are performed as above. As an example of this alternate configuration, a biological sample, e.g., a blood, serum or plasma sample, is directly contacted with the pool of oligonucleotides. Microvesicles are then isolated by various techniques disclosed herein, including without limitation ultracentrifugation, ultrafiltration, flow cytometry, affinity isolation, polymer precipitation, chromatography, various combinations thereof, or the like. Remaining oligonucleotides are then identified, e.g., by sequencing, hybridization or amplification.

[0290] In other embodiments, an enriched library of oligonucleotide probes is used to assess a tissue sample. In some embodiments, the pool is used to stain the sample in a manner similar to IHC. Such method may be referred to herein as PHC, or polyligand histochemistry. FIG. 9D provides an outline 930 of such method. An aptamer pool is provided that has been enriched against a tissue of interest 931. The pool is contacted with a tissue sample 932. The tissue sample can be in a format such as described herein. As a non-limiting example, the tissue sample can be a fixed tumor sample. The sample may be a FFPE sample fixed to a glass slide or membrane. The sample is washed to remove unbound members of the aptamer pool and the remaining aptamers are visualized 933. Any appropriate method to visualize the aptamers can be used. In an example, the aptamer pool is biotinylated and the bound aptamer are visualized using streptavidin-horse radish peroxidase (SA-HRP). As described herein, other useful visualization methods are known in the art, including alternate labeling. The visualized sample is scored to determine the amount of staining 934. For example a pathologist can score the slide as in IHC. The score can be used to characterize the sample 935 as described herein. For example, a score of +1 or higher may indicate that the sample is a cancer sample, or is a cancer sample expressing a given biomarker. See, e.g., Examples 19-31 of International Patent Application PCT/US 17/23108, filed Mar. 18, 2017; which application is incorporated herein in its entirety.

[0291] In a related aspect, the invention provides a composition of matter comprising a plurality of oligonucleotides that can be used to carry out the methods comprising use of an oligonucleotide pool to characterize a phenotype. The plurality of oligonucleotides can comprise any of those described herein.

[0292] In an aspect, the invention provides a method for identifying oligonucleotides specific for a test sample. The method comprises: (a) enriching a plurality of oligonucleotides for a sample to provide a set of oligonucleotides predetermined to form a complex with a target sample; (b) contacting the plurality in (a) with a test sample to allow formation of complexes of oligonucleotides with test sample; (c) recovering oligonucleotides that formed complexes in (b) to provide a recovered subset of oligonucleotides; and (d) profiling the recovered subset of oligonucleotides by high-throughput sequencing, amplification or hybridization, thereby identifying oligonucleotides specific for a test sample. The test sample may comprise tissue, cells, microvesicles, biomarkers, or other biological entities of interest. The oligonucleotides may comprise RNA, DNA or both. In some embodiment, the method further comprises performing informatics analysis to identify a subset of oligonucleotides comprising sequence identity of at least 50%, 55%, 60%, 65%, 70%, 75%, 80%, 85%, 90%, 91%, 92%, 93%, 94%, 95%, 96%, 97%, 98%, or at least 99% to the oligonucleotides predetermined to form a complex with the target sample.

[0293] One of skill will appreciate that the method can be used to identify any appropriate target. The target can be any useful target, including without limitation a cell, an organelle, a protein complex, a lipoprotein, a carbohydrate, a microvesicle, a virus, a membrane fragment, a small molecule, a heavy metal, a toxin, a drug, a nucleic acid (including without limitation microRNA (miR) and messenger RNA (mRNA)), a protein-nucleic acid complex, and various combinations, fragments and/or complexes of any of these. The target can, e.g., comprise a mixture of such biological entities.

[0294] In an aspect, the invention also provides a method comprising contacting an oligonucleotide or plurality of oligonucleotides with a sample and detecting the presence or level of binding of the oligonucleotide or plurality of oligonucleotides to a target in the sample, wherein the oligonucleotide or plurality of oligonucleotides can be those provided by the invention above. The sample may comprise a biological sample, an organic sample, an inorganic sample, a tissue, a cell culture, a bodily fluid, blood, serum, a cell, a microvesicle, a protein complex, a lipid complex, a carbohydrate, or any combination, fraction or variation thereof. The target may comprise a cell, an organelle, a protein complex, a lipoprotein, a carbohydrate, a microvesicle, a membrane fragment, a small molecule, a heavy metal, a toxin, or a drug.

[0295] In another aspect, the invention provides a method comprising: a) contacting a sample with an oligonucleotide probe library comprising at least 10⁶, 10⁷, 10⁸, 10⁹, 10¹⁰, 10¹¹, 10¹², 10¹³, 10¹⁴, 10¹⁵, 10¹⁶, 10¹⁷, or at least 10¹⁸ different oligonucleotide sequences oligonucleotides to form a mixture in solution, wherein the oligonucleotides are capable of binding a plurality of entities in the sample to form complexes, wherein optionally the oligonucleotide probe library comprises an oligonucleotide or plurality of oligonucleotides as provided by the invention above; b) partitioning the complexes formed in step (a) from the mixture; and c) recovering oligonucleotides present in the complexes partitioned in step (b) to identify an oligonucleotide profile for the sample.

[0296] In still another aspect, the invention provides a method for generating an enriched oligonucleotide probe library comprising: a) contacting a first oligonucleotide library with a biological test sample and a biological control sample, wherein complexes are formed between biological entities present in the biological samples and a plurality of oligonucleotides present in the first oligonucleotide library; b) partitioning the complexes formed in step (a) and isolating the oligonucleotides in the complexes to produce a subset of oligonucleotides for each of the biological test sample and biological control sample; c) contacting the subsets of oligonucleotides in (b) with the biological test sample and biological control sample wherein complexes are formed between biological entities present in the biological samples and a second plurality of oligonucleotides present in the subsets of oligonucleotides to generate a second subset group of oligonucleotides; and d) optionally repeating steps b)-c), one, two, three or more times to produce a respective third, fourth, fifth or more subset group of oligonucleotides, thereby producing the enriched oligonucleotide probe library. In a related aspect, the invention provides a plurality of oligonucleotides comprising at least 2, 3, 4, 5, 6, 7, 8, 9, 10, 11, 12, 13, 14, 15, 16, 17, 18, 19, 20, 25, 30, 40, 45, 50, 55, 60, 65, 70, 75, 80, 85, 90, 95, 100, 125, 150, 175, 200, 300, 400, 500, 600, 700, 800, 900, 1000, 2000, 3000, 4000, 5000, 6000, 7000, 8000, 9000, 10000, 20000, 30000, 40000, 50000, 60000, 70000, 80000, 90000, 100000, 200000, 300000, 400000, or 500000 different oligonucleotide sequences, wherein the plurality results from the method in this paragraph, wherein the library is capable of distinguishing a first phenotype from a second phenotype. In some embodiments, the first phenotype comprises a disease or disorder and the second phenotype comprises a healthy state; or wherein the first phenotype comprises a disease or disorder and the second phenotype comprises a different disease or disorder; or wherein the first phenotype comprises a stage or progression of a disease or disorder and the second phenotype comprises a different stage or progression of the same disease or disorder; or wherein the first phenotype comprises a positive response to a therapy and the second phenotype comprises a negative response to the same therapy.

[0297] In yet another aspect, the invention provides a method of characterizing a disease or disorder, comprising: a) contacting a biological test sample with the oligonucleotide or plurality of oligonucleotides provided by the invention; b) detecting a presence or level of complexes formed in step (a) between the oligonucleotide or plurality of oligonucleotides provided by the invention and a target in the biological test sample; and c) comparing the presence or level detected in step (b) to a reference level from a biological control sample, thereby characterizing the disease or disorder. The step of detecting may comprise performing sequencing of all or some of the oligonucleotides in the complexes, amplification of all or some of the oligonucleotides in the complexes, and/or hybridization of all or some of the oligonucleotides in the complexes to an array. The sequencing may be high-throughput or next generation sequencing. In some embodiments, the step of detecting comprises visualizing the oligonucleotide or plurality of oligonucleotides in association with the biological test sample. For example, polyligand histochemistry (PHC) as provided by the invention may be used.

[0298] In the methods of the invention, the biological test sample and biological control sample may each comprise a tissue sample, a cell culture, or a biological fluid. In some embodiments, the biological fluid comprises a bodily fluid. Useful bodily fluids within the method of the invention comprise peripheral blood, sera, plasma, ascites, urine, cerebrospinal fluid (CSF), sputum, saliva, bone marrow, synovial fluid, aqueous humor, amniotic fluid, cerumen, breast milk, broncheoalveolar lavage fluid, semen, prostatic fluid, cowper's fluid or pre-ejaculatory fluid, female ejaculate, sweat, fecal matter, hair, tears, cyst fluid, pleural and peritoneal fluid, pericardial fluid, lymph, chyme, chyle, bile, interstitial fluid, menses, pus, sebum, vomit, vaginal secretions, mucosal secretion, stool water, pancreatic juice, lavage fluids from sinus cavities, bronchopulmonary aspirates, blastocyl cavity fluid, or umbilical cord blood. In some preferred embodiments, the bodily fluid comprises blood, serum or plasma. The biological fluid may comprise microvesicles. In such case, the complexes may be formed between the oligonucleotide or plurality of oligonucleotides and at least one of the microvesicles.

[0299] The biological test sample and biological control sample may further comprise isolated microvesicles, wherein optionally the microvesicles are isolated using at least one of chromatography, filtration, ultrafiltration, centrifugation, ultracentrifugation, flow cytometry, affinity capture (e.g., to a planar surface, column or bead), polymer precipitation, and using microfluidics. The vesicles can also be isolated after contact with the oligonucleotide or plurality of oligonucleotides.

[0300] The biological test sample and biological control sample may comprise tissue. The tissue can be formalin fixed paraffin embedded (FFPE) tissue. In some embodiments, the FFPE tissue comprises at least one of a fixed tissue, unstained slide, bone marrow core or clot, biopsy sample, surgical sample, core needle biopsy, malignant fluid, and fine needle aspirate (FNA). The FFPE tissue can be fixed on a substrate, e.g., a glass slide or membrane.

[0301] In various embodiments of the methods of the invention, the oligonucleotide or plurality of oligonucleotides binds a polypeptide or fragment thereof. The polypeptide or fragment thereof can be soluble or membrane bound, wherein optionally the membrane comprises a cellular or microvesicle membrane. The membrane could also be from a fragment of a cell, organelle or microvesicle. In some embodiments, the polypeptide or fragment thereof comprises a biomarker in Table 3, Table 4 or any one of Tables 10-17. For example, the polypeptide or fragment thereof could be a general vesicle marker such as in Table 3 or a tissue-related or disease-related marker such as in Table 4, or a vesicle associated biomarker provided in any one of Tables 10-17. The oligonucleotide or plurality of oligonucleotides may bind a surface antigen in the biological sample. For example, the oligonucleotide or plurality of oligonucleotides can be enriched from a naïve library against microvesicles or cells and be directed to surface antigens thereof.

[0302] The disease or disorder detected by the oligonucleotide, plurality of oligonucleotides, or methods provided here may comprise any appropriate disease or disorder of interest, including without limitation a cancer, a premalignant condition, an inflammatory disease, an immune disease, an autoimmune disease or disorder, a cardiovascular disease or disorder, neurological disease or disorder, infectious disease or pain. See Section “Phenotypes” herein. One of skill will appreciate that the oligonucleotide or plurality of oligonucleotides or methods of the invention can be used to assess any number of these or other related diseases and disorders.

[0303] In some embodiments of the invention, the oligonucleotide or plurality of oligonucleotides and methods of use thereof are useful for characterizing certain diseases or disease states. As desired, a pool of oligonucleotides useful for characterizing various diseases is assembled to create a master pool that can be used to probe useful for characterizing the various diseases. One of skill will also appreciate that pools of oligonucleotides useful for characterizing specific diseases or disorders can be created as well. The sequences provided herein can also be modified as desired so long as the functional aspects are still maintained (e.g., binding to various targets or ability to characterize a phenotype). For example, the oligonucleotides may comprise DNA or RNA, incorporate various non-natural nucleotides, incorporate other chemical modifications, or comprise various deletions or insertions. Such modifications may facilitate synthesis, stability, delivery, labeling, etc, or may have little to no effect in practice. In some cases, some nucleotides in an oligonucleotide may be substituted while maintaining functional aspects of the oligonucleotide. Similarly, 5′ and 3′ flanking regions may be substituted. In still other cases, only a portion of an oligonucleotide may be determined to direct its functionality such that other portions can be deleted or substituted. Numerous techniques to synthesize and modify nucleotides and polynucleotides are disclosed herein or are known in the art.

[0304] In an aspect, the invention provides a kit comprising a reagent for carrying out the methods of the invention provided herein. In a similar aspect, the invention contemplates use of a reagent for carrying out the methods of the invention provided herein. In embodiments, the reagent comprises an oligonucleotide or plurality of oligonucleotides. The oligonucleotide or plurality of oligonucleotides can be those provided herein. The reagent may comprise various other useful components including without limitation microRNA (miR) and messenger RNA (mRNA)), a protein-nucleic acid complex, and various combinations, fragments and/or complexes of any of these. The one or more reagent can be one or more of: a) a reagent configured to isolate a microvesicle, optionally wherein the at least one reagent configured to isolate a microvesicle comprises a binding agent to a microvesicle antigen, a column, a substrate, a filtration unit, a polymer, polyethylene glycol, PEG4000, PEG8000, a particle or a bead; b) at least one oligonucleotide configured to act as a primer or probe in order to amplify, sequence, hybridize or detect the oligonucleotide or plurality of oligonucleotides; c) a reagent configured to remove one or more abundant protein from a sample, wherein optionally the one or more abundant protein comprises at least one of albumin, immunoglobulin, fibrinogen and fibrin; d) a reagent for epitope retrieval; and e) a reagent for PHC visualization.

[0305] Detecting Watson-Crick Base Pairing with an Oligonucleotide Probe

[0306] The oligonucleotide probes provided by the invention can bind via non-Watson Crick base pairing. However, in some cases, the oligonucleotide probes provided by the invention can bind via Watson Crick base pairing. The oligonucleotide probe libraries of the invention, e.g., as described above, can query both types of binding events simultaneously. For example, some oligonucleotide probes may bind protein antigens in the classical aptamer sense, whereas other oligonucleotide probes may bind tissues, cells, microvesicles or other targets via nucleic acids associated with such targets, e.g., nucleic acid (including without limitation microRNA and mRNA) on the surface of the targets. Such surface bound nucleic acids can be associated with proteins. For example, they may comprise Argonaute-microRNA complexes. The argonaute protein can be Ago 1, Ago2, Ago3 and/or Ago4.

[0307] In addition to the oligonucleotide probe library approach described herein which relies on determining a sequence of the oligonucleotides (e.g., via sequencing, hybridization or amplification), assays can also be designed to detect Watson Crick base pairing. In some embodiments, these approaches rely on Ago2-mediated cleavage wherein an Ago2-microRNA complex can be used to detected using oligonucleotide probes. For further details, see PCT/US 15/62184, filed Nov. 23, 2015, which application is incorporated by reference herein in its entirety.

[0308] Tissue ADAPT

[0309] The invention provides methods of enriching oligonucleotide libraries against various biological samples, including tissue samples. Tissue samples may be fixed. Fixation may be used in the preparation of histological sections by which biological tissues are preserved from decay, thereby preventing autolysis or putrefaction. The principal macromolecules inside a cell are proteins and nucleic acids. Fixation terminates any ongoing biochemical reactions, and may also increase the mechanical strength or stability of the treated tissues. Thus, tissue fixation can be used to preserve cells and tissue components and to do this in such a way as to allow for the preparation of thin, stained sections. Such samples are available for many biological specimens, e.g., tumor samples. Thus, fixed tissues provide a desirable sample source for various applications of the oligonucleotide probe libraries of the invention. This process may be referred to as “tissue ADAPT.” See e.g., International Patent Application PCT/US 17/23108, filed Mar. 18, 2017; which application is incorporated herein in its entirety.

[0310] Tissue ADAPT has been used to provide various oligonucleotide probes. As described herein, many useful modifications can be made to nucleic acid molecules. In an embodiment, the oligonucleotide or the plurality of oligonucleotides of the invention comprise a DNA, RNA, 2′-O-methyl or phosphorothioate backbone, or any combination thereof. In some embodiments, the oligonucleotide or the plurality of oligonucleotides comprises at least one of DNA, RNA, PNA, LNA, UNA, and any combination thereof. The oligonucleotide or at least one member of the plurality of oligonucleotides can have at least one functional modification selected from the group consisting of DNA, RNA, biotinylation, a non-naturally occurring nucleotide, a deletion, an insertion, an addition, and a chemical modification. In some embodiments, the chemical modification comprises at least one of C18, polyethylene glycol (PEG), PEG4, PEG6, PEG8, PEG12 and digoxygenin. The oligonucleotide or plurality of oligonucleotides can be labeled using any useful label such as described herein. For example, the oligonucleotide or plurality of oligonucleotides can be attached to a nanoparticle, liposome, gold, magnetic label, fluorescent label, light emitting particle, biotin moiety, or radioactive label.

[0311] Tissue ADAPT provides for the enrichment of oligonucleotide libraries against samples of interest. In an aspect, the invention provides a method of enriching an oligonucleotide library using multiple rounds of positive and negative selection. The method of enriching a plurality of oligonucleotides may comprise: a) performing at least one round of positive selection, wherein the positive selection comprises: i) contacting at least one sample with the plurality of oligonucleotides, wherein the at least one sample comprises tissue; and ii) recovering members of the plurality of oligonucleotides that associated with the at least one sample; b) optionally performing at least one round of negative selection, wherein the negative selection comprises: i) contacting at least one additional sample with the plurality of oligonucleotides, wherein at least one additional sample comprises tissue; ii) recovering members of the plurality of oligonucleotides that did not associate with the at least one additional sample; and c) amplifying the members of the plurality of oligonucleotides recovered in at least one or step (a)(ii) and step (b)(ii), thereby enriching the oligonucleotide library. Various alternatives of these processes are useful and described herein, such as varying the rounds of enrichment, and varying performance or positive and negative selection steps. In an embodiments, the recovered members of the plurality of oligonucleotides in step (a)(ii) are used as the input for the next iteration of step (a)(i). In an embodiment, the recovered members of the plurality of oligonucleotides in step (b)(ii) are used as the input for the next iteration of step (a)(i). The unenriched oligonucleotide library may possess great diversity. For example, the unenriched oligonucleotide library may comprise at least 2, 3, 4, 5, 6, 7, 8, 9, 10, 11, 12, 13, 14, 15, 16, 17, 18, 19, 20, 25, 30, 40, 45, 50, 55, 60, 65, 70, 75, 80, 85, 90, 95, 100, 125, 150, 175, 200, 300, 400, 500, 600, 700, 800, 900, 1000, 2000, 3000, 4000, 5000, 6000, 7000, 8000, 9000, 10000, 20000, 30000, 40000, 50000, 60000, 70000, 80000, 90000, 100000, 200000, 300000, 400000, 500000, 10⁶, 10⁷, 10⁸, 10⁹, 10¹⁰, 10¹¹, 10¹², 10¹³, 10¹⁴, 10¹⁵, 10¹⁶, 10¹⁷, or at least 10¹⁸ different oligonucleotide sequences. In an embodiment, the unenriched oligonucleotide library comprises the naïve F-Trin library as described herein.

[0312] In embodiments of the enrichment methods of the invention, the at least one sample and/or at least one additional sample comprise tissue. As desired, such tissue may be fixed using methods described herein or known in the art. The fixed tissue may be archived. The fixed tissue may comprise formalin fixed paraffin embedded (FFPE) tissue. In embodiment, the FFPE tissue comprises at least one of a fixed tissue, unstained slide, bone marrow core or clot, biopsy sample, surgical sample, core needle biopsy, malignant fluid, and fine needle aspirate (FNA). The FFPE tissue can be fixed on a substrate. For example, the substrate can be a glass slide, membrane, or any other useful material.

[0313] In some embodiment, the at least one sample and/or the at least one additional sample are fixed on different substrates. As a non-limiting example, the at least one sample is fixed on one glass slide whereas the at least one additional sample is fixed on a different glass slide. As desired, such slides may be from different patients, different tumors, a same tumor at different time points, multiple slices of the same tumor, etc. Alternately, the at least one sample and/or the at least one additional sample is fixed on a single substrate. As a non-limiting example, the at least one sample and at least one additional sample are fixed on a same glass slide, such as a tumor sample and normal adjacent tissue to the tumor. In some embodiments, the at least one sample and/or the at least one additional sample are lysed (, scraped from a substrate, or subjected to microdissection. Lysed samples can be arrayed on a substrate. The invention contemplates any useful substrate. In some embodiments, the substrate comprises a membrane. For example, the membrane can be a nitrocellulose membrane.

[0314] In various embodiments of the enrichment methods of the invention, the at least one sample and the at least one additional sample differ in a phenotype of interest. The at least one sample and the at least one additional sample can be from different sections of a same substrate. As a non-limiting example, the samples may comprise cancer tissue and normal adjacent tissue from a fixed tissue sample. In such cases, the at least one sample and the at least one additional sample may be scraped or microdissected from the same substrate to facilitate enrichment.

[0315] The oligonucleotide library can be enriched for analysis of any desired phenotype. In embodiments, the phenotype comprises a tissue, anatomical origin, medical condition, disease, disorder, or any combination thereof. For example, the tissue can be muscle, epithelial, connective and nervous tissue, or any combination thereof. For example, the anatomical origin can be the stomach, liver, small intestine, large intestine, rectum, anus, lungs, nose, bronchi, kidneys, urinary bladder, urethra, pituitary gland, pineal gland, adrenal gland, thyroid, pancreas, parathyroid, prostate, heart, blood vessels, lymph node, bone marrow, thymus, spleen, skin, tongue, nose, eyes, ears, teeth, uterus, vagina, testis, penis, ovaries, breast, mammary glands, brain, spinal cord, nerve, bone, ligament, tendon, or any combination thereof. As described further below, the phenotype can be related to at least one of diagnosis, prognosis, theranosis, medical condition, disease or disorder.

[0316] In various embodiments of the enrichment methods of the invention, the method further comprises determining a target of the enriched members of the oligonucleotide library. Techniques for such determining are provided herein. See, e.g., Example 6.

[0317] Tissue ADAPT further comprises analysis of biological samples. In an aspect, the invention provides a method of characterizing a phenotype in a sample comprising: a) contacting the sample with at least one oligonucleotide or plurality of oligonucleotides; and b) identifying a presence or level of a complex formed between the at least one oligonucleotide or plurality of oligonucleotides and the sample, wherein the presence or level is used to characterize the phenotype. In a related aspect, the invention provides a method of visualizing a sample comprising: a) contacting the sample with at least one oligonucleotide or plurality of oligonucleotides; b) removing the at least one oligonucleotide or members of the plurality of oligonucleotides that do not bind the sample; and c) visualizing the at least one oligonucleotide or plurality of oligonucleotides that bound to the sample. The visualization can be used to characterize a phenotype.

[0318] The sample to be characterized can be any useful sample, including without limitation a tissue sample, bodily fluid, cell, cell culture, microvesicle, or any combination thereof. In some embodiments, the tissue sample comprises fixed tissue. The tissue may be fixed using any useful technique for fixation known in the art. Examples of fixation methods include heat fixation, immersion, perfusion, chemical fixation, cross-linked (for example, with an aldehyde such as formaldehyde or glutaraldehyde), precipitation (e.g., using an alcohol such as methanol, ethanol and acetone, and acetic acid), oxidation (e.g., using osmium tetroxide, potassium dichromate, chromic acid, and potassium permanganate), mercurials, picrates, Bouin solution, hepes-glutamic acid buffer-mediated organic solvent protection effect (HOPE), and freezing. In preferred embodiments, the fixed tissue is formalin fixed paraffin embedded (FFPE) tissue. In various embodiments, the FFPE sample comprises at least one of a fixed tissue, unstained slide, bone marrow core or clot, biopsy sample, surgical sample, core needle biopsy, malignant fluid, and fine needle aspirate (FNA).

[0319] Any useful technique for identifying a presence or level can be used for applications of tissue ADAPT, including without limitation nucleic acid sequencing, amplification, hybridization, gel electrophoresis, chromatography, or visualization. In some embodiments, the hybridization comprises contacting the sample with at least one labeled probe that is configured to hybridize with at least one oligonucleotide or plurality of oligonucleotides. The at least one labeled probe can be directly or indirectly attached to a label. The label can be, e.g., a fluorescent, radioactive or magnetic label. An indirect label can be, e.g., biotin or digoxigenin. In some embodiments, the sequencing comprises next generation sequencing, dye termination sequencing, and/or pyrosequencing of the at least one oligonucleotide or plurality of oligonucleotides. The visualization may be that of a signal linked directly or indirectly to the at least one oligonucleotide or plurality of oligonucleotides. The signal can be any useful signal, e.g., a fluorescent signal or an enzymatic signal. In some embodiments, the enzymatic signal is produced by at least one of a luciferase, firefly luciferase, bacterial luciferase, luciferin, malate dehydrogenase, urease, peroxidase, horseradish peroxidase (HRP), alkaline phosphatase (AP), β-galactosidase, glucoamylase, lysozyme, a saccharide oxidase, glucose oxidase, galactose oxidase, glucose-6-phosphate dehydrogenase, a heterocyclic oxidase, uricase, xanthine oxidase, lactoperoxidase, and microperoxidase. Visualization may comprise use of light microscopy or fluorescent microscopy. Various examples of visualization using polyligand histochemistry (PHC) are provided in International Patent Application PCT/US 17/23108, filed Mar. 18, 2017; which application is incorporated herein in its entirety.

[0320] In the methods of the invention directed to characterizing or visualizing a sample, the target of at least one of the at least one oligonucleotide or plurality of oligonucleotides may be known. For example, an oligonucleotide may bind a known protein target. In some embodiments, the target of at least one the at least one oligonucleotide or plurality of oligonucleotides is unknown. For example, the at least one oligonucleotide or plurality of oligonucleotides may themselves provide a biosignature or other useful result that does not necessarily require knowledge of the antigens bound by some or all of the oligonucleotides. In some embodiments, the targets of a portion of the oligonucleotides are known whereas the targets of another portion of the oligonucleotides have not been identified.

[0321] In the methods of the invention, including enriching an oligonucleotide library, characterizing a sample or visualizing a sample, the phenotype can be a biomarker status. In some embodiments, the biomarker status comprises at least one of HER2 positive, HER2 negative, EGFR positive, EGFR negative, TUBB3 positive, or TUBB3 negative. See, e.g., International Patent Application PCT/US 17/23108, filed Mar. 18, 2017; which application is incorporated herein in its entirety. In some embodiments, the biomarker status comprises expression, copy number, mutation, insertion, deletion or other alteration of at least one of ALK, AR, ER, ERCC1, Her2/Neu, MGMT, MLH1, MSH2, MSH6, PD-1, PD-L1, PD-L1 (22c3), PMS2, PR, PTEN, RRM1, TLE3, TOP2A, TOPO1, TrkA, TrkB, TrkC, TS, and TUBB3. In various embodiments, the biomarker status comprises the presence or absence of at least one of EGFR vIII or MET Exon 14 Skipping. In embodiments, the biomarker status comprises expression, copy number, fusion, mutation, insertion, deletion or other alteration of at least one of ALK, BRAF, NTRK1, NTRK2, NTRK3, RET, ROS1, and RSPO3. In embodiments, the biomarker status comprises expression, copy number, fusion, mutation, insertion, deletion or other alteration of at least one of ABL2, ACSL3, ACSL6, AFF1, AFF3, AFF4, AKAP9, AKT2, AKT3, ALDH2, ALK, APC, ARFRP1, ARHGAP26, ARHGEF12, ARIDIA, ARID2, ARNT, ASPSCR1, ASXL1, ATF1, ATIC, ATM, ATP1A1, ATR, AURKA, AURKB, AXIN1, AXL, BAP1, BARD1, BCL10, BCL11A, BCL2L11, BCL3, BCL6, BCL7A, BCL9, BCR, BIRC3, BLM, BMPR1A, BRAF, BRCA1, BRCA2, BRIP1, BUB1B, C11orf30 (EMSY), C2orf44, CACNA1D, CALR, CAMTA1, CANT1, CARD11, CARS, CASC5, CASP8, CBFA2T3, CBFB, CBL, CBLB, CCDC6, CCNB1IP1, CCND1, CCND2, CCND3, CCNE1, CD274 (PDL1), CD74, CD79A, CDC73, CDH11, CDK4, CDK6, CDK8, CDKN1B, CDKN2A, CDX2, CHEK1, CHEK2, CHIC2, CHN1, CIC, CIITA, CLP1, CLTC, CLTCL1, CNBP, CNTRL, COPB1, CREB1, CREB3L1, CREB3L2, CREBBP, CRKL, CRTC1, CRTC3, CSF1R, CSF3R, CTCF, CTLA4, CTNNA1, CTNNB1, CYLD, CYP2D6, DAXX, DDR2, DDX10, DDX5, DDX6, DEK, DICER1, DOT1L, EBF1, ECT2L, EGFR, ELK4, ELL, EML4, EP300, EPHA3, EPHA5, EPHB 1, EPS 15, ERBB2 (HER2), ERBB3 (HER3), ERBB4 (HER4), ERC1, ERCC2, ERCC3, ERCC4, ERCC5, ERG, ESR1, ETV1, ETV5, ETV6, EWSR1, EXT1, EXT2, EZH2, EZR, FANCA, FANCC, FANCD2, FANCE, FANCG, FANCL, FAS, FBXO11, FBXW7, FCRL4, FGF10, FGF14, FGF19, FGF23, FGF3, FGF4, FGF6, FGFR1, FGFRIOP, FGFR2, FGFR3, FGFR4, FH, FHIT, FIP1L1, FLCN, FLI1, FLT1, FLT3, FLT4, FNBP1, FOXA1, FOXO1, FOXP1, FUBP1, FUS, GAS7, GATA3, GID4 (C17orf39), GMPS, GNA13, GNAQ, GNAS, GOLGA5, GOPC, GPHN, GPR124, GRIN2A, GSK3B, H3F3A, H3F3B, HERPUD1, HGF, HIP1, HMGA1, HMGA2, HNRNPA2B1, HOOK3, HSP90AA1, HSP90AB1, IDH1, IDH2, IGF1R, IKZF1, IL2, IL21R, IL6ST, IL7R, IRF4, ITK, JAK1, JAK2, JAK3, JAZF1, KDM5A, KDR (VEGFR2), KEAP1, KIAA1549, KIF5B, KIT, KLHL6, KMT2A (MLL), KMT2C (MLL3), KMT2D (MLL2), KRAS, KTN1, LCK, LCP1, LGR5, LHFP, LIFR, LPP, LRIG3, LRP1B, LYL1, MAF, MALT1, MAML2, MAP2K1, MAP2K2, MAP2K4, MAP3K1, MCL1, MDM2, MDM4, MDS2, MEF2B, MEN1, MET (cMET), MITF, MLF1, MLH1 (NGS), MLLT1, MLLT10, MLLT3, MLLT4, MLLT6, MNX1, MRE11A, MSH2 (NGS), MSH6 (NGS), MSI2, MTOR, MYB, MYC, MYCN, MYD88, MYH11, MYH9, NACA, NCKIPSD, NCOA1, NCOA2, NCOA4, NF1, NF2, NFE2L2, NFIB, NFKB2, NFKBIA, NIN, NOTCH2, NPM1, NR4A3, NSD1, NT5C2, NTRK1, NTRK2, NTRK3, NUP214, NUP93, NUP98, NUTM1, PALB2, PAX3, PAX5, PAX7, PBRM1, PBX1, PCM1, PCSK7, PDCD1 (PD1), PDCD1LG2 (PDL2), PDGFB, PDGFRA, PDGFRB, PDK1, PER1, PICALM, PIK3CA, PIK3R1, PIK3R2, PIM1, PML, PMS2 (NGS), POLE, POT1, POU2AF1, PPARG, PRCC, PRDM1, PRDM16, PRKARIA, PRRX1, PSIP1, PTCH1, PTEN (NGS), PTPN11, PTPRC, RABEP1, RAC1, RAD50, RAD51, RAD51B, RAF1, RALGDS, RANBP17, RAPIGDS1, RARA, RB1, RBM15, REL, RET, RICTOR, RMI2, RNF43, ROS1, RPL22, RPL5, RPN1, RPTOR, RUNX1, RUNX1T1, SBDS, SDC4, SDHAF2, SDHB, SDHC, SDHD, SEPT9, SET, SETBP1, SETD2, SF3B1, SH2B3, SH3GL1, SLC34A2, SMAD2, SMAD4, SMARCB1, SMARCE1, SMO, SNX29, SOX10, SPECC1, SPEN, SRGAP3, SRSF2, SRSF3, SS18, SS18L1, STAT3, STAT4, STAT5B, STIL, STK11, SUFU, SUZ12, SYK, TAF15, TCF12, TCF3, TCF7L2, TET1, TET2, TFEB, TFG, TFRC, TGFBR2, TLX1, TNFAIP3, TNFRSF14, TNFRSF17, TOP1, TP53, TPM3, TPM4, TPR, TRAF7, TRIM26, TRIM27, TRIM33, TRIP11, TRRAP, TSC1, TSC2, TSHR, TTL, U2AF1, USP6, VEGFA, VEGFB, VTI1A, WHSC1, WHSC1L1, WIF1, WISP3, WRN, WT1, WWTR1, XPA, XPC, XPO1, YWHAE, ZMYM2, ZNF217, ZNF331, ZNF384, ZNF521, and ZNF703. The biomarker status may comprise expression, copy number, fusion, mutation, insertion, deletion or other alteration of at least one of ABI1, ABL1, ACKR3, AKT1, AMER1 (FAM123B), AR, ARAF, ATP2B3, ATRX, BCL11B, BCL2, BCL2L2, BCOR, BCORL1, BRD3, BRD4, BTG1, BTK, C15orf65, CBLC, CD79B, CDH1, CDK12, CDKN2B, CDKN2C, CEBPA, CHCHD7, CNOT3, COL1A1, COX6C, CRLF2, DDB2, DDIT3, DNM2, DNMT3A, EIF4A2, ELF4, ELN, ERCC1 (NGS), ETV4, FAM46C, FANCF, FEV, FOXL2, FOXO3, FOXO4, FSTL3, GATA1, GATA2, GNA11, GPC3, HEY 1, HIST1H3B, HIST1H4I, HLF, HMGN2P46, HNF1A, HOXA11, HOXA13, HOXA9, HOXC11, HOXC13, HOXD11, HOXD13, HRAS, IKBKE, INHBA, IRS2, JUN, KAT6A (MYST3), KAT6B, KCNJ5, KDM5C, KDM6A, KDSR, KLF4, KLK2, LASP1, LMO1, LMO2, MAFB, MAX, MECOM, MED 12, MKL1, MLLT11, MN1, MPL, MSN, MTCP1, MUC1, MUTYH, MYCL (MYCL1), NBN, NDRG1, NKX2-1, NONO, NOTCH1, NRAS, NUMA1, NUTM2B, OLIG2, OMD, P2RY8, PAFAH1B2, PAK3, PATZ1, PAX8, PDE4DIP, PHF6, PHOX2B, PIK3CG, PLAG1, PMS1, POU5F1, PPP2R1A, PRF1, PRKDC, RAD21, RECQL4, RHOH, RNF213, RPL10, SEPT5, SEPT6, SFPQ, SLC45A3, SMARCA4, SOCS1, SOX2, SPOP, SRC, SSX1, STAG2, TAL1, TAL2, TBL1XR1, TCEA1, TCL1A, TERT, TFE3, TFPT, THRAP3, TLX3, TMPRSS2, UBR5, VHL, WAS, ZBTB 16, and ZRSR2. The biomarker status can be for a biomarker in any one of PCT/US2007/69286, filed May 18, 2007; PCT/US2009/60630, filed Oct. 14, 2009; PCT/2010/000407, filed Feb. 11, 2010; PCT/US12/41393, filed Jun. 7, 2012; PCT/US2013/073184, filed Dec. 4, 2013; PCT/US2010/54366, filed Oct. 27, 2010; PCT/US 11/67527, filed Dec. 28, 2011; PCT/US15/13618, filed Jan. 29, 2015; and PCT/US16/20657, filed Mar. 3, 2016; each of which applications is incorporated herein by reference in its entirety. Examples of additional biomarkers that can be incorporated into the methods and compositions of the invention include without limitation those disclosed in International Patent Application Nos. PCT/US2009/62880, filed Oct. 30, 2009; PCT/US2009/006095, filed Nov. 12, 2009; PCT/US2011/26750, filed Mar. 1, 2011; PCT/US2011/031479, filed Apr. 6, 2011; PCT/US 11/48327, filed Aug. 18, 2011; PCT/US2008/71235, filed Jul. 25, 2008; PCT/US10/58461, filed Nov. 30, 2010; PCT/US2011/21160, filed Jan. 13, 2011; PCT/US2013/030302, filed Mar. 11, 2013; PCT/US12/25741, filed Feb. 17, 2012; PCT/2008/76109, filed Sep. 12, 2008; PCT/US12/42519, filed Jun. 14, 2012; PCT/US12/50030, filed Aug. 8, 2012; PCT/US12/49615, filed Aug. 3, 2012; PCT/US 12/41387, filed Jun. 7, 2012; PCT/US2013/072019, filed Nov. 26, 2013; PCT/US2014/039858, filed May 28, 2013; PCT/IB2013/003092, filed Oct. 23, 2013; PCT/US13/76611, filed Dec. 19, 2013; PCT/US14/53306, filed Aug. 28, 2014; and PCT/US15/62184, filed Nov. 23, 2015; PCT/US16/40157, filed Jun. 29, 2016; PCT/US16/44595, filed Jul. 28, 2016; and PCT/US16/21632, filed Mar. 9, 2016; each of which applications is incorporated herein by reference in its entirety. The methods of the invention can be used to enrich oligonucleotide libraries and analyze samples given any desired biomarker status for which appropriate samples are available.

[0322] In the methods of the invention, including enriching an oligonucleotide library, characterizing a sample or visualizing a sample, the phenotype can be a phenotype comprises a disease or disorder. The methods can be employed to assist in providing a diagnosis, prognosis and/or theranosis for the disease or disorder. For example, the enriching may be performed using sample such that the enriched library can be used to assist in providing a diagnosis, prognosis and/or theranosis for the disease or disorder. Similarly, the characterizing may comprise assisting in providing a diagnosis, prognosis and/or theranosis for the disease or disorder. The visualization may also comprise assisting in providing a diagnosis, prognosis and/or theranosis for the disease or disorder. In some embodiments, the theranosis comprises predicting a treatment efficacy or lack thereof, classifying a patient as a responder or non-responder to treatment, or monitoring a treatment efficacy. The theranosis can be directed to any appropriate treatment, e.g., the treatment may comprise at least one of chemotherapy, immunotherapy, targeted cancer therapy, a monoclonal antibody, an anti-HER2 antibody, trastuzumab, an anti-VEGF antibody, bevacizumab, and/or platinum/taxane therapy. In some embodiments, the treatment comprises at least one of afatinib, afatinib +cetuximab, alectinib, aspirin, atezolizumab, bicalutamide, cabozantinib, capecitabine, carboplatin, ceritinib, cetuximab, cisplatin, crizotinib, dabrafenib, dacarbazine, doxorubicin, enzalutamide, epirubicin, erlotinib, everolimus, exemestane+everolimus, fluorouracil, fulvestrant, gefitinib, gemcitabine, hormone therapies, irinotecan, lapatinib, liposomal-doxorubicin, matinib, mitomycin-c, nab-paclitaxel, nivolumab, olaparib, osimertinib, oxaliplatin, palbociclib combination therapy, paclitaxel, palbociclib, panitumumab, pembrolizumab, pemetrexed, pertuzumab, sunitinib, T-DM 1, temozolomide docetaxel, temsirolimus, topotecan, trametinib, trastuzumab, vandetanib, and vemurafenib. The hormone therapy can be one or more of tamoxifen, toremifene, fulvestrant, letrozole, anastrozole, exemestane, megestrol acetate, leuprolide, goserelin, bicalutamide, flutamide, abiraterone, enzalutamide, triptorelin, abarelix, and degarelix.

[0323] The theranosis can be for a therapy in any one of PCT/US2007/69286, filed May 18, 2007; PCT/US2009/60630, filed Oct. 14, 2009; PCT/2010/000407, filed Feb. 11, 2010; PCT/US12/41393, filed Jun. 7, 2012; PCT/US2013/073184, filed Dec. 4, 2013; PCT/US2010/54366, filed Oct. 27, 2010; PCT/US11/67527, filed Dec. 28, 2011; PCT/US15/13618, filed Jan. 29, 2015; and PCT/US16/20657, filed Mar. 3, 2016; each of which applications is incorporated herein by reference in its entirety. The likelihood of benefit or lack of benefit of these therapies for treating various cancers can be related to a biomarker status. For example, anti-HER2 treatments may be of most benefit for patients whose tumors express HER2, and vice versa. Using appropriate samples for enrichment (e.g., known responders or non-responders), tissue ADAPT may be used to provide improved theranosis as compared to conventional companion diagnostics.

[0324] In the methods of the invention directed to characterizing a sample, the characterizing may comprise comparing the presence or level to a reference. In some embodiments, the reference comprises a presence or level determined in a sample from an individual without a disease or disorder, or from an individual with a different state of a disease or disorder. The presence or level can be that of a visual level, such as an IHC score, determined by the visualizing. As a non-limiting example, the comparison to the reference of at least one oligonucleotide or plurality of oligonucleotides provided by the invention indicates that the sample comprises a cancer sample or a non-cancer/normal sample.

[0325] In some embodiments of the methods of the invention, one or more sample comprises a bodily fluid. The bodily fluid can be any useful bodily fluid, including without limitation peripheral blood, sera, plasma, ascites, urine, cerebrospinal fluid (CSF), sputum, saliva, bone marrow, synovial fluid, aqueous humor, amniotic fluid, cerumen, breast milk, broncheoalveolar lavage fluid, semen, prostatic fluid, cowper's fluid or pre-ejaculatory fluid, female ejaculate, sweat, fecal matter, hair oil, tears, cyst fluid, pleural and peritoneal fluid, pericardial fluid, lymph, chyme, chyle, bile, interstitial fluid, menses, pus, sebum, vomit, vaginal secretions, mucosal secretion, stool water, pancreatic juice, lavage fluids from sinus cavities, bronchopulmonary aspirates, blastocyl cavity fluid, or umbilical cord blood.

[0326] In the methods of the invention, including characterizing a sample or visualizing a sample, the sample can be from a subject suspected of having or being predisposed to a medical condition, disease, or disorder.

[0327] In the methods of the invention, including enriching an oligonucleotide library, characterizing a sample or visualizing a sample, the medical condition, the disease or disorder may be a cancer, a premalignant condition, an inflammatory disease, an immune disease, an autoimmune disease or disorder, a cardiovascular disease or disorder, neurological disease or disorder, infectious disease or pain. See Section “Phenotypes” herein. In some embodiments, the infectious disease comprises a bacterial infection, viral infection, yeast infection, Whipple's Disease, Prion Disease, cirrhosis, methicillin-resistant Staphylococcus aureus, HIV, HCV, hepatitis, syphilis, meningitis, malaria, tuberculosis, influenza.

[0328] In an aspect, the invention provides a kit comprising at least one reagent for carrying out the methods provided by the invention, including enriching an oligonucleotide library, characterizing a sample or visualizing a sample. In a related aspect, the invention provides use of at least one reagent for carrying out the methods provided by the invention, including enriching an oligonucleotide library, characterizing a sample or visualizing a sample. In some embodiments, the at least one reagent comprises an oligonucleotide or a plurality of oligonucleotides provided herein. Additional useful reagents are also provided herein. See, e.g., the protocols provided in the Examples.

[0329] The at least one oligonucleotide or plurality of oligonucleotides provided by tissue ADAPT can be used for various purposes. As described above, such oligonucleotides can be used to characterize and/or visualize a sample. As the oligonucleotides are selected to associate with tissues of interest, such associations can also be used for other purposes. In an aspect, the invention provides a method of imaging at least one cell or tissue, comprising contacting the at least one cell or tissue with at least one oligonucleotide or plurality of oligonucleotides provided herein, and detecting the at least one oligonucleotide or the plurality of oligonucleotides in contact with at least one cell or tissue. In a non-limiting example, such method can be used for medical imaging of a tumor or tissue in a patient.

[0330] In the imaging methods provided by the invention, the at least one oligonucleotide or the plurality of oligonucleotides can carry various useful chemical structures or modifications such as described herein. Such modifications can be made to enhance binding, stability, allow detection, or for other useful purposes. In the imaging methods provided by the invention, the at least one oligonucleotide or the plurality of oligonucleotides can be administered to a subject prior to the detecting. Such method may allow imaging of at least one cell or tissue in the subject. In some embodiments, the at least one cell or tissue comprises neoplastic, malignant, tumor, hyperplastic, or dysplastic cells. In some embodiments, the at least one cell or tissue comprises at least one of lymphoma, leukemia, renal carcinoma, sarcoma, hemangiopericytoma, melanoma, abdominal cancer, gastric cancer, colon cancer, cervical cancer, prostate cancer, pancreatic cancer, breast cancer, or non-small cell lung cancer cells. The at least one cell or tissue can be from any desired tissue or related to desired any medicial condition, disease or disorder such as described herein.

[0331] As the oligonucleotides provided by tissue ADAPT are selected to associate with tissues of interest, such associations can also be used in therapeutic applications such as targeted drug delivery. The oligonucleotides may provide therapeutic benefit alone or by providing targeted delivery of immunomodulators, drugs and the like. In an aspect, the invention provides a pharmaceutical composition comprising a therapeutically effective amount of a construct comprising the at least one oligonucleotide or the plurality of oligonucleotides as provided herein, or a salt thereof, and a pharmaceutically acceptable carrier, diluent, or both.

[0332] The at least one oligonucleotide or the plurality of oligonucleotides within the pharmaceutical composition can have any useful desired chemical modification. In an embodiment, the at least one oligonucleotide or the plurality of oligonucleotides is attached to a toxin or chemotherapeutic agent. The at least one oligonucleotide or the plurality of oligonucleotides may be comprised within a multipartite construct. The at least one oligonucleotide or the plurality of oligonucleotides can be attached to a liposome or nanoparticle. In some embodiments, the liposome or nanoparticle comprises a toxin or chemotherapeutic agent. In such cases, the at least one oligonucleotide or the plurality of oligonucleotides can be used to target a therapeutic agent to a desired cell, tissue, organ or the like.

[0333] In a related aspect, the invention provides a method of treating or ameliorating a disease or disorder in a subject in need thereof, comprising administering the pharmaceutical composition of the invention to the subject. In another related aspect, the invention provides a method of inducing cytotoxicity in a subject, comprising administering the pharmaceutical composition of the invention to the subject. Any useful means of administering can be used, including without limitation at least one of intradermal, intramuscular, intraperitoneal, intravenous, subcutaneous, intranasal, epidural, oral, sublingual, intracerebral, intravaginal, transdermal, rectal, by inhalation, topical administration, or any combination thereof.

[0334] The oligonucleotide or plurality of oligonucleotides provided by tissue ADAPT can be used for imaging or therapeutic applications of any desired medical condition, disease or disorder, such as those described herein (see above). As a non-limiting example, the oligonucleotide or plurality of oligonucleotides can be used for imaging of tumors from various anatomical locals, or for treatment of cancers derived from various tissues.

### Therapeutics

[0335] As used herein “therapeutically effective amount” refers to an amount of a composition that relieves (to some extent, as judged by a skilled medical practitioner) one or more symptoms of a medical condition such as a disease or disorder in a subject. Additionally, by “therapeutically effective amount” of a composition is meant an amount that returns to normal, either partially or completely, physiological or biochemical parameters associated with or causative of a disease or condition. A clinician skilled in the art can determine the therapeutically effective amount of a composition in order to treat or prevent a particular disease condition, or disorder when it is administered, such as intravenously, subcutaneously, intraperitoneally, orally, or through inhalation. The precise amount of the composition required to be therapeutically effective will depend upon numerous factors, e.g., such as the specific activity of the active agent, the delivery device employed, physical characteristics of the agent, purpose for the administration, in addition to many patient specific considerations. But a determination of a therapeutically effective amount is within the skill of an ordinarily skilled clinician upon the appreciation of the disclosure set forth herein.

[0336] The terms “treating,” “treatment,” “therapy,” and “therapeutic treatment” as used herein refer to curative therapy, prophylactic therapy, or preventative therapy. An example of “preventative therapy” is the prevention or lessening the chance of a targeted disease (e.g., cancer or other proliferative disease) or related condition thereto. Those in need of treatment include those already with the disease or condition as well as those prone to have the disease or condition to be prevented. The terms “treating,” “treatment,” “therapy,” and “therapeutic treatment” as used herein also describe the management and care of a mammal for the purpose of combating a disease, or related condition, and includes the administration of a composition to alleviate the symptoms, side effects, or other complications of the disease, condition. Therapeutic treatment for cancer includes, but is not limited to, surgery, chemotherapy, radiation therapy, gene therapy, and immunotherapy.

[0337] As used herein, the term “agent” or “drug” or “therapeutic agent” refers to a chemical compound, a mixture of chemical compounds, a biological macromolecule, or an extract made from biological materials such as bacteria, plants, fungi, or animal (particularly mammalian) cells or tissues that are suspected of having therapeutic properties. The agent or drug can be purified, substantially purified or partially purified. An “agent” according to the present invention, also includes a radiation therapy agent or a “chemotherapuetic agent.”

[0338] As used herein, the term “diagnostic agent” refers to any chemical used in the imaging of diseased tissue, such as, e.g., a tumor.

[0339] As used herein, the term “chemotherapuetic agent” refers to an agent with activity against cancer, neoplastic, and/or proliferative diseases, or that has ability to kill cancerous cells directly.

[0340] As used herein, “pharmaceutical formulations” include formulations for human and veterinary use with no significant adverse toxicological effect. “Pharmaceutically acceptable formulation” as used herein refers to a composition or formulation that allows for the effective distribution of the nucleic acid molecules of the instant invention in the physical location most suitable for their desired activity.

[0341] As used herein the term “pharmaceutically acceptable carrier” is intended to include any and all solvents, dispersion media, coatings, antibacterial and antifungal agents, isotonic and absorption delaying agents, and the like, compatible with pharmaceutical administration. The use of such media and agents for pharmaceutically active substances is well known in the art. Except insofar as any conventional media or agent is incompatible with the active compound, use thereof in the compositions is contemplated.

[0342] Aptamer-Toxin Conjugates as Therapeutic Agents

[0343] Previous work has developed the concept of antibody-toxin conjugates (“immunoconjugates”) as potential therapies for a range of indications, mostly directed at the treatment of cancer with a primary focus on hematological tumors. A variety of different payloads for targeted delivery have been tested in pre-clinical and clinical studies, including protein toxins, high potency small molecule cytotoxics, radioisotopes, and liposome-encapsulated drugs. Although these efforts have successfully yielded several FDA-approved therapies for hematological tumors, immunoconjugates as a class (especially for solid tumors) face challenges that have been attributable to multiple different properties of antibodies, including tendencies to develop neutralizing antibody responses to non-humanized antibodies, limited penetration in solid tumors, loss of target binding affinity as a result of toxin conjugation, and imbalances between antibody half-life and toxin conjugate half-life that limit the overall therapeutic index (reviewed by Reff and Heard, Critical Reviews in Oncology/Hematology, 40 (2001):25-35).

[0344] Aptamers are functionally similar to antibodies, although their absorption, distribution, metabolism, and excretion (“ADME”) properties are intrinsically different and they generally lack many of the immune effector functions generally associated with antibodies (e.g., antibody-dependent cellular cytotoxicity, complement-dependent cytotoxicity). In comparing many of the properties of aptamers and antibodies previously described, several factors suggest that toxin-delivery via aptamers offers several concrete advantages over delivery with antibodies, ultimately affording them better potential as therapeutics. Several examples of the advantages of toxin-delivery via aptamers over antibodies are as follows:

[0345] 1) Aptamer-toxin conjugates are entirely chemically synthesized. Chemical synthesis provides more control over the nature of the conjugate. For example, the stoichiometry (ratio of toxins per aptamer) and site of attachment can be precisely defined. Different linker chemistries can be readily tested. The reversibility of aptamer folding means that loss of activity during conjugation is unlikely and provides more flexibility in adjusting conjugation conditions to maximize yields.

[0346] 2) Smaller size allows better tumor penetration. Poor penetration of antibodies into solid tumors is often cited as a factor limiting the efficacy of conjugate approaches. See Colcher, D., Goel, A., Pavlinkova, G., Beresford, G., Booth, B., Batra, S. K. (1999) “Effects of genetic engineering on the pharmacokinetics of antibodies,” Q. J. Nucl. Med., 43: 132-139. Studies comparing the properties of unPEGylated anti-tenascin C aptamers with corresponding antibodies demonstrate efficient uptake into tumors (as defined by the tumor:blood ratio) and evidence that aptamer localized to the tumor is unexpectedly long-lived (t_{1/2}>12 hours) (Hicke, B. J., Stephens, A. W., “Escort aptamers: a delivery service for diagnosis and therapy”, J. Clin. Invest., 106:923-928 (2000)).

[0347] 3) Tunable PK. Aptamer half-life/metabolism can be more easily tuned to match properties of payload, optimizing the ability to deliver toxin to the tumor while minimizing systemic exposure. Appropriate modifications to the aptamer backbone and addition of high molecular weight PEGs should make it possible to match the half-life of the aptamer to the intrinsic half-life of the conjugated toxin/linker, minimizing systemic exposure to non-functional toxin-bearing metabolites (expected if t_{1/2}(aptamer)<<t_{1/2}(toxin)) and reducing the likelihood that persisting unconjugated aptamer will functionally block uptake of conjugated aptamer (expected if t_{1/2}(aptamer)>>t_{1/2}(toxin)).

[0348] 4) Relatively low material requirements. It is likely that dosing levels will be limited by toxicity intrinsic to the cytotoxic payload. As such, a single course of treatment will likely entail relatively small (<100 mg) quantities of aptamer, reducing the likelihood that the cost of oligonucleotide synthesis will be a barrier for aptamer-based therapies.

[0349] 5) Parenteral administration is preferred for this indication. There will be no special need to develop alternative formulations to drive patient/physician acceptance.

[0350] The invention provides a pharmaceutical composition comprising a therapeutically effective amount of an aptamer provided by the invention or a salt thereof, and a pharmaceutically acceptable carrier or diluent. The invention also provides a pharmaceutical composition comprising a therapeutically effective amount of the aptamer or a salt thereof, and a pharmaceutically acceptable carrier or diluent. Relatedly, the invention provides a method of treating or ameliorating a disease or disorder, comprising administering the pharmaceutical composition to a subject in need thereof. Administering a therapeutically effective amount of the composition to the subject may result in: (a) an enhancement of the delivery of the active agent to a disease site relative to delivery of the active agent alone; or (b) an enhancement of microvesicles clearance resulting in a decrease of at least 10%, 20%, 30%, 40%, 50%, 60%, 70%, 80%, or 90% in a blood level of microvesicles targeted by the aptamer; or (c) an decrease in biological activity of microvesicles targeted by the aptamer of at least 10%, 20%, 30%, 40%, 50%, 60%, 70%, 80%, or 90%. In an embodiment, the biological activity of microvesicles comprises immune suppression or transfer of genetic information. The disease or disorder can include without limitation those disclosed herein. For example, the disease or disorder may comprise a neoplastic, proliferative, or inflammatory, metabolic, cardiovascular, neurological, or infectious, disease or disorder. See, e.g., section “Phenotypes.”

[0351] Anti-Target and Multivalent Oligonucleotides

[0352] As described herein, the target of oligonucleotide probes can be identified. For example, when the target comprises a protein or protein complex (e.g., a nucleoprotein or lipoprotein), identifying the target may comprise use of mass spectrometry (MS), peptide mass fingerprinting (PMF; protein fingerprinting), sequencing, N-terminal amino acid analysis, C-terminal amino acid analysis, Edman degradation, chromatography, electrophoresis, two-dimensional gel electrophoresis (2D gel), antibody array, or immunoassay. Such approaches can be applied to identify a number of targets recognized by an oligonucleotide probe library. For example, an oligonucleotide probe library can be incubated with a sample of interest, bound members of the library captured, and the targets bound to the captured members identified. See Example 6 herein for an example of such target identification using mass spectrometry.

[0353] The oligonucleotide aptamers to the various targets can be used for multiple purposes. In some embodiments, the aptamers are used as therapeutic agents. Immunotherapeutic approaches using antibodies that recognize foreign/misfolded antigens (e.g., anti-CD20, anti-CD30, anti-CD33, anti-CD52, anti-EGFR, anti-nucleolin, anti-nucleophosmin, etc.) can selectively kill target cells via linked therapeutic agents or by stimulating the immune system through activation of cell-mediated cytotoxicity. Aptamers or oligonucleotides are an attractive immunotherapeutic alternative for various reasons such as low cost, small size, ease and speed of synthesis, stability and low immunogenicity. In an embodiment, immunotherapeutic agents are conjugated to disease specific target oligonucleotide or antibody (Ab) for targeted cell killing via recruitment of complement proteins and the downstream membrane attack complex. See, e.g., Zhou and Rossi, Cell-type-specific, Aptamer-functionalized Agents for Targeted Disease Therapy, Mol Ther Nucleic Acids. 2014 Jun. 17; 3:e 169. doi: 10.1038/mtna.2014.21; Pei et al., Clinical applications of nucleic acid aptamers in cancer, Mol Clin Oncol. 2014 May; 2(3):341-348. Epub 2014 Feb. 10. This approach can be applied to target diseased host cells such as cancer cells, gram negative bacteria, viral and/or parasitic infections, and the like.

[0354] In some embodiments, the invention provides a multipartite construct comprising a binding agent specific to a biological target with another binding agent specific to immunomodulatory entity. Examples of such constructs are shown in FIG. 8A. In Design 1 in the figure, the horizontal line indicates an oligonucleotide construct, which construct comprises a 5′ primer 801 (Primer 1), a variable region 802 that can be an aptamer to a target of interest, a 3′ primer 803 (Primer 2), and an immunomodulatory domain region (“IMD”) 804. The complete Design 1 construct can be used to bring a target of interest in proximity with an immunomodulatory agent. The primers can be designed for any desired purpose, e.g., amplification, capture, modification, direct or indirect labeling, and the like. In some embodiments, the target of the variable region is a disease marker and thus the construct is targeted to a disease cell or microvesicle. The immunomodulatory domain region can act as an immune stimulator or suppressor. Any appropriate immune stimulator or suppressor can be used, e.g., a small molecule, antibody or an aptamer. Thus, the construct can modulate the immune response at a target of interest, e.g., at a cell or microvesicle carrying the target. The basic construct can be modified as desired. For example, Design 2 in FIG. 8A shows the construct carrying a linker 805 between Primer 2 803 and the IMD 804. Such linkers are explained further below and can be inserted between any components of the construct as desired. Linkers can provide a desired space between the regions of the construct and can be manipulated to influence other properties such as stability. Design 3 in FIG. 8A shows another example wherein the IMD 804 is an oligonucleotide and the variable region 802 and IMD 804 lie between the primers 801 and 803. One of skill will appreciate that one or more linker, such as 805 of Design 2, can also be inserted into Design 3, e.g., between the variable region 802 and IMD 804. One of skill will further appreciate that the ordering of the oligonucleotide segments from 5′ to 3′ can be modified, e.g., reversed. As a concrete example which will be described further below, FIG. 8B illustrates Design 1 and Design 2 from FIG. 8A wherein the variable region comprises an anti-HIV oligonucleotide 811, see, e.g., Example 10 herein, and the IMD comprises an anti-C1q oligonucleotide 812, e.g., an oligonucleotide provided herein. See, e.g., Example 18. This constructs of FIG. 8B can be used used to target a HIV+ cell population and stimulate C1q mediated cell killing.

[0355] As noted, the multipartite constructs may be synthesized and/or modified as desired. In some embodiments of the invention, the multipartite oligonucleotide construct is synthesized directly with or without a linker in between the oligonucleotide segments. See, e.g., FIG. 8A Design 3, which can be generated directly via amplification by Primer 1 801 and Primer 2 803. One or more linker can act as a spacer to create a desired spacing between the target of the variable region segment 802 and the target of the IMD segment 804. The spacing can be determined via computer modeling or via experimentation due to steric hindrance or other considerations. Following the example of FIG. 8B, the type and size of the linker may be dependent upon steric hindrance between the HIV associated target protein and the C1q protein/MAC complex.

[0356] The multipartite constructs can be generated against any appropriate target. The targets can include without limitation tumors, infected or otherwise diseased cells, cancer cells, circulating tumor cells (CTCs), immune cells (e.g., B-cells, T-cells, macrophages, dendritic cells), microvesicles, bacteria, viruses or other parasites. The target can be large biological complexes, e.g., protein complexes, ribonucleoprotein complexes, lipid complexes, or a combination thereof. It will be understood that the specific target of the multipartite constructs can be a certain member of the foregoing macromolecular targets. For example, consider that the desired target of the multipartite construct is a cell or microvesicle. In such case, the multipartite construct can be directed to a specific biomarker, e.g., a surface antigen, of the cell or microvesicle. As a non-limiting example, the target of interest can be HIV latently infected cells and the specifc target of the variable region of the multipartite construct can be CD32a. CD32a may be a marker of a CD4 T-cell HIV reservoir harbouring replication-competent proviruses. See, e.g., Descours B et al., Nature. 2017 Mar. 23; 543(7646):564-567, which reference is incorporated herein in its entirety. As another non-limiting example, the target of interest can be cancer cells and the specifc target of the variable region of the multipartite construct can be c-MET. MET is a membrane receptor that is essential for embryonic development and wound healing. Abnormal MET activation in cancer correlates with poor prognosis, where aberrantly active MET triggers tumor growth, formation of new blood vessels (angiogenesis), and cancer spread to other organs (metastasis). MET has been observed to be deregulated in many types of human malignancies, including cancers of kidney, liver, stomach, breast, and brain. Other biomarkers can be used as the specifc target as desired. For example, the biomarker can be selected from Table 4 of International Patent Application PCT/US2016/040157, filed Jun. 29, 2016; which application is incorporated by reference herein in its entirety. See FIG. 8C, which illustrates a construct of the invention 831 having a segment that recognizes a biomarker 832 (“Marker of Interest”) on a cell surface 833 (“Membrane”), and another segment 834 that attracts an immune response (“Complement”). The construct 831 can be such as in FIGS. 8A-B or any other desired configuration. Binding of such a construct to a target can cause a complement cascade and induce apoptosis.

[0357] In some embodiments of the invention, the target biomarker is selected from the group consisting of CD19, CD20, CD21, CD22 (also known as LL2), CDIM, and Lym-1. The target biomarker can be a membrane associated protein. In embodiments, the membrane associated protein is selected from the group consisting of CD4, CD19, DC-SIGN/CD209, HIV envelope glycoprotein gp120, CCR5, EGFR/ErbB1, EGFR2/ErbB2/HER2, EGFR3/ErbB3, EGFR4/ErbB4, EGFRvIII, Transferrin Receptor, PSMA, VEGF, VEGF-2, CD25, CD11a, CD33, CD20, CD3, CD52, CEA, TAG-72, LDL receptor, insulin receptor, megalin receptor, LRP, mannose receptor, P63/CKAP4 receptor, arrestin, ASGP, CCK-B, HGFR, RON receptor, FGFR, ILR, AFP, CA125/MUC16, PDGFR, stem cell factor receptor, colony stimulating factor-1 receptor, integrins, TLR, BCR and BAFF-R. The target biomarker can also be a cellular receptor selected from the group consisting of: nucleolin, human epidermal growth factor receptor 2 (HER2), CD20, a transferrin receptor, an asialoglycoprotein receptor, a thyroid-stimulating hormone (TSH) receptor, a fibroblast growth factor (FGF) receptor, CD3, the interleukin 2 (IL-2) receptor, a growth hormone receptor, an insulin receptor, an acetylcholine receptor, an adrenergic receptor, a vascular endothelial growth factor (VEGF) receptor, a protein channel, cadherin, a desmosome, and a viral receptor. In various embodiments, the target biomarker is a cell surface molecule selected from the group consisting of IgM, IgD, IgG, IgA, IgE, CD19, CD20, CD21, CD22, CD24, CD40, CD72, CD79a, CD79b, CD1d, CD5, CD9, CD10, CD1d, CD23, CD27, CD38, CD48, CD80, CD86, CD138, CD148, and combinations thereof. The target biomarker can be a lymphocyte-directing target such as one or more T-cell receptor motifs, T-cell a chains, T-cell 1 chains, T-cell y chains, T-cell A chains, CCR7, CD3, CD4, CD5, CD7, CD8, CD11b, CD11c, CD16, CD19, CD20, CD21, CD22, CD25, CD28, CD34, CD35, CD40, CD45RA, CD45RO, CD52, CD56, CD62L, CD68, CD80, CD95, CD117, CD127, CD133, CD137 (4-1 BB), CD163, F4/80, IL-4Ra, Sca-1, CTLA-4, GITR, GARP, LAP, granzyme B, LFA-1, or transferrin receptor.

[0358] In some embodiments, the target biomarker comprises a growth factor, vascular endothelial growth factor (VEGF), TGF, TGFβ, PDGF, IGF, FGF, cytokine, lymphokine, hematopoietic factor, M-CSR, GM-CSF, TNF, interleukin, IL-1, IL-2, IL-3, IL-4, IL-5, IL-6, IL-7, IL-8, IL-9, IL-10, IL-11, IL-12, IL-13, IL-14, IL-15, IL-16, IL-17, IL18, IFN, TNF0, TNF1, TNF2, G-CSF, Meg-CSF, GM-CSF, thrombopoietin, stem cell factor, erythropoietin, hepatocyte growth factor/NK1, angiogenic factor, angiopoietin, Ang-1, Ang-2, Ang-4, Ang-Y, human angiopoietin-like polypeptide, angiogenin, morphogenic protein-1, bone morphogenic protein receptor, bone morphogenic protein receptor IA, bone morphogenic protein receptor IB, neurotrophic factor, chemotactic factor, CD proteins, CD3, CD4, CD8, CD19, CD20, erythropoietin, osteoinductive factors, immunotoxin, bone morphogenetic protein (BMP), interferon, interferon-alpha, interferon-beta, interferon-gamma, colony stimulating factor (CSF), M-CSF, GM-CSF, G-CSF, superoxide dismutase, T-cell receptor; surface membrane protein, decay accelerating factor, viral antigen, portion of the AIDS envelope, transport protein, homing receptor, addressin, regulatory protein, integrin, CD11a, CD11b, CD11c, CD18, ICAM, VLA-4, VCAM, tumor associated antigen, HER2, HER3, HER4, nucleophosmin, a heterogeneous nuclear ribonucleoproteins (hnRNPs), fibrillarin; or fragments or variants thereof.

[0359] In still other embodiments, the target biomarker is selected from the group consisting of epidermal growth factor receptor, transferrin receptor, platelet-derived growth factor receptor, Erb-B2, CD19, CD20, CD45, CD52, Ep-CAM, alpha ([alpha])-fetoprotein, carcinoembryonic antigen peptide-1, caspase-8, CDC27, CDK4, carcino-embryonic antigen, calcium-activated chloride channel-2, cyclophilin B, differentiation antigen melanoma, elongation factor 2, Ephrin type-A receptor 2, 3, Fibroblast growth factor-5, fibronectin, glycoprotein 250, G antigen, N-acetylglucosaminyltransferase V, glycoprotein 100 kD, helicase antigen, human epidermal receptor-2/neurological, heat shock protein 70-2 mutated, human signet ring tumor-2, human telomerase reverse transcriptase, intestinal carboxyl esterase, interleukin 13 receptor [alpha]2 chain, [beta]-D-galactosidase 2-[alpha]-L-fucosyltransferase, melanoma antigen, melanoma antigen recognized by T cells-1/Melanoma antigen A, melanocortin 1 receptor, macrophage colony-stimulating factor, mucin 1, 2, melanoma ubiquitous mutated 1, 2, 3, New York-esophageous 1, ocular albinism type 1 protein, O-linked N-acetyl glucosamine transferase gene, protein 15, promyelocytic leukemia/retinoic acid receptor [alpha], prostate-specific antigen, prostate-specific membrane antigen, receptor-type protein-tyrosinephosphatase kappa, renal antigen, renal ubiquitous 1, 2, sarcoma antigen, squamous antigen rejecting tumor 1, 2, 3, synovial sarcoma, Survivin-2B, synaptotagmin I/synovial sarcoma, X fusion protein, translocation Ets-family leukemia/acute myeloid leukemia 1, transforming growth factor [beta] receptor 2, triosephosphate isomerase, taxol resistant associated protein 3, testin-related gene, tyrosinase related protein 1, and tyrosinase related protein 2.

[0360] The target biomarker can be a cancer-associated or tumor associated antigen. The cancer-associated antigen may include without limitation one or more of human Her2/neu, Her1/EGF receptor (EGFR), HER2 (ERBB2), Her3, Her4, A33 antigen, B7H3, CD5, CD19, CD20, CD22, CD23 (IgE Receptor), C242 antigen, 5T4, IL-6, IL-13, vascular endothelial growth factor VEGF (e.g., VEGF-A), VEGFR-1, VEGFR-2, CD30, CD33, CD37, CD40, CD44, CD51, CD52, CD56, CD74, CD80, CD152, CD200, CD221, CCR4, HLA-DR, CTLA-4, N PC-1C, tenascin, vimentin, insulin-like growth factor 1 receptor (IGF-1R), alpha-fetoprotein, insulin-like growth factor 1 (IGF-1), carbonic anhydrase 9 (CA-IX), carcinoem bryonic antigen (CEA), integrin αvβ3, integrin α5βt, folate receptor 1, transmembrane glycoprotein NMB, fibroblast activation protein alpha (FAP), glypican 1, glypican 3, glycoprotein 75, TAG-72, MUC1, MUC16 (also known as CA-125), phosphatidylserine, prostate-specific membrane antigen (PMSA), NR-LU-13 antigen, TRAIL-R1, tumor necrosis factor receptor superfamily member 10b (TNFRSF10B or TRAIL-R2), SLAM family member 7 (SLAM F7), EGP40 pancarcinoma antigen, B-cell activating factor (BAFF), platelet-derived growth factor receptor, glycoprotein EpCAM (17-1A), Programmed Death-1 (PD1), Programmed Death Ligand 1 (PD-L1), protein disulfide isomerase (PDI), Phosphatase of Regenerating Liver 3 (PRL-3), prostatic acid phosphatase, Lewis-Y antigen, GD2 (a disialoganglioside expressed on tumors of neuroectodermal origin), or mesothelin. For example, the target can be one or more of human Her2/neu, Her1/EGFR, TNF-a, B7H3 antigen, CD20, VEGF, CD52, CD33, CTLA-4, tenascin, alpha-4 (α4) integrin, IL-23, amyloid-3, Huntingtin, CD25, nerve growth factor (NGF), TrkA, and α-synuclein. In some embodiments, the target biomarker is a tumor antigen selected from the group consisting of PSMA, BRCA1, BRCA2, alpha-actinin-4, BCR-ABL fusion protein (b3a2), CASP-8, β-catenin, Cdc27, CDK4, dek-can fusion protein, Elongation factor 2, ETV6-AML1 fusion protein, LDLR-fucosyltransferase AS fusion protein, hsp70-2, KIAAO205, MART2, MUM-if, MUM-2, MUM-3, neo-PAP, Myosin class I, OS-9g, pml-RAR alpha fusion protein, PTPRK, K-ras, N-ras, CEA, gp100/Pme117, Kallikrein 4, mammaglobin-A, Melan-A/MART-1, PSA, TRP-1/gp75, TRP-2, tyrosinase, CPSF, EphA3, G250/MN/CAIX, HER-2/neu, Intestinal carboxyl esterase, alpha-fetoprotein, M-CSF, MUC1, p53, PRAME, RAGE-1, RU2AS, survivin, Telomerase, WT1, or CA125. In still other embodiments, the target biomarker is a tumor antigen selected from the group consisting of 4-1BB, 5T4, AGS-5, AGS-16, Angiopoietin 2, B7.1, B7.2, B7DC, B7H1, B7H2, B7H3, BT-062, BTLA, CAIX, Carcinoembryonic antigen, CTLA4, Cripto, ED-B, ErbB1, ErbB2, ErbB3, ErbB4, EGFL7, EpCAM, EphA2, EphA3, EphB2, EphB3, FAP, Fibronectin, Folate Receptor, Ganglioside GM3, GD2, glucocorticoid-induced tumor necrosis factor receptor (GITR), gp100, gpA33, GPNMB, ICOS, IGFIR, Integrin av, Integrin αvβ, KIR, LAG-3, Lewis Y, Mesothelin, c-MET, MN Carbonic anhydrase IX, MUC1, MUC16, Nectin-4, NKGD2, NOTCH, OX40, OX40L, PD-1, PDL1, PSCA, PSMA, RANKL, ROR1, ROR2, SLC44A4, Syndecan-1, TACI, TAG-72, Tenascin, TIM3, TRAILR1, TRAILR2, VEGFR-1, VEGFR-2, VEGFR-3, and variants thereof. In still other embodiments, the target biomarker is a tumor-associated antigen selected from the group consisting of Lewis Y, Muc-1, erbB-2, -3 and -4, Ep-CAM, EGF-receptor (e.g., EGFR type I or EGFR type II), EGFR deletion neoepitope, CAI9-9, Muc-1, LeY, TF-, Tn- and sTn-antigen, TAG-72, PSMA, STEAP, Cora antigen, CD7, CD19 and CD20, CD22, CD25, Ig-α and Ig-β, A33 and G250, CD30, MCSP and gp100, CD44-v6, MT-MMPs, (MIS) receptor type II, carboanhydrase 9, F19-antigen, Ly6, desmoglein 4, PSCA, Wue-1, GD2 and GD3 as well as TM4SF-antigens (CD63, L6, CO-29, SAS) and the alpha and/or gamma subunit of the fetal type acetylcholinreceptor (AChR). The target biomarker can be a cancer antigen selected from A33, BAGE, Bcl-2, β-catenin, CA125, CA19-9, CD5, CD19, CD20, CD21, CD22, CD33, CD37, CD45, CD123, CEA, c-Met, CS-1, cyclin B1, DAGE, EBNA, EGFR, ephrinB2, estrogen receptor, FAP, ferritin, folate-binding protein, GAGE, G250, GD-2, GM2, gp75, gp100 (Pmel 17), HER-2/neu, HPV E6, HPV E7, Ki-67, LRP, mesothelin, p53, PRAME, progesterone receptor, PSA, PSMA, MAGE, MART, mesothelin, MUC, MUM-1-B, myc, NYESO-1, ras, RORI, survivin, tenascin, TSTA tyrosinase, VEGF, and WT1. The target biomarker can also be a tumor antigen selected from carcinoembryonic antigen (CEA), alpha-fetoprotein (AFP), prostate specific antigen (PSA), prostate specific membrane antigen (PSMA), CA-125 (epithelial ovarian cancer), soluble Interleukin-2 (IL-2) receptor, RAGE-1, tyrosinase, MAGE-1, MAGE-2, NY-ESO-1, Melan-A/MART-1, glycoprotein (gp) 75, gp100, beta-catenin, PRAME, MUM-1, ZFP 161, Ubiquilin-1, HOX-B6, YB-1, Osteonectin, ILF3, or IGF-1. In some embodiments, the cancer-related antigen is one or more of CD2, CD4, CD19, CD20, CD22, CD23, CD30, CD33, CD37, CD40, CD44v6, CD52, CD56, CD70, CD74, CD79a, CD80, CD98, CD138, EGFR (Epidermal growth factor receptor), VEGF (Vascular endothelial growth factor), VEGFR1 (Vascular endothelial growth factor receptor I), PDGFR (Platelet-derived growth factor receptor), RANKL (Receptor activator of nuclear factor kappa-B ligand), GPNMB (Transmembrane glycoprotein Neuromedin B), EphA 2 (Ephrin type-A receptor 2), PSMA (Prostate-specific membrane antigen), Cripto (Cryptic family protein 1B), EpCAM (Epithelial cell adhesion molecule), CTLA 4 (Cytotoxic T-Lymphocyte Antigen 4), IGF-IR (Type 1 insulin-like growth factor receptor), GP3 (M13 bacteriophage), GP9 (Glycoprotein IX (platelet), CD42a, GP 40 (Glycoprotein 40 kDa), GPC3 (glypican-3), GPC 1 (glypican-1), TRAILR1 (Tumor necrosis factor-related apoptosis-inducing ligand receptor 1), TRAILRII (Tumor necrosis factor-related apoptosis-inducing ligand receptor II), FAS (Type II transmembrane protein), PS (phosphatidyl serine) lipid, Gal GalNac Gal N-linked, Muc1 (Mucin 1, cell surface associated, PEM), Muc18, CD146, A5B1 integrin (α5β1), α4β1 integrin, αv integrin (Vitronectin Receptor), Chondrolectin, CAIX (Carbonic anhydrase IX, gene G250/MN-encoded transmembrane protein), GD2 gangloside, GD3 gangloside, GM1 gangloside, Lewis Y, Mesothelin, HER2 (Human Epidermal Growth factor 2), HER3, HER4, FN14 (Fibroblast Growth Factor Inducible 14), CS1 (Cell surface glycoprotein, CD2 subset 1, CRACC, SLAMF7, CD319), 41BB CD137, SIP (Siah-1 Interacting Protein), CTGF (Connective tissue growth factor), HLADR (MHC class II cell surface receptor), PD-1 (Programmed Death 1, Type I membrane protein, PD-L1 (Programmed Death Ligand 1), PD-L2 (Programmed Death Ligand 2), IL-2 (Interleukin-2), IL-8 (Interleukin-8), IL-13 (Interleukin-13), PIGF (Phosphatidylinositol-glycan biosynthesis class F protein), NRP1 (Neuropilin-1), ICAM1, CD54, GC182 (Claudin 18.2), Claudin, HGF (Hepatocyte growth factor), CEA (Carcinoembryonic antigen), LTβR (lymphotoxin β receptor), Kappa Myeloma, Folate Receptor alpha, GRP78 (BIP, 78 kDa Glucose-regulated protein), A33 antigen, PSA (Prostate-specific antigen), CA 125 (Cancer antigen 125 or carbohydrate antigen 125), CA19.9, CA15.3, CA242, leptin, prolactin, osteopontin, IGF-II (Insulin-like growth factor 2), fascin, sPIgR (secreted chain of polymorphic immunoglobulin receptor), 14-3-3 protein eta, 5T4 oncofetal protein, ETA (epithelial tumor antigen), MAGE (Melanoma-associated antigen), MAPG (Melanoma-associated proteoglycan, NG2), vimentin, EPCA-1 (Early prostate cancer antigen-2), TAG-72 (Tumor-associated glycoprotein 72), factor VIII, Neprilysin (Membrane metallo-endopeptidase) and 17-1 A (Epithelial cell surface antigen 17-1A). The cancer antigen can be selected from the group consisting of carbonic anhydrase IX, alpha-fetoprotein, A3, antigen specific for A33 antibody, Ba 733, BrE3-antigen, CA125, CD1, CD1a, CD3, CD5, CD15, CD16, CD19, CD20, CD21, CD22, CD23, CD25, CD30, CD33, CD38, CD45, CD74, CD79a, CD80, CD138, colon-specific antigen-p (CSAp), CEA (CEACAM5), CEACAM6, CSAp, EGFR, EGP-1, EGP-2, Ep-CAM, Flt-1, Flt-3, folate receptor, HLA-DR, human chorionic gonadotropin (HCG) and its subunits, HER2/neu, hypoxia inducible factor (HIF-1), Ia, IL-2, IL-6, IL-8, insulin growth factor-1 (IGF-1), KC4-antigen, KS-1-antigen, KS1-4, Le-Y, macrophage inhibition factor (MIF), MAGE, MUC1, MUC2, MUC3, MUC4, MUC16, NCA66, NCA95, NCA90, antigen specific for PAM-4 antibody, placental growth factor, p53, prostatic acid phosphatase, PSA, PSMA, RS5, S100, TAC, TAG-72, tenascin, TRAIL receptors, Tn antigen, Thomson-Friedenreich antigens, tumor necrosis antigens, VEGF, ED-B fibronectin, 17-1A-antigen, an angiogenesis marker, an oncogene marker and an oncogene product.

[0361] The tumor marker can be a generic tumor marker or be associated with certain tumor types, such as those originating from different anatomical origins. In an embodiment, the tumor marker can be chosen to correspond to a certain tumor type. For example, exemplary tumor markers and associated tumor types include without limitation the following, listed as antigen (optional name) (cancer types): Alpha fetoprotein (AFP) (germ cell tumor, hepatocellular carcinoma); CA15-3 (breast cancer); CA27-29 (breast cancer); CA 19-9 (mainly pancreatic cancer, but also colorectal cancer and other types of gastrointestinal cancer); CA-125 (ovarian cancer, endometrial cancer, fallopian tube cancer, lung cancer, breast cancer and gastrointestinal cancer); Calcitonin (medullary thyroid carcinoma); Calretinin (mesothelioma, sex cord-gonadal stromal tumour, adrenocortical carcinoma, synovial sarcoma); Carcinoembryonic antigen (gastrointestinal cancer, cervix cancer, lung cancer, ovarian cancer, breast cancer, urinary tract cancer); CD34 (hemangiopericytoma/solitary fibrous tumor, pleomorphic lipoma, gastrointestinal stromal tumor, dermatofibrosarcoma protuberans); CD99 (MIC2) (Ewing sarcoma, primitive neuroectodermal tumor, hemangiopericytoma/solitary fibrous tumor, synovial sarcoma, lymphoma, leukemia, sex cord-gonadal stromal tumour); CD117 (gastrointestinal stromal tumor, mastocytosis, seminoma); Chromogranin (neuroendocrine tumor); Chromosomes 3, 7, 17, and 9p21 (bladder cancer); Cytokeratin (various types) (various carcinoma, some types of sarcoma); Desmin (smooth muscle sarcoma, skeletal muscle sarcoma, endometrial stromal sarcoma); Epithelial membrane antigen (EMA) (many types of carcinoma, meningioma, some types of sarcoma); Factor VIII (CD31, FL1) (vascular sarcoma); Glial fibrillary acidic protein (GFAP) (glioma (astrocytoma, ependymoma)); Gross cystic disease fluid protein (GCDFP-15) (breast cancer, ovarian cancer, salivary gland cancer); HMB-45 (melanoma, PEComa (for example angiomyolipoma), clear cell carcinoma, adrenocortical carcinoma); Human chorionic gonadotropin (hCG) (gestational trophoblastic disease, germ cell tumor, choriocarcinoma); Immunoglobulin (lymphoma, leukemia); Inhibin (sex cord-gonadal stromal tumour, adrenocortical carcinoma, hemangioblastoma); keratin (various types) (carcinoma, some types of sarcoma); lymphocyte marker (various types, lymphoma, leukemia); MART-1 (Melan-A) (melanoma, steroid-producing tumors (adrenocortical carcinoma, gonadal tumor)); Myo D1 (rhabdomyosarcoma, small, round, blue cell tumour); muscle-specific actin (MSA) (myosarcoma (leiomyosarcoma, rhabdomyosarcoma); neurofilament (neuroendocrine tumor, small-cell carcinoma of the lung); neuron-specific enolase (NSE) (neuroendocrine tumor, small-cell carcinoma of the lung, breast cancer); placental alkaline phosphatase (PLAP) (seminoma, dysgerminoma, embryonal carcinoma); prostate-specific antigen (prostate); PTPRC (CD45) (lymphoma, leukemia, histiocytic tumor); S100 protein (melanoma, sarcoma (neurosarcoma, lipoma, chondrosarcoma), astrocytoma, gastrointestinal stromal tumor, salivary gland cancer, some types of adenocarcinoma, histiocytic tumor (dendritic cell, macrophage)); smooth muscle actin (SMA) (gastrointestinal stromal tumor, leiomyosarcoma, PEComa); synaptophysin (neuroendocrine tumor); thyroglobulin (thyroid cancer but not typically medullary thyroid cancer); thyroid transcription factor-1 (all types of thyroid cancer, lung cancer); Tumor M2-PK (colorectal cancer, Breast cancer, renal cell carcinoma, Lung cancer, Pancreatic cancer, Esophageal Cancer, Stomach Cancer, Cervical Cancer, Ovarian Cancer); Vimentin (sarcoma, renal cell carcinoma, endometrial cancer, lung carcinoma, lymphoma, leukemia, melanoma). Additional tumor types and associated biomarkers comprise the following, listed as tumor type (markers): Colorectal (M2-PK, CEA, CA 19-9, CA 125); Breast (CEA, CA 15-3, Cyfra 21-1); Ovary (CEA, CA 19-9, CA 125, AFP, BHCG); Uterine (CEA, CA 19-9, CA 125, Cyfra 21-1, SCC); Prostate (PSA); Testicle (AFP, BHCG); Pancreas/Stomach (CEA, CA 19-9, CA 72-4); Liver (CEA, AFP); Oesophagus (CEA, Cyfra 21-1); Thyroid (CEA, NSE); Lung (CEA, CA 19-9, CA 125, NSE, Cyfra 21-1); Bladder (CEA, Cyfra 21-1, TPA). One or more of these markers can be used as the target biomarker recognized by the variable region of the multipartite construct of the invention.

[0362] In some embodiments of the invention, the target biomarker recognized by the variable region comprises one or more of PDGF, IgE, IgE Fce R1, PSMA, CD22, TNF-alpha, CTLA4, PD-1, PD-L1, PD-L2, FcRIIB, BTLA, TIM-3, CD11c, BAFF, B7-X, CD19, CD20, CD25, and CD33. The target biomarker can also be a protein comprising one or more of insulin-like growth factor 1 receptor (IGF1R), IGF2R, insulin-like growth factor (IGF), mesenchymal epithelial transition factor receptor (c-met), hepatocyte growth factor (HGF), epidermal growth factor receptor (EGFR), ErbB2, ErbB3, epidermal growth factor (EGF), heregulin, fibroblast growth factor receptor (FGFR), platelet-derived growth factor receptor (PDGFR), platelet-derived growth factor (PDGF), vascular endothelial growth factor receptor (VEGFR), vascular endothelial growth factor (VEGF), tumor necrosis factor receptor (TNFR), tumor necrosis factor alpha (TNF-a), folate receptor (FOLR), folate, transferrin receptor (TfR), mesothelia, Fc receptor, c-kit receptor, c-kit, a4 integrin, P-selectin, sphingosine-1-phosphate receptor-1 (S1PR), hyaluronate receptor, leukocyte function antigen-1 (LFA-1), CD4, CD11, CD18, CD20, CD25, CD27, CD52, CD70, CD80, CD85, CD95 (Fas receptor), CD106 (vascular cell adhesion molecule 1 (VCAM1)), CD166 (activated leukocyte cell adhesion molecule (ALCAM)), CD 178 (Fas ligand), CD253 (TNF-related apoptosis-inducing ligand (TRAIL)), inducible costimulator (ICOS) ligand, CCR2, CXCR3, CCR5, CXCL12 (stromal cell-derived factor 1 (SDF-1)), interleukin 1 (IL-1), cytotoxic T-lymphocyte antigen 4 (CTLA-4), MART-1, gp100, MAGE-1, ephrin (Eph) receptor, mucosal addressin cell adhesion molecule 1 (MAdCAM-1), carcinoembryonic antigen (CEA), LewisY, MUC-1, epithelial cell adhesion molecule (EpCAM), cancer antigen 125 (CA125), prostate specific membrane antigen (PSMA), TAG-72 antigen, and fragments thereof. In various embodiments, the target biomarker comprises one or more of PSMA, PSCA, e selectin, an ephrin, ephB2, cripto-1, TENB2 (TEMFF2), ERBB2 receptor (HER2), MUC1, CD44v6, CD6, CD19, CD20, CD22, CD23, CD25, CD30, CD33, CD56, IL-2 receptor, HLA-DR10 B subunit, EGFR, CA9, caveolin-1 and nucleolin.

[0363] The target biomarker can be a microvesicle antigen, such as a microvesicle antigen selected from any of Tables 3-4, 10-17 herein, or Table 4 of International Patent Application PCT/US2016/040157, filed Jun. 29, 2016. For example, the target biomarker can be one or more microvesicle antigen selected from CD9, EphA2, EGFR, B7H3, PSMA, PCSA, CD63, STEAP, CD81, B7H3, STEAP1, ICAM1 (CD54), A33, DR3, CD66e, MFG-e8, Hepsin, TMEM211, TROP-2, EGFR, Mammoglobin, Hepsin, NPGP/NPFF2, PSCA, 5T4, NGAL, NK-2, EpCam, NK-1R, 5T4, PAI-1, and CD45. The target biomarker can be one or more microvesicle antigen selected from SPB, SPC, NSE, PGP9.5, CD9, P2RX7, NDUFB7, NSE, Gal3, Osteopontin, CHI3L1, EGFR, B7H3, iC3b, MUC1, Mesothelin, SPA, TPA, PCSA, CD63, AQP5, DLL4, CD81, DR3, PSMA, GPCR 110 (GPRI 10), EPHA2, CEACAM, PTP, CABYR, TMEM211, ADAM28, UNC93a, A33, CD24, CD10, NGAL, EpCam, MUC17, TROP2 and MUC2. In some embodiments, the target biomarker comprises one or more microvesicle antigen selected from CD9, CD63, CD81, B7H3, PRO GRP, CYTO 18, FTH1, TGM2, CENPH, ANNEXIN I, ANNEXIN V, ERBB2, EGFR, CRP, VEGF, CYTO 19, CCL2, Osteopontin (OST19), Osteopontin (OST22), BTUB, CD45, TIMP, NACC1, MMP9, BRCA1, P27, NSE, M2PK, HCG, MUC1, CEA, CEACAM, CYTO 7, EPCAM, MS4A1, MUC1, MUC2, PGP9, SPA, SPA, SPD, P53, GPCR (GPR110), SFTPC, UNCR2, NSE, INGA3, INTO b4, MMP1, PNT, RACK1, NAP2, HLA, BMP2, PTH1R, PAN ADH, NCAM, CD151, CKS1, FSHR, HIF, KRAS, LAMP2, SNAIL, TRIM29, TSPAN1, TWIST1, ASPH and AURKB. In another embodiment, the target biomarker is selected from the group of proteins consisting of CD9, PSMA, PCSA, CD63, CD81, B7H3, IL 6, OPG-13, IL6R, PA2G4, EZH2, RUNX2, SERPINB3, and EpCam. In another embodiment, a target biomarker is selected from the group of proteins consisting of A33, a33 n15, AFP, ALA, ALIX, ALP, AnnexinV, APC, ASCA, ASPH (246-260), ASPH (666-680), ASPH (A-10), ASPH (D01P), ASPH (D03), ASPH (G-20), ASPH (H-300), AURKA, AURKB, B7H3, B7H4, BCA-225, BCNP1, BDNF, BRCA, CA125 (MUC16), CA-19-9, C-Bir, CD1.1, CD10, CD174 (Lewis y), CD24, CD44, CD46, CD59 (MEM-43), CD63, CD66e CEA, CD73, CD81, CD9, CDA, CDAC11a2, CEA, C-Erb2, C-erbB2, CRMP-2, CRP, CXCL12, CYFRA21-1, DLL4, DR3, EGFR, Epcam, EphA2, EphA2 (H-77), ER, ErbB4, EZH2, FASL, FRT, FRT c.f23, GDF15, GPCR, GPR30, Gro-alpha, HAP, HBD 1, HBD2, HER 3 (ErbB3), HSP, HSP70, hVEGFR2, iC3b, IL 6 Unc, IL-1B, IL6 Unc, IL6R, IL8, IL-8, INSIG-2, KLK2, L1CAM, LAMN, LDH, MACC-1, MAPK4, MART-1, MCP-1, M-CSF, MFG-E8, MIC1, MIF, MIS RII, MMG, MMP26, MMP7, MMP9, MS4A1, MUC1, MUC1 seq1, MUC1 seq11A, MUC17, MUC2, Ncam, NGAL, NPGP/NPFF2, OPG, OPN, p53, p53, PA2G4, PBP, PCSA, PDGFRB, PGP9.5, PIM1, PR (B), PRL, PSA, PSMA, PSME3, PTEN, R5-CD9 Tube 1, Reg IV, RUNX2, SCRN1, seprase, SERPINB3, SPARC, SPB, SPDEF, SRVN, STAT 3, STEAP1, TF (FL-295), TFF3, TGM2, TIMP-1, TIMP1, TIMP2, TMEM211, TMPRSS2, TNF-alpha, Trail-R2, Trail-R4, TrKB, TROP2, Tsg 101, TWEAK, UNC93A, VEGF A, and YPSMA-1. The target biomarker can be selected from the group of proteins consisting of 5T4, A33, ACTG1, ADAM10, ADAM15, AFP, ALA, ALDOA, ALIX, ALP, ALX4, ANCA, Annexin V, ANXA2, ANXA6, APC, APOA1, ASCA, ASPH, ATP1A1, AURKA, AURKB, B7H3, B7H4, BANK1, BASP1, BCA-225, BCNP1, BDNF, BRCA, C1orf58, C20orf114, C8B, CA125 (MUC16), CA-19-9, CAPZA1, CAV1, C-Bir, CCSA-2, CCSA-3&4, CD1.1, CD10, CD151, CD174 (Lewis y), CD24, CD2AP, CD37, CD44, CD46, CD53, CD59, CD63, CD66 CEA, CD73, CD81, CD82, CD9, CDA, CDAC11a2, CEA, C-Erbb2, CFL1, CFP, CHMP4B, CLTC, COTL1, CRMP-2, CRP, CRTN, CTNND1, CTSB, CTSZ, CXCL12, CYCS, CYFRA21-1, DcR3, DLL4, DPP4, DR3, EEF1A1, EGFR, EHD1, ENO1, EpCAM, EphA2, ER, ErbB4, EZH2, F11R, F2, F5, FAM125A, FASL, Ferritin, FNBP1L, FOLH1, FRT, GAL3, GAPDH, GDF15, GLB1, GPCR (GPR110), GPR30, GPX3, GRO-1, Gro-alpha, HAP, HBD 1, HBD2, HER 3 (ErbB3), HIST1HIC, HIST1H2AB, HNP1-3, HSP, HSP70, HSP90AB1, HSPA1B, HSPA8, hVEGFR2, iC3b, ICAM, IGSF8, IL 6, IL-1B, IL6R, IL8, IMP3, INSIG-2, ITGB1, ITIH3, JUP, KLK2, L1CAM, LAMN, LDH, LDHA, LDHB, LUM, LYZ, MACC-1, MAPK4, MART-1, MCP-1, M-CSF, MFGE8, MGAM, MGC20553, MIC1, MIF, MIS RII, MMG, MMP26, MMP7, MMP9, MS4A1, MUC1, MUC17, MUC2, MYH2, MYL6B, Ncam, NGAL, NME1, NME2, NNMT, NPGP/NPFF2, OPG, OPG-13, OPN, p53, PA2G4, PABPC1, PABPC4, PACSIN2, PBP, PCBP2, PCSA, PDCD6IP, PDGFRB, PGP9.5, PIM1, PR (B), PRDX2, PRL, PSA, PSCA, PSMA, PSMA1, PSMA2, PSMA4, PSMA6, PSMA7, PSMB1, PSMB2, PSMB3, PSMB4, PSMB5, PSMB6, PSMB8, PSME3, PTEN, PTGFRN, Rab-5b, Reg IV, RPS27A, RUNX2, SCRN1, SDCBP, seprase, Sept-9, SERINC5, SERPINB3, SERPINB3, SH3GL1, SLC3A2, SMPDL3B, SNX9, SPARC, SPB, SPDEF, SPON2, SPR, SRVN, SSX2, SSX4, STAT 3, STEAP, STEAP1, TACSTD1, TCN2, tetraspanin, TF (FL-295), TFF3, TGM2, THBS1, TIMP, TIMP1, TIMP2, TMEM211, TMPRSS2, TNF-alpha, TPA, TPI1, TPS, Trail-R2, Trail-R4, TrKB, TROP2, TROP2, Tsg 101, TUBB, TWEAK, UNC93A, VDAC2, VEGF A, VPS37B, YPSMA-1, YWHAG, YWHAQ, and YWHAZ. In another embodiment, the target biomarker is selected from the group of proteins consisting of 5T4, ACTG1, ADAM10, ADAM15, ALDOA, ANXA2, ANXA6, APOA1, ATP1A1, BASP1, C1orf58, C20orf114, C8B, CAPZA1, CAV1, CD151, CD2AP, CD59, CD9, CD9, CFL1, CFP, CHMP4B, CLTC, COTL1, CTNND1, CTSB, CTSZ, CYCS, DPP4, EEF1A1, EHD1, ENO1, F11R, F2, F5, FAM125A, FNBP1L, FOLH1, GAPDH, GLB1, GPX3, HIST1H1C, HIST1H2AB, HSP90AB1, HSPA1B, HSPA8, IGSF8, ITGB1, ITIH3, JUP, LDHA, LDHB, LUM, LYZ, MFGE8, MGAM, MMP9, MYH2, MYL6B, NME1, NME2, PABPC1, PABPC4, PACSIN2, PCBP2, PDCD6IP, PRDX2, PSA, PSMA, PSMA1, PSMA2, PSMA4, PSMA6, PSMA7, PSMB1, PSMB2, PSMB3, PSMB4, PSMB5, PSMB6, PSMB8, PTGFRN, RPS27A, SDCBP, SERINC5, SH3GL1, SLC3A2, SMPDL3B, SNX9, TACSTD1, TCN2, THBS1, TPI1, TSG101, TUBB, VDAC2, VPS37B, YWHAG, YWHAQ, and YWHAZ. In another embodiment, the target biomarker is selected from the group of proteins consisting of CD9, CD63, CD81, PSMA, PCSA, B7H3 and EpCam. In another embodiment, the target biomarker is selected from the group of proteins consisting of a tetraspanin, CD9, CD63, CD81, CD63, CD9, CD81, CD82, CD37, CD53, Rab-5b, Annexin V, MFG-E8, Muc, GPCR 110, TMEM211 and CD24 In another embodiment, the target biomarker is selected from the group of proteins consisting of A33, AFP, ALIX, ALX4, ANCA, APC, ASCA, AURKA, AURKB, B7H3, BANK1, BCNP1, BDNF, CA-19-9, CCSA-2, CCSA-3&4, CD10, CD24, CD44, CD63, CD66 CEA, CD66e CEA, CD81, CD9, CDA, C-Erb2, CRMP-2, CRP, CRTN, CXCL12, CYFRA21-1, DcR3, DLL4, DR3, EGFR, Epcam, EphA2, FASL, FRT, GAL3, GDF15, GPCR (GPR110), GPR30, GRO-1, HBD 1, HBD2, HNP1-3, IL-1B, IL8, IMP3, L1CAM, LAMN, MACC-1, MGC20553, MCP-1, M-CSF, MIC1, MIF, MMP7, MMP9, MS4A1, MUC1, MUC17, MUC2, Ncam, NGAL, NNMT, OPN, p53, PCSA, PDGFRB, PRL, PSMA, PSME3, Reg IV, SCRN1, Sept-9, SPARC, SPON2, SPR, SRVN, TFF3, TGM2, TIMP-1, TMEM211, TNF-alpha, TPA, TPS, Trail-R2, Trail-R4, TrKB, TROP2, Tsg 101, TWEAK, UNC93A, and VEGFA. In another embodiment, the target biomarker is selected from the group of proteins consisting of CD9, EGFR, NGAL, CD81, STEAP, CD24, A33, CD66E, EPHA2, Ferritin, GPR30, GPR110, MMP9, OPN, p53, TMEM211, TROP2, TGM2, TIMP, EGFR, DR3, UNC93A, MUC17, EpCAM, MUC1, MUC2, TSG101, CD63, B7H3, CD24, and a tetraspanin. The target biomarker can be selected from the group of proteins consisting of 5HT2B, 5T4 (trophoblast), ACO2, ACSL3, ACTN4, ADAM10, AGR2, AGR3, ALCAM, ALDH6A1, ANGPTL4, ANO9, AP1G1, APC, APEX1, APLP2, APP (Amyloid precursor protein), ARCN1, ARHGAP35, ARL3, ASAH1, ASPH (A-10), ATP1B1, ATP1B3, ATP5I, ATP50, ATXN1, B7H3, BACE1, BAI3, BAIAP2, BCA-200, BDNF, BigH3, BIRC2, BLVRB, BRCA, BST2, C1GALT1, C1GALTIC1, C20orf3, CA125, CACYBP, Calmodulin, CAPN1, CAPNS1, CCDC64B, CCL2 (MCP-1), CCT3, CD10 (BD), CD127 (IL7R), CD174, CD24, CD44, CD80, CD86, CDH1, CDH5, CEA, CFL2, CHCHD3, CHMP3, CHRDL2, CIB1, CKAP4, COPA, COX5B, CRABP2, CRIP1, CRISPLD1, CRMP-2, CRTAP, CTLA4, CUL3, CXCR3, CXCR4, CXCR6, CYB5B, CYB5R1, CYCS, CYFRA 21, DBI, DDX23, DDX39B, derlin 1, DHCR7, DHX9, DLD, DLL4, DNAJB1, DPP6, DSTN, eCadherin, EEFID, EEF2, EFTUD2, EIF4A2, EIF4A3, EpCaM, EphA2, ER(1) (ESR1), ER(2) (ESR2), Erb B4, Erbb2, erbb3 (Erb-B3), ERLIN2, ESD, FARSA, FASN, FEN1, FKBP5, FLNB, FOXP3, FUS, Gal3, GCDPF-15, GCNT2, GNA12, GNG5, GNPTG, GPC1, GPC2, GPC3, GPC4, GPC5, GPC6, GPD2, GPER (GPR30), GSPT1, H3F3B, H3F3C, HADH, HAP1, HER3, HIST1HIC, HIST1H2AB, HIST1H3A, HIST1H3C, HIST1H3D, HIST1H3E, HIST1H3F, HIST1H3G, HIST1H3H, HIST1H3I, HIST1H3J, HIST2H2BF, HIST2H3A, HIST2H3C, HIST2H3D, HIST3H3, HMGB1, HNRNPA2B1, HNRNPAB, HNRNPC, HNRNPD, HNRNPH2, HNRNPK, HNRNPL, HNRNPM, HNRNPU, HPS3, HSP-27, HSP70, HSP90B1, HSPA1A, HSPA2, HSPA9, HSPE1, IC3b, IDE, IDH3B, IDO1, IFI30, IL1RL2, IL7, IL8, ILF2, ILF3, IQCG, ISOC2, IST1, ITGA7, ITGB7, junction plakoglobin, Keratin 15, KRAS, KRT19, KRT2, KRT7, KRT8, KRT9, KTN1, LAMP1, LMNA, LMNB1, LNPEP, LRPPRC, LRRC57, Mammaglobin, MAN1A1, MAN1A2, MART1, MATR3, MBD5, MCT2, MDH2, MFGE8, MFGE8, MGP, MMP9, MRP8, MUC1, MUC17, MUC2, MYO5B, MYOF, NAPA, NCAM, NCL, NG2 (CSPG4), Ngal, NHE-3, NME2, NONO, NPM1, NQO1, NT5E (CD73), ODC1, OPG, OPN (SC), OS9, p53, PACSIN3, PAICS, PARK7, PARVA, PC, PCNA, PCSA, PD-1, PD-L1, PD-L2, PGP9.5, PHB, PHB2, PIK3C2B, PKP3, PPL, PR(B), PRDX2, PRKCB, PRKCD, PRKDC, PSA, PSAP, PSMA, PSMB7, PSMD2, PSME3, PYCARD, RAB1A, RAB3D, RAB7A, RAGE, RBL2, RNPEP, RPL14, RPL27, RPL36, RPS25, RPS4X, RPS4Y1, RPS4Y2, RUVBL2, SET, SHMT2, SLAIN1, SLC39A14, SLC9A3R2, SMARCA4, SNRPD2, SNRPD3, SNX33, SNX9, SPEN, SPR, SQSTM1, SSBP1, ST3GAL1, STXBP4, SUB 1, SUCLG2, Survivin, SYT9, TFF3 (secreted), TGOLN2, THBS1, TIMP1, TIMP2, TMED10, TMED4, TMED9, TMEM211, TOM1, TRAF4 (scaffolding), TRAIL-R2, TRAP1, TrkB, Tsg 101, TXNDC16, U2AF2, UEVLD, UFC1, UNC93a, USP14, VASP, VCP, VDAC1, VEGFA, VEGFR1, VEGFR2, VPS37C, WIZ, XRCC5, XRCC6, YB-1, YWHAZ, or any combination thereof. In other embodiments, the target biomarker is selected from the group consisting of p53, p63, p73, mdm-2, procathepsin-D, B23, C23, PLAP, CA125, MUC-1, HER2, NY-ESO-1, SCP1, SSX-1, SSX-2, SSX-4, HSP27, HSP60, HSP90, GRP78, TAG72, HoxA7, HoxB7, EpCAM, ras, mesothelin, survivin, EGFK, MUC-1, or c-myc.

[0364] The target biomarker can be a biomarker indicative of a viral infection. In some cases, the biomarker is a viral protein, such as a human immunodeficiency virus-1 (HIV-1 or HIV) Tat, Gag (including processed products MA, CA (p24), SP1, NC, SP2, P6), Env (including processed products gp120, gp41), Pol (including processed products RT, RNase H, IN, PR), Rev, Nef, Vpr, Vif or Vpu. The target biomarker could be a biomarker differentially expressed in latent HIV infected cells, including without limitation one or more of FGR, MGST1, SLC11A1, NR1H3, SLAMF7, TNFRSF1B, ARNTL2, ARHGAP31, GAB2, TNIP3, CDK14, MXD1, NDST1, CA12, MGLL, SCARF1, FNDC3B, FOSL2, PLD1, SLC1A3, CXCL2, CTTN, IRAK3, CSF2RB, PYGL, CTSH, LILRB1, NAMPT, STEAPIB, DFNA5, TBC1D12, FAM20A, TBC1D9, VDR, SOD2, IL1A, STEAP3, IL1R1, KYNU, CD80, INHBA, MMP19, EREG, DOCK4, WDFY4, SIGLEC9, RHBDF2, NECTIN2, IDO1, NINJ1, IL13RA1, PTPRE, IRAK2, SLC43A3, IL6, KLF4, KIF13A, IER3, TLR2, DUSP5, GPR84, GALNT6, RAB20, TRPM2, ZNF697, FCGR2A, DOK3, DOCK5, ZC3H12C, SLC7A11, ACSL1, SLC7A7, MS4A1, MMP14, NCF1, CLEC4D, SLC43A2, FTH1, PTAFR, FPR2, TRIB1, NRIP3, MCTP1, BASP1, LIMK2, MACC1, TNFAIP2, LRRK2, SULF2, PLXNB2, SRC, SERPINA1, FAM49A, CSF2RA, GK, RUSC2, CCL3, or any combination thereof. See, e.g., Descours B et al., CD32a is a marker of a CD4 T-cell HIV reservoir harbouring replication-competent proviruses, Nature. 2017 Mar. 23; 543(7646):564-567, which reference is incorporated herein in its entirety. For example, such target can be a cell surface transmembrane protein including without limitation AQP9, CA12, GPR91, CD66d, STEAP1B, GJB2, COLEC12, CD80, NIACR1, CD354, CSF2RA, SCARF1, CD300c, CLEC4D, TLR2, CD32a, or any combination thereof.

[0365] One of skill will appreciate that the above biomarker listings are not intended to be mutually exclusive. For example, a single target biomarker can have one or more of the following attributes: cancer/tumor antigen, cell antigen, microvesicle antigen, membrane antigen, and any combination thereof. In some embodiments, the target biomarker will have all of these attributes.

[0366] As noted above, the IDM domain can be constructed to illicit a complement mediated immune response that can induce apoptosis. Such IDM can include but are not limited to C1q, C1r, C1s, C1, C3a, C3b, C3d, C5a, C2, C4, and cytokines. The IDM region may comprise an oligonucleotide sequence including without limitation Toll-Like Receptor (TLR) agonists like CpG sequences which are immunostimulatory and/or polyG sequences which can be anti-proliferative or pro-apoptotic. The moiety can be vaccine like moiety or antigen that stimulates an immune response. In an embodiment, the immune stimulating moiety comprises a superantigen. In some embodiments, the superantigen can be selected from the group consisting of staphylococcal enterotoxins (SEs), a Streptococcus pyogenes exotoxin (SPE), a Staphylococcus aureus toxic shock-syndrome toxin (TSST-1), a streptococcal mitogenic exotoxin (SME), a streptococcal superantigen (SSA), a hepatitis surface antigen, or a combination thereof. Other bacterial antigens that can be used with the invention comprise bacterial antigens such as Freund's complete adjuvant, Freund's incomplete adjuvant, monophosphoryl-lipid A/trehalose dicorynomycolate (Ribi's adjuvant), BCG (Calmette-Guerin Bacillus; Mycobacterium bovis), and Corynebacterium parvum. The immune stimulating moiety can also be a non-specific immunostimulant, such as an adjuvant or other non-specific immunostimulator. Useful adjuvants comprise without limitation aluminium salts, alum, aluminium phosphate, aluminium hydroxide, squalene, oils, MF59, and AS03 (“Adjuvant System 03”). The adjuvant can be selected from the group consisting of Cationic liposome-DNA complex JVRS-100, aluminum hydroxide vaccine adjuvant, aluminum phosphate vaccine adjuvant, aluminum potassium sulfate adjuvant, Alhydrogel, ISCOM(s)™, Freund's Complete Adjuvant, Freund's Incomplete Adjuvant, CpG DNA Vaccine Adjuvant, Cholera toxin, Cholera toxin B subunit, Liposomes, Saponin Vaccine Adjuvant, DDA Adjuvant, Squalene-based Adjuvants, Etx B subunit Adjuvant, IL-12 Vaccine Adjuvant, LTK63 Vaccine Mutant Adjuvant, TiterMax Gold Adjuvant, Ribi Vaccine Adjuvant, Montanide ISA 720 Adjuvant, Corynebacterium-derived P40 Vaccine Adjuvant, MPL™ Adjuvant, AS04, AS02, Lipopolysaccharide Vaccine Adjuvant, Muramyl Dipeptide Adjuvant, CRL1005, Killed Corynebacterium parvum Vaccine Adjuvant, Montanide ISA 51, Bordetella pertussis component Vaccine Adjuvant, Cationic Liposomal Vaccine Adjuvant, Adamantylamide Dipeptide Vaccine Adjuvant, Arlacel A, VSA-3 Adjuvant, Aluminum vaccine adjuvant, Polygen Vaccine Adjuvant, Adjumer™, Algal Glucan, Bay R1005, Theramide®, Stearyl Tyrosine, Specol, Algammulin, Avridine®, Calcium Phosphate Gel, CTA1-DD gene fusion protein, DOC/Alum Complex, Gamma Inulin, Gerbu Adjuvant, GM-CSF, GMDP, Recombinant hIFN-gamma/Interferon-g, Interleukin-1f3, Interleukin-2, Interleukin-7, Sclavo peptide, Rehydragel LV, Rehydragel HPA, Loxoribine, MF59, MTP-PE Liposomes, Murametide, Murapalmitine, D-Murapalmitine, NAGO, Non-Ionic Surfactant Vesicles, PMMA, Protein Cochleates, QS-21, SPT (Antigen Formulation), nanoemulsion vaccine adjuvant, AS03, Quil-A vaccine adjuvant, RC529 vaccine adjuvant, LTR192G Vaccine Adjuvant, E. coli heat-labile toxin, LT, amorphous aluminum hydroxyphosphate sulfate adjuvant, Calcium phosphate vaccine adjuvant, Montanide Incomplete Seppic Adjuvant, Imiquimod, Resiquimod, AF03, Flagellin, Poly(I:C), ISCOMATRIX®, Abisco-100 vaccine adjuvant, Albumin-heparin microparticles vaccine adjuvant, AS-2 vaccine adjuvant, B7-2 vaccine adjuvant, DHEA vaccine adjuvant, Immunoliposomes Containing Antibodies to Costimulatory Molecules, SAF-1, Sendai Proteoliposomes, Sendai-containing Lipid Matrices, Threonyl muramyl dipeptide (TMDP), Ty Particles vaccine adjuvant, Bupivacaine vaccine adjuvant, DL-PGL (Polyester poly (DL-lactide-co-glycolide)) vaccine adjuvant, IL-15 vaccine adjuvant, LTK72 vaccine adjuvant, MPL-SE vaccine adjuvant, non-toxic mutant E 112K of Cholera Toxin mCT-E112K, and Matrix-S. Additional adjuvants that can be used with the multipartite constructs of the invention can be identified using the Vaxjo database. See Sayers S, Ulysse G, Xiang Z, and He Y. Vaxjo: a web-based vaccine adjuvant database and its application for analysis of vaccine adjuvants and their uses in vaccine development. Journal of Biomedicine and Biotechnology. 2012; 2012:831486. Epub 2012 Mar. 13. PMID: 22505817; www.violinet.org/vaxjo/. Other useful non-specific immunostimulators comprise histamine, interferon, transfer factor, tuftsin, interleukin-1, female sex hormones, prolactin, growth hormone vitamin D, deoxycholic acid (DCA), tetrachlorodecaoxide (TCDO), and imiquimod or resiquimod, which are drugs that activate immune cells through the toll-like receptor 7. A multipartite construct can be created that comprises more than one immunomodulating moiety, e.g., using segments that span CpG sequences which are immunostimulatory with complement directed segments that can stimulate apoptosis.

[0367] Anti-C1q Oligonucleotides

[0368] The complement system is a part of the immune system that enhances (complements) the ability of antibodies and phagocytic cells to clear microbes and damaged cells from an organism. It is part of the innate immune system, which is not adaptable and does not change over the course of an individual's lifetime. However, it can be recruited and brought into action by the adaptive immune system. Complement activation or fixation can stimulate phagocytes to clear foreign and damaged material, induce inflammation to attract additional phagocytes, and activate the cell-killing membrane attack complex. The “classical” complement pathway is triggered by activation of the C1-complex, which occurs when C1q binds to IgM or IgG complexed with antigens. The C1-complex is composed of 1 molecule of C1q, 2 molecules of C1r and 2 molecules of C1s, or C1qr₂s₂. Such immunoglobulin-mediated binding of the complement uses the ability of the immunoglobulin system to detect and bind to non-self antigens. C1q can also directly identify various structures and ligands on microbial surfaces and apoptotic cells, and binds additional self proteins including C-reactive protein (CRP), HIV-1, phosphatidylserine (PS), HTLV-1, and others. Because the complement system has the potential to be extremely damaging to host tissues, its activation in host organisms is tightly regulated. The classical pathway is inhibited by C1-inhibitor, which binds to C1 to prevent its activation. C1q also performs a number of non-complement functions, including without limitation such diverse functions as clearance of bacterial pathogens, induction of angiogenesis during wound healing, tolerance induction, anti-inflammatory responses and inhibiting T cell response. As a result of these diverse functions, complement and C1q play a role in diverse diseases and disorders, including without limitation autoimmune settings, pregnancy disorders, pathogen infection, aggregated proteins leading to neurodegenerative diseases, inflammation, and cancer. Deficiencies have been associated with autoimmune disease (e.g., systemic lupus erythematosus), pathogen infection and cancer. However, the tumor microenvironment may also hijack C1q to promote cell adhesion, migration and proliferation. See, e.g., Kouser et al., Emerging and Novel Functions of Complement Protein C1q, Front Immunol. 2015; 6: 317. Published online 2015 Jun. 29; Son et al., Fundamental role of C1q in autoimmunity and inflammation, Immunol Res. 2015 December; 63(1-3): 101-106; Ghebrehiwet et al., The C1q Family of Proteins: Insights into the Emerging Non-Traditional Functions, Front Immunol. 2012; 3: 52; Nayak et al., Complement and non-complement activating functions of C1q: a prototypical innate immune molecule. Innate Immun. 2012 April; 18(2):350-63.

[0369] C1q is a Ca2+ dependent hexameric complex comprised of 18 polypeptide chains, 6 of three different subunits (C1q A chain (P02745), C1q B chain (P02746), and C1q C chain (P02747)), that binds C1r and C1s to form the C1 complex, the first component in classical pathway of complement. C1q globular heads form a pattern recognition complex that binds to various targets, including without limitation clustered antigen-antibody Fc immune complexes (e.g., IgG, IgM), C-reactive protein (CRP), abnormal proteins (e.g., prion and beta-amyloid), apoptotic and secondary necrotic cells, phosphatidylserine and the surface of a subpopulation of microparticles in human plasma. Recognition of IgG and IgM on a cell surface can induce a complement cascade and lead to apoptosis. See, e.g., Kishore et al., C1q and tumor necrosis factor superfamily: modularity and versatility, TRENDS in Immunology 25 (2004) 551-561; Nayak et al., Complement and non-complement activating functions of C1q: a prototypical innate immune molecule, Innate Immunity 18 (2012) 350-363. Aptamer-biotin-C1q protein conjugates have been used to induce complement mediated cell death. See, e.g., Bruno, Aptamer-biotin-streptavidin-C1q complexes can trigger the classical complement pathway to kill cancer cells, In Vitro Cell Dev Biol—Animal (2010) 46:107-113.

[0370] C1q globular heads has been shown to bind DNA and recognize apoptotic cells. See, e.g., Paidassi et al., The lectin-like activity of human C1q and its implication in DNA and apoptotic cell recognition, FEBS Letters 582 (2008) 3111-3116; Navratil et al., The globular heads of C1q specifically recognize surface blebs of apoptotic vascular endothelial cells, J Immunol 166 (2001) 3231-3239. DNA binds C1qA and activates the complement cascade without interfering with the ability of C1q to bind antibody Fc regions. See, e.g., Jiang et al., DNA binds and activates complement via residues 14-26 of the human C1q A chain, J Biol Chem 267 (1992) 25597-25601; Garlatti, et al. Cutting edge: C1q binds deoxyribose and heparan sulfate through neighboring sites of its recognition domain, J Immunol 185 (2010) 808-812.

[0371] C1q protein quantification has been used for disease monitoring and monoclonal antibody (mAb) production. For example, C1q mAb is used to coat ELISA plates to capture and quantitate immune complexes in clinical samples. Various companies sell diagnostic kits for immune complex detection and quantitation which are based on the ability of C1q to bind well to immune complexes, but to not bind significantly to monomeric immunoglobulins. Because the DNA recognition domain of C1q does not overlap with the Fc-recognition domain, a DNA based ELISA may further allow a more accurate quantitation of immune complex detection.

[0372] Int'l Patent Application PCT/US16/40157 presents identification of an anti-C1q oligonucleotide aptamers and describes various uses thereof. The aptamers to C1q were identified via oligonucleotide probe analysis of plasma microvesicles followed by identification of oligonucleotide probe targets using gel electrophoresis and mass spectrometry analysis.

[0373] Anti-C1q aptamers can be used for multiple purposes. As described above, the invention provides a multipartite construct having a disease specific target oligonucleotide or antibody (Ab) that can recognize a target of interest and an immunomodulatory region. In an embodiment of the invention, the immunomodulatory region comprises the C1q aptamer. Such construct can act as an immunotherapeutic agent for targeted cell killing via recruitment of complement proteins and the downstream membrane attack complex (MAC). By linking the C1q aptamer segment to another segment that specifically binds to a target of interest (e.g., a biomarker present on a cell or microvesicle of interest), the construct can bring C1q into proximity of a target. See FIG. 8C, which illustrates a construct 831 having a segment that recognizes a Marker of Interest 832 on a Membrane 833, and another segment that attracts the Complement system 834. Such binding can cause a complement cascade and induce complement mediated cell killing. This approach can be applied in multiple setting, e.g., to recognize cancer cells, gram negative bacteria, and/or viral and/or parasitic infections. For example, an anti-CD20 specific oligonucleotide can be linked with an anti-C1q specific oligonucleotide. The linkage to create the oligonucleotide-oligonucleotide construct can include but is not limited to direct synthesis with a spacer between the two oligonucleotide recognition sites. Different biomarkers can be used as the target of interest, thereby directing the complement cascade to the various targets as desired. The spacer type and size can be configured based on steric hindrance between the target protein and the C1q protein/MAC complex. As noted above, the target specific oligonucleotides/Abs can be chosen to specifically recognize various targets of interest, including but not limited to cancer cells, circulating tumor cells, immune cells (e.g., B-cells, T-cells, neutrophils, macrophage, dendritic cells) microvesicles, bacteria, viruses or parasites. In addition to C1q, the target of the complement specific oligonucleotide segment can include without limitation C1r, C1s, C1, C3a, C3b, C3d, C5a, C2, C4, and cytokines.

[0374] The multipartite construct of the invention can comprise a linear molecule, a circular molecule, and/or adopt various secondary structures. Such structures can be estimated using available software programs such as Vienna or mfold (available at mfold.rit.albany.edu). Such structural estimates can also be used to design derivatives of the sequences, e.g., by substituting, adding or deleting nucleotides in order to increase or decrease melting temperature, facilitate additions of non-natural nucleotide analogs, direct chemical modification, and/or manipulate structure or other parameters.

[0375] The invention further provides a method of molecular profiling of patient specific autoantigens by identifying autoantigens bound to complement 1 (C1) in plasma. The invention also provides immunoassays that detect levels of C1q protein. Such assays can be any applicable immunoassay format using the anti-C1q oligonucleotide of the invention, including without limitation an oligonucleotide based ELISA, Western analysis, flow cytometry, or affinity isolation. The immunoassay can be applied to various settings, including without limitation: 1) monitor cancer patient specific immune responses before, during and after administration of immunosuppressing drugs for optimal treatment with chemotherapeutic agents; 2) monitor immune responses in patients with autoimmune disorders in response to administration of immunosuppressing drugs such as TNF blockers; 3) detect levels of C1q and/or anti-C1q autoantibodies in patients with systemic lupus erythematosus (SLE); 4) quantitatative C1q assay for mAb biosimilar production to satisfy the EMA biosimilar antibody guidance measures; 5) a WHO secondary test as a companion test to mAb based ELISAs; 6) as a marker for apoptosis/secondary necrosis; and 7) a C1q test for research purposes.

[0376] The anti-C1q oligonucleotides of the invention can undergo various modifications such as described herein or known in the art. For example, modifications can be made to alter desired characteristics, including without limitation in vivo stability, specificity, affinity, avidity or nuclease susceptibility. Alterations to the half life may improve stability in vivo or may reduce stability to limit in vivo toxicity. Such alterations can include mutations, truncations or extensions. The 5′ and/or 3′ ends of the multipartite oligonucleotide constructs can be protected or deprotected to modulate stability as well. Modifications to improve in vivo stability, specificity, affinity, avidity or nuclease susceptibility or alter the half life to influence in vivo toxicity may be at the 5′ or 3′ end and include but are not limited to the following: locked nucleic acid (LNA) incorporation, unlocked nucleic acid (UNA) incorporation, phosphorothioate backbone instead of phosphodiester backbone, amino modifiers (i.e. C6-dT), dye conjugates (Cy dues, Fluorophores, etc), Biotinylation, PEG linkers, Click chemistry linkers, dideoxynucleotide end blockers, inverted end bases, cholesterol TEG or other lipid based labels. See, e.g., Campbell, M A and Wengel, J (2011). Locked vs. unlocked nucleic acids (LNA vs. UNA): contrasting structures work towards common therapeutic goals. Chem Soc Rev 40: 5680-5689; and Wahlestedt, C, Salmi, P, Good, L, Kela, J, Johnsson, T, Hokfelt, T et al. (2000). Potent and nontoxic antisense oligonucleotides containing locked nucleic acids. Proc Natl Acad Sci USA 97: 5633-5638; which publications are incorporated by reference herein in their entirety.

[0377] Oligonucleotide Probes to HIV Infected Cells

[0378] CD4+ T cells are the major targets cells for human immunodeficiency virus type 1 (HIV-1 or HIV) that can establish a state of latent infection by integrating into the host DNA. A latent viral infection is a type of persistent viral infection which is distinguished from a chronic viral infection. Latency is the phase in certain viruses' life cycles in which, after initial infection, proliferation of virus particles ceases. However, the viral genome is not fully eradicated. The result of this is that the virus can reactivate and begin producing large amounts of viral progeny without the host being infected by new outside virus, denoted as the lytic part of the viral life cycle, and stays within the host indefinitely. The presence of replication-competent HIV in resting CD4-positive T cells allows this virus to persist for years without evolving despite prolonged exposure to antiretroviral drugs. Thus, latency in HIV presents the major hurdle for curing HIV infections. Therefore, reactivation followed by elimination of the virus is the goal of several approaches. See, e.g., Richman, Finding latent needles in a haystack, Nature 543, 499-500 (23 Mar. 2017) doi: 10.1038/nature21899; Darcis et al., HIV Latency: Should We Shock or Lock? Trends Immunol. 2017 March; 38(3):217-228. doi: 10.1016/j.it.2016.12.003; Schwartz C et al., On the way to find a cure: Purging latent HIV-1 reservoirs. Biochem Pharmacol. 2017 Jul. 4. pii: S0006-2952(17)30478-1. doi: 10.1016/j.bcp.2017.07.001; which references are incorporated herein by reference in its entirety. We identified oligonucleotide probes according to the compositions and methods of the invention to identify such probes that differentiate between CD4+ T cells infected with latent HIV and cells infected with active HIV and/or uninfected cells. See Examples 10-17. Such oligonucleotide probes may be referred to herein generally as HIV related oligonucleotide probes.

[0379] The invention envisions use of mixtures of HIV related oligonucleotides. For example, one or more oligonucleotide to latent cells may activate the virus in such cells while one or more oligonucleotide to active cells is also provided in order to kill such activated cells.

[0380] In an aspect, the invention provides an oligonucleotide comprising a sequence selected from any one of Tables 20-23. The oligonucleotide may have a sequence comprising a variable region according to any row in any one of Tables 20-23 having a 5′ region with sequence 5′-CTAGCATGACTGCAGTACGT (SEQ ID NO. 3) and a 3′ region with sequence 5′-CTGTCTCTTATACACATCTGACGCTGCCGACGA (SEQ ID NO. 4). The oligonucleotide may comprise a sequence according to a row in Table 24. The oligonucleotide can have a sequence comprising a variable region according to any one of SEQ ID NOs. 2922-21424. The oligonucleotide may comprise a sequence according to any one of SEQ ID NOs. 22832-22843. The sequence can be surrounded by complementary flanking regions. The flanking regions can be any useful length, e.g., at least 1, 2, 3, 4, 5, 6, 7, 8, 9 or at least 10 nucleotides in length. The oligonucleotide sequence may also comprise additions and deletions. For example, at least 1, 2, 3, 4, 5, 6, 7, 8, 9 or at least 10 nucleotides may be inserted between the variable region and the flanking regions as desired. Alternately, nucleotides may be deleted between the variable region and the flanking regions as desired. Substitutions, additions and deletions in the sequence can be chosen such that the oligonucleotide retains or improves upon desired such as stability or target recognition.

[0381] In some embodiments, the oligonucleotide is capable of binding to HIV infected cells. In some embodiments, the oligonucleotide is capable of binding to T cells. The T cells can be infected with HIV. The HIV can be latent or active.

[0382] The invention further provides an oligonucleotide comprising a nucleic acid sequence or a portion thereof that is at least 50, 55, 60, 65, 70, 75, 80, 85, 86, 86, 88, 89, 90, 95, 96, 97, 98, 99 or 100 percent homologous to an oligonucleotide sequence described above.

[0383] In another aspect, the invention provides a plurality of oligonucleotides comprising at least 1, 2, 3, 4, 5, 6, 7, 8, 9, 10, 11, 12, 13, 14, 15, 16, 17, 18, 19, 20, 25, 30, 40, 45, 50, 55, 60, 65, 70, 75, 80, 85, 90, 95, 100, 110, 120, 130, 140, 150, 160, 170, 180, 190, 200, 300, 400, 500, 600, 700, 800, 900, 1000, 2000, 3000, 4000, 5000, 6000, 7000, 8000, 9000, or at least 10000 different oligonucleotide sequences described above.

[0384] The oligonucleotide or the plurality of oligonucleotides provided by the invention may comprise a DNA, RNA, 2′-O-methyl or phosphorothioate backbone, or any combination thereof. The oligonucleotide or the plurality of oligonucleotides may comprise at least one of DNA, RNA, PNA, LNA, UNA, and any combination thereof.

[0385] In some embodiments, the oligonucleotide or the plurality of oligonucleotides comprises at least one functional modification selected from the group consisting of biotinylation, a non-naturally occurring nucleotide, a deletion, an insertion, an addition, and a chemical modification. The chemical modification can be chosen to modulate desired properties such as stability, capture, detection, or binding efficiency. In some embodiments, the chemical modification comprises at least one of C18, polyethylene glycol (PEG), PEG4, PEG6, PEG8, and PEG12. The oligonucleotide or plurality of oligonucleotides can be labeled. The oligonucleotide or plurality of oligonucleotides can be attached to a nanoparticle, liposome, gold, magnetic label, fluorescent label, light emitting particle, or radioactive label. The liposome or particle can incorporate desired entities such as chemotherapeutic agents or detectable labels. Other useful modifications are disclosed herein.

[0386] In an aspect, the invention provides an isolated oligonucleotide or plurality of oligonucleotides having a sequence as described above. In a related aspect, the invention provides a composition comprising such isolated oligonucleotide or plurality of oligonucleotides.

[0387] The isolated oligonucleotide or plurality of oligonucleotides can by capable of binding to HIV infected cells. The isolated oligonucleotide or plurality of oligonucleotides can by capable of binding to T cells. The T cells can be infected with HIV. The HIV can be latent or active. The isolated oligonucleotide or plurality of oligonucleotides can be capable of modulating cell proliferation. In some embodiments, the isolated oligonucleotide or plurality of oligonucleotides is capable of inducing apoptosis. The cell proliferation can be neoplastic or dysplastic growth. The binding of the isolated oligonucleotide or plurality of oligonucleotides to a cell surface protein can mediate cellular internalization of the oligonucleotide or plurality of oligonucleotides.

[0388] In an aspect, the invention provides a method comprising synthesizing the at least one oligonucleotide or the plurality of oligonucleotides provided above. Techniques for synthesizing oligonucleotides are disclosed herein or are known in the art.

[0389] In another aspect, the invention provides a method comprising contacting a biological sample with the at least one oligonucleotide, the plurality of oligonucleotides, or composition as described above. In come embodiments, the method comprises detecting a presence or level of a cellular protein or complex thereof in the biological sample that is bound by the at least one oligonucleotide or at least one member of the plurality of oligonucleotides. Relatedly, the method may further comprise detecting a presence or level of a cell population in the biological sample that is bound by the at least one oligonucleotide or at least one member of the plurality of oligonucleotides. The cell population can comprise diseased cells, wherein optionally the disease is a viral infection, wherein optionally the viral infection is HIV infection. In some embodiments, the at least one oligonucleotide or the plurality of oligonucleotides has a region corresponding to at least one of SEQ ID NOs 2922-2965 or 3007-21289 and the viral infection is a latent infection. In some embodiments, the at least one oligonucleotide or the plurality of oligonucleotides has a region corresponding to at least one of SEQ ID NOs 2966-3006 or 21290-22831 and the viral infection is an active infection. One of skill will appreciate that the nucleotides can be modified in sequence or via chemical or other desired modifications that still retain or perhaps enhance the detecting. Such modifications are envisioned within the scope of the invention.

[0390] The detecting step of the method may comprise detecting the at least one oligonucleotide or at least one member of the plurality of oligonucleotides. The presence or level of oligonucleotide serves as a proxy for the level of oligonucleotide's target. The oligonucleotides can be detecting using any desired technique such as described herein or known in the art, including without limitation at least one of sequencing, amplification, hybridization, gel electrophoresis, chromatography, and any combination thereof. Any useful sequencing method can be employed, including without limitation at least one of next generation sequencing, dye termination sequencing, pyrosequencing, and any combination thereof. In some embodiments, the detecting comprises transmission electron microscopy (TEM) of immunogold labeled oligonucleotides. In some embodiments, the detecting comprises confocal microscopy of fluor labeled oligonucleotides.

[0391] The detecting step of the method may comprise detecting the protein or cell using techniques described herein or known in the art for detecting proteins, including without limitation at least one of an immunoassay, enzyme immunoassay (EIA), enzyme-linked immunosorbent assay (ELISA), enzyme-linked oligonucleotide assay (ELONA), affinity isolation, immunoprecipitation, Western blot, gel electrophoresis, microscopy or flow cytometry.

[0392] Any desired biological sample can be contacted with the oligonucleotide or plurality of oligonucleotides according to the invention. In various embodiments, the biological sample comprises a bodily fluid, tissue sample or cell culture. Any desired tissue or cell culture sample can be contacted. For example, the cell culture may comprise T cells. The cell culture may comprise HIV infected cells, e.g., cells harboring latent or active infection. Similarly, any appropriate bodily fluid can be contacted, such as those disclosed herein. In certain preferred embodiments, the bodily fluid comprises whole blood or a derivative or fraction thereof, such as sera or plasma. In some embodiments, the bodily fluid comprises semen, vaginal secretions, cervical secretions, rectal secretions, breast milk, saliva, or any combination thereof. The bodily fluid may comprise T cells and/or HIV infected cells, e.g., cells harboring latent or active infection.

[0393] As desired, the method of detecting the presence or level of the at least one oligonucleotide, the plurality of oligonucleotides, or composition bound to a target can be used to characterize a phenotype. The phenotype can be any appropriate phenotype, including without limitation a disease or disorder. In such cases, the characterizing may include providing, or assisting in providing, at least one of diagnostic, prognostic and theranostic information for the disease or disorder. Characterizing the phenotype may comprise comparing the presence or level to a reference. Any appropriate reference level can be used. For example, the reference can be the presence or level determined in a sample from at least one individual without the phenotype or from at least one individual with a different phenotype. As a further example, if the phenotype is a disease or disorder, the reference level may be the presence or level determined in a sample from at least one individual without the disease or disorder, or with a different state of the disease or disorder (e.g., latent, active, in remission, different stage or grade, different prognosis, metastatic versus local, etc).

[0394] As noted, the sample can be from a subject suspected of having or being predisposed to a disease or disorder. The disease or disorder can be any disease or disorder that can be assessed by the subject method. For example, the disease or disorder may be a cancer, a premalignant condition, an inflammatory disease, an immune disease, an autoimmune disease or disorder, a cardiovascular disease or disorder, neurological disease or disorder, infectious disease or pain. In certain embodiments, the disease or disorder is a viral infection, e.g., an HIV1 infection. The infection may be active or latent. In some embodiments, the at least one oligonucleotide or the plurality of oligonucleotides has a region corresponding to at least one of SEQ ID NOs 2922-2965 or 3007-21289 and elevated presence or level as compared to a reference indicates that the viral infection is a latent infection. In some embodiments, the at least one oligonucleotide or the plurality of oligonucleotides has a region corresponding to at least one of SEQ ID NOs 2966-3006 or 21290-22831 and elevated presence or level as compared to a reference indicates that the viral infection is an active infection. One of skill will appreciate that the nucleotides can be modified in sequence or via chemical or other desired modifications that still retain or perhaps enhance the characterizing. Such modifications are envisioned within the scope of the invention.

[0395] In preferred embodiments, such characterizing is carried out in vitro.

[0396] As further described herein, the invention provides a kit comprising a reagent for carrying out the method. Similarly, the invention provides for the use of a reagent for carrying out the method. The reagent can be any useful reagent for carrying out the method. For example, the reagent can be the at least one oligonucleotide or the plurality of oligonucleotides, one or more primer for amplification or sequencing of such oligonucleotides, at least one binding agent to at least one protein, a binding buffer with or without MgCl₂, a sample processing reagent, a cell isolation reagent, a cell isolation reagent, a detection reagent, a secondary detection reagent, a wash buffer, an elution buffer, a solid support, and any combination thereof.

[0397] In an aspect, the invention provides a method of imaging a cell or tissue, comprising contacting the cell or tissue with at least one oligonucleotide or plurality of oligonucleotides as described in this section above and detecting the oligonucleotides in contact with at least one cell or tissue. In some embodiments, the oligonucleotides are labeled, e.g., in order to facilitate detection or medical imaging. The oligonucleotides can be attached to a nanoparticle, liposome, gold, magnetic label, fluorescent label, light emitting particle, radioactive label, or other useful label such as disclosed herein or known in the art. The oligonucleotides can be administered to a subject prior to the detecting. The cell or tissue can comprise T cells. In some embodiments, the cell or tissue can have a viral infection, e.g., an HIV1 infection. The infection may be active or latent. In some embodiments, the at least one oligonucleotide or the plurality of oligonucleotides has a region corresponding to at least one of SEQ ID NOs 2922-2965 or 3007-21289 and the viral infection is a latent infection. In some embodiments, the at least one oligonucleotide or the plurality of oligonucleotides has a region corresponding to at least one of SEQ ID NOs 2966-3006 or 21290-22831 and the viral infection is an active infection. One of skill will appreciate that the nucleotides can be modified in sequence or via chemical or other desired modifications that still retain or perhaps enhance the imaging. Such modifications are envisioned within the scope of the invention.

[0398] In preferred embodiments, such imaging is carried out in vitro.

[0399] As further described herein, the invention provides a kit comprising a reagent for carrying out the method of imaging. Similarly, the invention provides for the use of a reagent for carrying out the method. The reagent can be any useful reagent for carrying out the method. For example, the reagent can be the at least one oligonucleotide or the plurality of oligonucleotides, one or more primer for amplification or sequencing of such oligonucleotides, at least one binding agent to at least one protein, a binding buffer with or without MgCl₂, a sample processing reagent, a cell isolation reagent, a cell isolation reagent, a detection reagent, a secondary detection reagent, a wash buffer, an elution buffer, a solid support, and any combination thereof.

[0400] In an aspect, the invention provides a pharmaceutical composition comprising a therapeutically effective amount of the oligonucleotide or plurality of oligonucleotides described above, or a salt thereof, and a pharmaceutically acceptable carrier, diluent, or both. In some embodiments, the oligonucleotides are attached to any useful drug or other chemical compound, e.g., a toxin, cell killing or therapeutic agent. In some embodiments, the oligonucleotides are attached to a liposome or nanoparticle. The liposome or nanoparticle may comprise any useful drug or other chemical compound, e.g., a toxin, cell killing or therapeutic agent. In such embodiments, the at least one oligonucleotide or the plurality of oligonucleotides can be used for targeted delivery of the drug or other chemical compound, liposome or nanoparticle to a desired target cell or tissue.

[0401] In a related aspect, the invention provides a method of treating or ameliorating a disease or disorder in a subject in need thereof, comprising administering such pharmaceutical composition to the subject. In another related aspect, the invention provides a method of inducing cytotoxicity in a subject, comprising administering such pharmaceutical to the subject. The pharmaceutical composition can be administered in any useful format. In various embodiments, the administering comprises at least one of intradermal, intramuscular, intraperitoneal, intravenous, subcutaneous, intranasal, epidural, oral, sublingual, intracerebral, intravaginal, transdermal, rectal, by inhalation, topical administration, or any combination thereof. The carrier or diluent can be any useful carrier or diluent, as described herein or known in the art. As desired, the pharmaceutical composition can be administered in combination with additional known chemotherapeutic agents such as described herein or known in the art, e.g., cyclophosphamide, etoposide, doxorubicin, methotrexate, vincristine, procabazine, prednisone, dexamethasone, tamoxifen citrate, carboplatin, cisplatin, oxaliplatin, 5-fluorouracil, camptothecin, zoledronic acid, Ibandronate or mytomicin.

[0402] As further described herein, the invention comprises multipartite constructs. Such constructs may comprise an HIV related oligonucleotide sequence. In some embodiments, the multipartite construct has a segment is capable of binding to T cells. In some embodiments, the multipartite construct has a segment is capable of binding to HIV infected cells. For example, the segment may be selected from any one of SEQ ID NOs 2922-22831. The HIV related oligonucleotide sequence can be chosen to preferentially bind cells having latent or active infection. For example, the segment may be selected from any one of SEQ ID NOs 2922-2965 or 3007-21289 to preferentially bind cells having latent infection. Similarly, the segment may be selected from any one of SEQ ID NOs 2966-3006 or 21290-22831 to preferentially bind cells having active infection. Also as further described herein, such multipartite constructs can be used for treating or ameliorating a disease or disorder. The multipartite constructs can also be used for inducing killing of a cell, wherein optionally the cell comprises a disease or disorder. In embodiments, the disease or disorder comprises a viral infection, HIV, latent HIV, active HIV, or any combination thereof. In some embodiments, the at least one oligonucleotide or the plurality of oligonucleotides has a region corresponding to at least one of SEQ ID NOs 2922-2965 or 3007-21289 and the viral infection is a latent infection. In some embodiments, the at least one oligonucleotide or the plurality of oligonucleotides has a region corresponding to at least one of SEQ ID NOs 2966-3006 or 21290-22831 and the viral infection is an active infection. One of skill will appreciate that the nucleotides can be modified in sequence or via chemical or other desired modifications that still retain or perhaps enhance the effect or efficacy of the constructs. Such modifications are envisioned within the scope of the invention.

[0403] As further described herein, the HIV related oligonucleotide probes and compositions thereof can be used for multiple purposes, including without limitation to detection, characterization, imaging, cell targeting, and in therapeutic applications. Any appropriate variable region from SEQ ID NOs 2922-22831 can be chosen in for such purposes. In addition, the oligonucleotide probes can be chosen to specifically target cells harboring latent HIV (e.g., SEQ ID NOs 2922-2965 or 3007-21289) or active HIV (e.g., SEQ ID NOs 2966-3006 or 21290-22831). Combinations of such sequences can be chosen to target cell populations harboring both latent and active infection. One of skill will appreciate that the nucleotides can be modified in sequence or via chemical or other desired modifications that still retain or perhaps enhance the effect or efficacy of the constructs. Such modifications are envisioned within the scope of the invention.

[0404] In embodiments of the invention wherein it is desirable to target cells harboring latent HIV infection, the oligonucleotide probes may comprise a region corresponding to one or more sequence listed in Table 20 or Table 22. In some embodiments, the region corresponds to SEQ ID NO 2922. In some embodiments, the region corresponds to SEQ ID NO 2923. In some embodiments, the region corresponds to SEQ ID NO 2924. In some embodiments, the region corresponds to SEQ ID NO 2925. In some embodiments, the region corresponds to SEQ ID NO 2926. In some embodiments, the region corresponds to SEQ ID NO 2927. In some embodiments, the region corresponds to SEQ ID NO 2928. In some embodiments, the region corresponds to SEQ ID NO 2929. In some embodiments, the region corresponds to SEQ ID NO 2930. In some embodiments, the region corresponds to SEQ ID NO 2931. In some embodiments, the region corresponds to SEQ ID NO 2932. In some embodiments, the region corresponds to SEQ ID NO 2933. In some embodiments, the region corresponds to SEQ ID NO 2934. In some embodiments, the region corresponds to SEQ ID NO 2935. In some embodiments, the region corresponds to SEQ ID NO 2936. In some embodiments, the region corresponds to SEQ ID NO 2937. In some embodiments, the region corresponds to SEQ ID NO 2938. In some embodiments, the region corresponds to SEQ ID NO 2939. In some embodiments, the region corresponds to SEQ ID NO 2940. In some embodiments, the region corresponds to SEQ ID NO 2941. In some embodiments, the region corresponds to SEQ ID NO 2942. In some embodiments, the region corresponds to SEQ ID NO 2943. In some embodiments, the region corresponds to SEQ ID NO 2944. In some embodiments, the region corresponds to SEQ ID NO 2945. In some embodiments, the region corresponds to SEQ ID NO 2946. In some embodiments, the region corresponds to SEQ ID NO 2947. In some embodiments, the region corresponds to SEQ ID NO 2948. In some embodiments, the region corresponds to SEQ ID NO 2949. In some embodiments, the region corresponds to SEQ ID NO 2950. In some embodiments, the region corresponds to SEQ ID NO 2951. In some embodiments, the region corresponds to SEQ ID NO 2952. In some embodiments, the region corresponds to SEQ ID NO 2953. In some embodiments, the region corresponds to SEQ ID NO 2954. In some embodiments, the region corresponds to SEQ ID NO 2955. In some embodiments, the region corresponds to SEQ ID NO 2956. In some embodiments, the region corresponds to SEQ ID NO 2957. In some embodiments, the region corresponds to SEQ ID NO 2958. In some embodiments, the region corresponds to SEQ ID NO 2959. In some embodiments, the region corresponds to SEQ ID NO 2960. In some embodiments, the region corresponds to SEQ ID NO 2961. In some embodiments, the region corresponds to SEQ ID NO 2962. In some embodiments, the region corresponds to SEQ ID NO 2963. In some embodiments, the region corresponds to SEQ ID NO 2964. In some embodiments, the region corresponds to SEQ ID NO 2965. In some embodiments, the region corresponds to SEQ ID NO 2964. In some embodiments, the region corresponds to SEQ ID NO 3007. In some embodiments, the region corresponds to SEQ ID NO 3008. In some embodiments, the region corresponds to SEQ ID NO 3009. In some embodiments, the region corresponds to SEQ ID NO 3010. In some embodiments, the region corresponds to SEQ ID NO 3011. In some embodiments, the region corresponds to SEQ ID NO 3012. In some embodiments, the region corresponds to SEQ ID NO 3013. In some embodiments, the region corresponds to SEQ ID NO 3014. In some embodiments, the region corresponds to SEQ ID NO 3015. In some embodiments, the region corresponds to SEQ ID NO 3016. In some embodiments, the region corresponds to SEQ ID NO 3017. In some embodiments, the region corresponds to SEQ ID NO 3018. In some embodiments, the region corresponds to SEQ ID NO 3019. In some embodiments, the region corresponds to SEQ ID NO 3020. In some embodiments, the region corresponds to SEQ ID NO 3021. In some embodiments, the region corresponds to SEQ ID NO 3022. In some embodiments, the region corresponds to SEQ ID NO 3023. In some embodiments, the region corresponds to SEQ ID NO 3024. In some embodiments, the region corresponds to SEQ ID NO 3025. In some embodiments, the region corresponds to SEQ ID NO 3026. In some embodiments, the region corresponds to SEQ ID NO 3027. In some embodiments, the region corresponds to SEQ ID NO 3028. In some embodiments, the region corresponds to SEQ ID NO 3029. In some embodiments, the region corresponds to SEQ ID NO 3030. In some embodiments, the region corresponds to SEQ ID NO 3031. In some embodiments, the region corresponds to SEQ ID NO 3032. In some embodiments, the region corresponds to SEQ ID NO 3033. In some embodiments, the region corresponds to SEQ ID NO 3034. In some embodiments, the region corresponds to SEQ ID NO 3035. In some embodiments, the region corresponds to SEQ ID NO 3036. In some embodiments, the region corresponds to SEQ ID NO 3037. In some embodiments, the region corresponds to SEQ ID NO 3038. In some embodiments, the region corresponds to SEQ ID NO 3039. In some embodiments, the region corresponds to SEQ ID NO 3040. In some embodiments, the region corresponds to SEQ ID NO 3041. In some embodiments, the region corresponds to SEQ ID NO 3042. In some embodiments, the region corresponds to SEQ ID NO 3043. In some embodiments, the region corresponds to SEQ ID NO 3044. In some embodiments, the region corresponds to SEQ ID NO 3045. In some embodiments, the region corresponds to SEQ ID NO 3046. In some embodiments, the region corresponds to SEQ ID NO 3047. In some embodiments, the region corresponds to SEQ ID NO 3048. In some embodiments, the region corresponds to SEQ ID NO 3049. In some embodiments, the region corresponds to SEQ ID NO 3050. In some embodiments, the region corresponds to SEQ ID NO 3051. In some embodiments, the region corresponds to SEQ ID NO 3052. In some embodiments, the region corresponds to SEQ ID NO 3053. In some embodiments, the region corresponds to SEQ ID NO 3054. In some embodiments, the region corresponds to SEQ ID NO 3055. In some embodiments, the region corresponds to SEQ ID NO 3056. In some embodiments, the region corresponds to SEQ ID NO 3057. In some embodiments, the region corresponds to SEQ ID NO 3058. In some embodiments, the region corresponds to SEQ ID NO 3059. In some embodiments, the region corresponds to SEQ ID NO 3060. In some embodiments, the region corresponds to SEQ ID NO 3061. In some embodiments, the region corresponds to SEQ ID NO 3062. In some embodiments, the region corresponds to SEQ ID NO 3063. In some embodiments, the region corresponds to SEQ ID NO 3064. In some embodiments, the region corresponds to SEQ ID NO 3065. In some embodiments, the region corresponds to SEQ ID NO 3066. In some embodiments, the region corresponds to SEQ ID NO 3067. In some embodiments, the region corresponds to SEQ ID NO 3068. In some embodiments, the region corresponds to SEQ ID NO 3069. In some embodiments, the region corresponds to SEQ ID NO 3070. In some embodiments, the region corresponds to SEQ ID NO 3071. In some embodiments, the region corresponds to SEQ ID NO 3072. In some embodiments, the region corresponds to SEQ ID NO 3073. In some embodiments, the region corresponds to SEQ ID NO 3074. In some embodiments, the region corresponds to SEQ ID NO 3075. In some embodiments, the region corresponds to SEQ ID NO 3076. In some embodiments, the region corresponds to SEQ ID NO 19817. In some embodiments, the region corresponds to SEQ ID NO 19818. In some embodiments, the region corresponds to SEQ ID NO 19819. In some embodiments, the region corresponds to SEQ ID NO 19820. In some embodiments, the region corresponds to SEQ ID NO 19821. In some embodiments, the region corresponds to SEQ ID NO 19822. In some embodiments, the region corresponds to SEQ ID NO 19823. In some embodiments, the region corresponds to SEQ ID NO 19824. In some embodiments, the region corresponds to SEQ ID NO 19825. In some embodiments, the region corresponds to SEQ ID NO 19826. In some embodiments, the region corresponds to SEQ ID NO 19827. In some embodiments, the region corresponds to SEQ ID NO 19828. In some embodiments, the region corresponds to SEQ ID NO 19829. In some embodiments, the region corresponds to SEQ ID NO 19830. In some embodiments, the region corresponds to SEQ ID NO 19831. In some embodiments, the region corresponds to SEQ ID NO 19832. In some embodiments, the region corresponds to SEQ ID NO 19833. In some embodiments, the region corresponds to SEQ ID NO 19834. In some embodiments, the region corresponds to SEQ ID NO 19835. In some embodiments, the region corresponds to SEQ ID NO 19836. In some embodiments, the region corresponds to SEQ ID NO 19837. In some embodiments, the region corresponds to SEQ ID NO 19838. In some embodiments, the region corresponds to SEQ ID NO 19839. In some embodiments, the region corresponds to SEQ ID NO 19840. In some embodiments, the region corresponds to SEQ ID NO 19841. In some embodiments, the region corresponds to SEQ ID NO 19842. In some embodiments, the region corresponds to SEQ ID NO 19843. In some embodiments, the region corresponds to SEQ ID NO 19844. In some embodiments, the region corresponds to SEQ ID NO 19845. In some embodiments, the region corresponds to SEQ ID NO 19846. In some embodiments, the region corresponds to SEQ ID NO 19847. In some embodiments, the region corresponds to SEQ ID NO 19848. In some embodiments, the region corresponds to SEQ ID NO 19849. In some embodiments, the region corresponds to SEQ ID NO 19850. In some embodiments, the region corresponds to SEQ ID NO 19851. In some embodiments, the region corresponds to SEQ ID NO 19852. In some embodiments, the region corresponds to SEQ ID NO 19853. In some embodiments, the region corresponds to SEQ ID NO 19854. In some embodiments, the region corresponds to SEQ ID NO 19855. In some embodiments, the region corresponds to SEQ ID NO 19856. In some embodiments, the region corresponds to SEQ ID NO 19857. In some embodiments, the region corresponds to SEQ ID NO 19858. In some embodiments, the region corresponds to SEQ ID NO 19859. In some embodiments, the region corresponds to SEQ ID NO 19860. In some embodiments, the region corresponds to SEQ ID NO 19861. In some embodiments, the region corresponds to SEQ ID NO 19862. In some embodiments, the region corresponds to SEQ ID NO 19863. In some embodiments, the region corresponds to SEQ ID NO 19864. In some embodiments, the region corresponds to SEQ ID NO 19865. In some embodiments, the region corresponds to SEQ ID NO 19866. In some embodiments, the oligonucleotide probe comprises a region corresponding to at least one of SEQ ID NOs 3077-19816. In some embodiments, the oligonucleotide probe comprises a region corresponding to at least one of SEQ ID NOs 19867-21289. Combinations of such sequences can be chosen to target cell populations harboring latent infection. One of skill will appreciate that the nucleotides can be modified in sequence or via chemical or other desired modifications that still retain or perhaps enhance the effect or efficacy of the constructs. Such modifications are envisioned within the scope of the invention.

[0405] In embodiments of the invention wherein it is desirable to target cells harboring active HIV infection, the oligonucleotide probes may comprise a region corresponding to one or more sequence listed in Table 21 or Table 23. In some embodiments, the region corresponds to SEQ ID NO 2966. In some embodiments, the region corresponds to SEQ ID NO 2967. In some embodiments, the region corresponds to SEQ ID NO 2968. In some embodiments, the region corresponds to SEQ ID NO 2969. In some embodiments, the region corresponds to SEQ ID NO 2970. In some embodiments, the region corresponds to SEQ ID NO 2971. In some embodiments, the region corresponds to SEQ ID NO 2972. In some embodiments, the region corresponds to SEQ ID NO 2973. In some embodiments, the region corresponds to SEQ ID NO 2974. In some embodiments, the region corresponds to SEQ ID NO 2975. In some embodiments, the region corresponds to SEQ ID NO 2976. In some embodiments, the region corresponds to SEQ ID NO 2977. In some embodiments, the region corresponds to SEQ ID NO 2978. In some embodiments, the region corresponds to SEQ ID NO 2979. In some embodiments, the region corresponds to SEQ ID NO 2980. In some embodiments, the region corresponds to SEQ ID NO 2981. In some embodiments, the region corresponds to SEQ ID NO 2982. In some embodiments, the region corresponds to SEQ ID NO 2983. In some embodiments, the region corresponds to SEQ ID NO 2984. In some embodiments, the region corresponds to SEQ ID NO 2985. In some embodiments, the region corresponds to SEQ ID NO 2986. In some embodiments, the region corresponds to SEQ ID NO 2987. In some embodiments, the region corresponds to SEQ ID NO 2988. In some embodiments, the region corresponds to SEQ ID NO 2989. In some embodiments, the region corresponds to SEQ ID NO 2990. In some embodiments, the region corresponds to SEQ ID NO 2991. In some embodiments, the region corresponds to SEQ ID NO 2992. In some embodiments, the region corresponds to SEQ ID NO 2993. In some embodiments, the region corresponds to SEQ ID NO 2994. In some embodiments, the region corresponds to SEQ ID NO 2995. In some embodiments, the region corresponds to SEQ ID NO 2996. In some embodiments, the region corresponds to SEQ ID NO 2997. In some embodiments, the region corresponds to SEQ ID NO 2998. In some embodiments, the region corresponds to SEQ ID NO 2999. In some embodiments, the region corresponds to SEQ ID NO 3000. In some embodiments, the region corresponds to SEQ ID NO 3001. In some embodiments, the region corresponds to SEQ ID NO 3002. In some embodiments, the region corresponds to SEQ ID NO 3003. In some embodiments, the region corresponds to SEQ ID NO 3004. In some embodiments, the region corresponds to SEQ ID NO 3005. In some embodiments, the region corresponds to SEQ ID NO 3006. In some embodiments, the region corresponds to SEQ ID NO 21290. In some embodiments, the region corresponds to SEQ ID NO 21291. In some embodiments, the region corresponds to SEQ ID NO 21292. In some embodiments, the region corresponds to SEQ ID NO 21293. In some embodiments, the region corresponds to SEQ ID NO 21294. In some embodiments, the region corresponds to SEQ ID NO 21295. In some embodiments, the region corresponds to SEQ ID NO 21296. In some embodiments, the region corresponds to SEQ ID NO 21297. In some embodiments, the region corresponds to SEQ ID NO 21298. In some embodiments, the region corresponds to SEQ ID NO 21299. In some embodiments, the region corresponds to SEQ ID NO 21300. In some embodiments, the region corresponds to SEQ ID NO 21301. In some embodiments, the region corresponds to SEQ ID NO 21302. In some embodiments, the region corresponds to SEQ ID NO 21303. In some embodiments, the region corresponds to SEQ ID NO 21304. In some embodiments, the region corresponds to SEQ ID NO 21305. In some embodiments, the region corresponds to SEQ ID NO 21306. In some embodiments, the region corresponds to SEQ ID NO 21307. In some embodiments, the region corresponds to SEQ ID NO 21308. In some embodiments, the region corresponds to SEQ ID NO 21309. In some embodiments, the region corresponds to SEQ ID NO 21310. In some embodiments, the region corresponds to SEQ ID NO 21311. In some embodiments, the region corresponds to SEQ ID NO 21312. In some embodiments, the region corresponds to SEQ ID NO 21313. In some embodiments, the region corresponds to SEQ ID NO 21314. In some embodiments, the region corresponds to SEQ ID NO 21315. In some embodiments, the region corresponds to SEQ ID NO 21316. In some embodiments, the region corresponds to SEQ ID NO 21317. In some embodiments, the region corresponds to SEQ ID NO 21318. In some embodiments, the region corresponds to SEQ ID NO 21319. In some embodiments, the region corresponds to SEQ ID NO 21320. In some embodiments, the region corresponds to SEQ ID NO 21321. In some embodiments, the region corresponds to SEQ ID NO 21322. In some embodiments, the region corresponds to SEQ ID NO 21323. In some embodiments, the region corresponds to SEQ ID NO 21324. In some embodiments, the region corresponds to SEQ ID NO 21325. In some embodiments, the region corresponds to SEQ ID NO 21326. In some embodiments, the region corresponds to SEQ ID NO 21327. In some embodiments, the region corresponds to SEQ ID NO 21328. In some embodiments, the region corresponds to SEQ ID NO 21329. In some embodiments, the region corresponds to SEQ ID NO 21330. In some embodiments, the region corresponds to SEQ ID NO 21331. In some embodiments, the region corresponds to SEQ ID NO 21332. In some embodiments, the region corresponds to SEQ ID NO 21333. In some embodiments, the region corresponds to SEQ ID NO 21334. In some embodiments, the region corresponds to SEQ ID NO 21335. In some embodiments, the region corresponds to SEQ ID NO 21336. In some embodiments, the region corresponds to SEQ ID NO 21337. In some embodiments, the region corresponds to SEQ ID NO 21338. In some embodiments, the region corresponds to SEQ ID NO 21339. In some embodiments, the region corresponds to SEQ ID NO 21376. In some embodiments, the region corresponds to SEQ ID NO 21377. In some embodiments, the region corresponds to SEQ ID NO 21378. In some embodiments, the region corresponds to SEQ ID NO 21379. In some embodiments, the region corresponds to SEQ ID NO 21380. In some embodiments, the region corresponds to SEQ ID NO 21381. In some embodiments, the region corresponds to SEQ ID NO 21382. In some embodiments, the region corresponds to SEQ ID NO 21383. In some embodiments, the region corresponds to SEQ ID NO 21384. In some embodiments, the region corresponds to SEQ ID NO 21385. In some embodiments, the region corresponds to SEQ ID NO 21386. In some embodiments, the region corresponds to SEQ ID NO 21387. In some embodiments, the region corresponds to SEQ ID NO 21388. In some embodiments, the region corresponds to SEQ ID NO 21389. In some embodiments, the region corresponds to SEQ ID NO 21390. In some embodiments, the region corresponds to SEQ ID NO 21391. In some embodiments, the region corresponds to SEQ ID NO 21392. In some embodiments, the region corresponds to SEQ ID NO 21393. In some embodiments, the region corresponds to SEQ ID NO 21394. In some embodiments, the region corresponds to SEQ ID NO 21395. In some embodiments, the region corresponds to SEQ ID NO 21396. In some embodiments, the region corresponds to SEQ ID NO 21397. In some embodiments, the region corresponds to SEQ ID NO 21398. In some embodiments, the region corresponds to SEQ ID NO 21399. In some embodiments, the region corresponds to SEQ ID NO 21400. In some embodiments, the region corresponds to SEQ ID NO 21401. In some embodiments, the region corresponds to SEQ ID NO 21402. In some embodiments, the region corresponds to SEQ ID NO 21403. In some embodiments, the region corresponds to SEQ ID NO 21404. In some embodiments, the region corresponds to SEQ ID NO 21405. In some embodiments, the region corresponds to SEQ ID NO 21406. In some embodiments, the region corresponds to SEQ ID NO 21407. In some embodiments, the region corresponds to SEQ ID NO 21408. In some embodiments, the region corresponds to SEQ ID NO 21409. In some embodiments, the region corresponds to SEQ ID NO 21410. In some embodiments, the region corresponds to SEQ ID NO 21411. In some embodiments, the region corresponds to SEQ ID NO 21412. In some embodiments, the region corresponds to SEQ ID NO 21413. In some embodiments, the region corresponds to SEQ ID NO 21414. In some embodiments, the region corresponds to SEQ ID NO 21415. In some embodiments, the region corresponds to SEQ ID NO 21416. In some embodiments, the region corresponds to SEQ ID NO 21417. In some embodiments, the region corresponds to SEQ ID NO 21418. In some embodiments, the region corresponds to SEQ ID NO 21419. In some embodiments, the region corresponds to SEQ ID NO 21420. In some embodiments, the region corresponds to SEQ ID NO 21421. In some embodiments, the region corresponds to SEQ ID NO 21422. In some embodiments, the region corresponds to SEQ ID NO 21423. In some embodiments, the region corresponds to SEQ ID NO 21424. In some embodiments, the oligonucleotide probe comprises a region corresponding to at least one of SEQ ID NOs 21340-21375. In some embodiments, the oligonucleotide probe comprises a region corresponding to at least one of SEQ ID NOs 21425-22831. Combinations of such sequences can be chosen to target cell populations harboring active infection. One of skill will appreciate that the nucleotides can be modified in sequence or via chemical or other desired modifications that still retain or perhaps enhance the effect or efficacy of the constructs. Such modifications are envisioned within the scope of the invention.

[0406] In the methods of treatment provided by the invention, the HIV related oligonucleotides and/or multipartite constructs can be administered in combination with at least one other therapeutic agent. In some embodiments, the at least one other therapeutic agent comprises an anti-viral agent, optionally wherein the anti-viral agent comprises at least one anti-retroviral agent. Any useful anti-retroviral agent can be used. In some embodiments, the at least one anti-retroviral agent comprises an entry inhibitor, nucleoside/nucleotide reverse transcriptase inhibitor, non-nucleoside reverse transcriptase inhibitor, integrase inhibitor, protease inhibitor, or any combination thereof. The entry inhibitor can be one or more of maraviroc and enfuvirtide. The nucleoside/nucleotide reverse transcriptase inhibitor can be one or more of zidovudine, abacavir, lamivudine, emtricitabine, and tenofovir. The non-nucleoside reverse transcriptase inhibitor can be one or more of nevirapine, efavirenz, etravirine and rilpivirine. The protease inhibitor can be one or more of lopinavir, indinavir, nelfinavir, amprenavir, ritonavir, darunavir and atazanavir. Cocktails of such agents are commonly used to treat HIV.

[0407] Modifications

[0408] Modifications to the one or more oligonucleotide of the invention, e.g., a multipartite construct, an HIV related oligonucleotide, or any combination thereof, can be made to alter desired characteristics, including without limitation in vivo stability, specificity, affinity, avidity or nuclease susceptibility. Alterations to the half life may improve stability in vivo or may reduce stability to limit in vivo toxicity. Such alterations can include mutations, truncations or extensions. The 5′ and/or 3′ ends of the multipartite oligonucleotide constructs can be protected or deprotected to modulate stability as well. Modifications to improve in vivo stability, specificity, affinity, avidity or nuclease susceptibility or alter the half life to influence in vivo toxicity may be at the 5′ or 3′ end and include but are not limited to the following: locked nucleic acid (LNA) incorporation, unlocked nucleic acid (UNA) incorporation, phosphorothioate backbone instead of phosphodiester backbone, amino modifiers (i.e. C6-dT), dye conjugates (Cy dues, Fluorophores, etc), Biotinylation, PEG linkers, Click chemistry linkers, dideoxynucleotide end blockers, inverted end bases, cholesterol TEG or other lipid based labels.

[0409] Linkage options for segments of the oligonucleotide of the invention can be on the 5′ or 3′ end of an oligonucleotide or to a primary amine, sulfhydryl or carboxyl group of an antibody and include but are not limited to the following: Biotin-target oligonucleotide/Ab, streptavidin-complement oligonucleotide or vice versa, amino modified-target Ab/oligonucleotide, thiol/carboxy-complement oligonucleotide or vice versa, Click chemistry-target Ab/oligonucleotide, corresponding Click chemistry partner-complement oligonucleotide or vice versa. The linkages may be covalent or non-covalent and may include but are not limited to monovalent, multivalent (i.e. bi, tri or tetra-valent) assembly, to a DNA scaffold (i.e. DNA origami structure), drug/chemotherapeutic agent, nanoparticle, microparticle or a micelle or liposome.

[0410] A linker region can comprise a spacer with homo- or multifunctional reactive groups that can vary in length and type. These include but are not limited to the following: spacer C18, PEG4, PEG6, PEG8, and PEG12.

[0411] The oligonucleotide of the invention can further comprise additional elements to add desired biological effects. For example, the oligonucleotide of the invention may comprise a membrane disruptive moiety. The oligonucleotide of the invention may also be conjugated to one or more chemical moiety that provides such effects. For example, the oligonucleotide of the invention may be conjugated to a detergent-like moiety to disrupt the membrane of a target cell or microvesicle. Useful ionic detergents include sodium dodecyl sulfate (SDS, sodium lauryl sulfate (SLS)), sodium laureth sulfate (SLS, sodium lauryl ether sulfate (SLES)), ammonium lauryl sulfate (ALS), cetrimonium bromide, cetrimonium chloride, cetrimonium stearate, and the like. Useful non-ionic (zwitterionic) detergents include polyoxyethylene glycols, polysorbate 20 (also known as Tween 20), other polysorbates (e.g., 40, 60, 65, 80, etc), Triton-X (e.g., X100, X114), 3-[(3-cholamidopropyl)dimethylammonio]-1-propanesulfonate (CHAPS), CHAPSO, deoxycholic acid, sodium deoxycholate, NP-40, glycosides, octyl-thio-glucosides, maltosides, and the like. One of skill will appreciate that functional fragments, such as membrance disruptive moieties, can be covalently or non-covalently attached to the oligonucleotide of the invention.

[0412] Oligonucleotide segments, including those of a multipartite construct, can include any desirable base modification known in the art. In certain embodiments, oligonucleotide segments are 10 to 50 nucleotides in length. One having ordinary skill in the art will appreciate that this embodies oligonucleotides of 10, 11, 12, 13, 14, 15, 16, 17, 18, 19, 20, 21, 22, 23, 24, 25, 26, 27, 28, 29, 30, 31, 32, 33, 34, 35, 36, 37, 38, 39, 40, 41, 42, 43, 44, 45, 46, 47, 48, 49, or 50 nucleotides in length, or any range derivable there within.

[0413] In certain embodiments, a multipartite construct comprises a chimeric oligonucleotide that contains two or more chemically distinct regions, each made up of at least one nucleotide. Such chimeras can be referred to using terms such as multipartite, multivalent, or the like. The oligonucleotides portions may contain at least one region of modified nucleotides that confers one or more beneficial properties, e.g., increased nuclease resistance, bioavailability, increased binding affinity for the target. Chimeric nucleic acids of the invention may be formed as composite structures of two or more oligonucleotides, two or more types of oligonucleotides (e.g., both DNA and RNA segments), modified oligonucleotides, oligonucleosides and/or oligonucleotide mimetics. Such compounds have also been referred to in the art as hybrids. Representative United States patents that teach the preparation of such hybrid structures comprise, but are not limited to, U.S. Pat. Nos. 5,013,830; 5,149,797; 5,220,007; 5,256,775; 5,366,878; 5,403,711; 5,491,133; 5,565,350; 5,623,065; 5,652,355; 5,652,356; and 5,700,922, each of which is herein incorporated by reference in its entirety.

[0414] In certain embodiments, an oligonucleotide of the invention comprises at least one nucleotide modified at the 2′ position of the sugar, including without limitation a 2′-0-alkyl, 2′-0-alkyl-0-alkyl or 2′-fluoro-modified nucleotide. In other embodiments, RNA modifications include 2′-fluoro, 2′-amino and 2′ O-methyl modifications on the ribose of pyrimidines, a basic residue or an inverted base at the 3′ end of the RNA. Such modifications are routinely incorporated into oligonucleotides and these oligonucleotides have been shown to have higher target binding affinity in some cases than 2′-deoxyoligonucleotides against a given target.

[0415] A number of nucleotide and nucleoside modifications have been shown to make an oligonucleotide more resistant to nuclease digestion, thereby prolonging in vivo half-life. Specific examples of modified oligonucleotides include those comprising backbones comprising, for example, phosphorothioates, phosphotriesters, methyl phosphonates, short chain alkyl or cycloalkyl intersugar linkages or short chain heteroatomic or heterocyclic intersugar linkages. The constructs of the invention can comprise oligonucleotides with phosphorothioate backbones and/or heteroatom backbones, e.g., CH2-NH—0-CH2, CH, ˜N(CH3)˜0˜CH2 (known as a methylene(methylimino) or MMI backbone], CH2-O—N (CH3)-CH2, CH2-N(CH3)-N(CH3)-CH2 and O—N(CH3)-CH2-CH2 backbones, wherein the native phosphodiester backbone is represented as O—P—O—CH,); amide backbones (De Mesmaeker et ah, 1995); morpholino backbone structures (Summerton and Weller, U.S. Pat. No. 5,034,506); peptide nucleic acid (PNA) backbone (wherein the phosphodiester backbone of the oligonucleotide is replaced with a polyamide backbone, the nucleotides being bound directly or indirectly to the aza nitrogen atoms of the polyamide backbone (Nielsen, et al., 1991), each of which is herein incorporated by reference in its entirety. Phosphorus-containing linkages include, but are not limited to, phosphorothioates, chiral phosphorothioates, phosphorodithioates, phosphotriesters, aminoalkylphosphotriesters, methyl and other alkyl phosphonates comprising 3′alkylene phosphonates and chiral phosphonates, phosphinates, phosphoramidates comprising 3′-amino phosphoramidate and aminoalkylphosphoramidates, thionophosphoramidates, thionoalkylphosphonates, thionoalkylphosphotriesters, and boranophosphates having normal 3′-5′ linkages, 2′-5′ linked analogs of these, and those having inverted polarity wherein the adjacent pairs of nucleoside units are linked 3*-5* to 5*-3* or 2*-5* to 5*-2*; see U.S. Pat. Nos. 3,687,808; 4,469,863; 4,476,301; 5,023,243; 5,177,196; 5,188,897; 5,264,423; 5,276,019; 5,278,302; 5,286,717; 5,321, 131; 5,399,676; 5,405,939; 5,453,496; 5,455, 233; 5,466,677; 5,476,925; 5,519,126; 5,536,821; 5,541,306; 5,550,111; 5,563, 253; 5,571,799; 5,587,361; and 5,625,050, each of which is herein incorporated by reference in its entirety. Morpholino-based oligomeric compounds are known in the art described in Braasch & Corey, Biochemistry vol. 41, no. 14, 2002, pages 4503-4510; Genesis vol. 30, 2001, page 3; Heasman, J. Dev. Biol. vol. 243, 2002, pages 209-214; Nasevicius et al. Nat. Genet. vol. 26, 2000, pages 216-220; Lacerra et al. Proc. Natl. Acad. Sci. vol. 97, 2000, pages 9591-9596 and U.S. Pat. No. 5,034,506, issued Jul. 23, 1991, each of which is herein incorporated by reference in its entirety. Cyclohexenyl nucleic acid oligonucleotide mimetics are described in Wang et al., J. Am. Chem. Soc. Vol. 122, 2000, pages 8595-8602, the contents of which is incorporated herein in its entirety. An oligonucleotide of the invention can comprise at least such modification as desired.

[0416] Modified oligonucleotide backbones that do not include a phosphorus atom therein have backbones that can be formed by short chain alkyl or cycloalkyl intemucleoside linkages, mixed heteroatom and alkyl or cycloalkyl intemucleoside linkages, or one or more short chain heteroatomic or heterocyclic intemucleoside linkages. These comprise those having morpholino linkages (formed in part from the sugar portion of a nucleoside); siloxane backbones; sulfide, sulfoxide and sulfone backbones; formacetyl and thioformacetyl backbones; methylene formacetyl and thioformacetyl backbones; alkene containing backbones; sulfamate backbones; methyleneimino and methylenehydrazino backbones; sulfonate and sulfonamide backbones; amide backbones; and others having mixed N, O, S and CH2 component parts; see U.S. Pat. Nos. 5,034,506; 5,166,315; 5,185,444; 5,214,134; 5,216, 141; 5,235,033; 5,264,562; 5,264,564; 5,405,938; 5,434,257; 5,466,677; 5,470,967; 5,489,677; 5,541,307; 5,561,225; 5,596,086; 5,602,240; 5,610,289; 5,602,240; 5,608,046; 5,610,289; 5,618,704; 5,623,070; 5,663,312; 5,633,360; 5,677,437; and 5,677,439, each of which is herein incorporated by reference in its entirety. An oligonucleotide of the invention can comprise at least such modification as desired.

[0417] In certain embodiments, an oligonucleotide of the invention comprises one or more substituted sugar moieties, e.g., one of the following at the 2′ position: OH, SH, SCH₃, F, OCN, OCH₃ OCH₃, OCH₃ O(CH₂)n CH₃, O(CH₂)n NH₂ or O(CH₂)n CH₃ where n is from 1 to about 10; Ci to CIO lower alkyl, alkoxyalkoxy, substituted lower alkyl, alkaryl or aralkyl; Cl; Br; CN; CF₃; OCF₃; O-, S-, or N-alkyl; O-, S-, or N-alkenyl; SOCH₃; SO₂CH₃; ONO₂; NO₂; N₃; NH₂; heterocycloalkyl; heterocycloalkaryl; aminoalkylamino; polyalkylamino; substituted silyl; an RNA cleaving group; a reporter group; an intercalator; a group for improving the pharmacokinetic properties of an oligonucleotide; or a group for improving the pharmacokinetic/pharmacodynamic properties of an oligonucleotide and other substituents having similar properties. A preferred modification includes 2′-methoxyethoxy [2′-0-CH2CH2OCH3, also known as 2′-0-(2-methoxyethyl)]. Other preferred modifications include 2*-methoxy (2*-0-CH3), 2*-propoxy (2*-OCH2 CH2CH3) and 2*-fiuoro (2*-F). Similar modifications may also be made at other positions on the oligonucleotide, e.g., the 3′ position of the sugar on the 3′ terminal nucleotide and the 5′ position of 5′ terminal nucleotide. Oligonucleotides may also have sugar mimetics such as cyclobutyls in place of the pentofuranosyl group.

[0418] In certain embodiments, an oligonucleotide of the invention comprises one or more base modifications and/or substitutions. As used herein, “unmodified” or “natural” bases include adenine (A), guanine (G), thymine (T), cytosine (C) and uracil (U). Modified bases include, without limitation, bases found only infrequently or transiently in natural nucleic acids, e.g., hypoxanthine, 6-methyladenine, 5-Me pyrimidines, particularly 5-methylcytosine (also referred to as 5-methyl-2′ deoxy cytosine and often referred to in the art as 5-Me-C), 5-hydroxymethylcytosine (HMC), glycosyl HMC and gentobiosyl HMC, as well as synthetic bases, e.g., 2-aminoadenine, 2-(methylamino)adenine, 2-(imidazolylalkyl)adenine, 2-(aminoalklyamino)adenine or other heterosubstituted alkyladenines, 2-thiouracil, 2-thiothymine, 5-bromouracil, 5-hydroxymethyluracil, 8-azaguanine, 7-deazaguanine, N6 (6-aminohexyl)adenine and 2,6-diaminopurine (Kornberg, 1980; Gebeyehu, et ah, 1987). A “universal” base known in the art, e.g., inosine, can also be included. 5-Me-C substitutions can also be included. These have been shown to increase nucleic acid duplex stability by 0.6-1.20C. See, e.g., Sanghvi et al., ‘Antisense Research & Applications’, 1993, CRC PRESS pages 276-278. Further suitable modified bases are described in U.S. Pat. No. 3,687,808, as well as U.S. Pat. Nos. 4,845,205; 5,130,302; 5,134,066; 5,175, 273; 5, 367,066; 5,432,272; 5,457,187; 5,459,255; 5,484,908; 5,502,177; 5,525,711; 5,552,540; 5,587,469; 5,596,091; 5,614,617; 5,750,692, and 5,681,941, each of which is herein incorporated by reference.

[0419] It is not necessary for all positions in a given oligonucleotide to be uniformly modified, and in fact more than one of the aforementioned modifications may be incorporated in a single oligonucleotide or even at within a single nucleoside within an oligonucleotide.

[0420] In certain embodiments, both a sugar and an internucleoside linkage, i.e., the backbone, of one or more nucleotide units within an oligonucleotide of the invention are replaced with novel groups. The base can be maintained for hybridization with an appropriate nucleic acid target compound. One such oligomeric compound, an oligonucleotide mimetic that has been shown to retain hybridization properties, is referred to as a peptide nucleic acid (PNA). In PNA compounds, the sugar-backbone of an oligonucleotide is replaced with an amide containing backbone, for example, an aminoethylglycine backbone. The nucleobases are retained and are bound directly or indirectly to aza nitrogen atoms of the amide portion of the backbone. Representative patents that teach the preparation of PNA compounds comprise, but are not limited to, U.S. Pat. Nos. 5,539,082; 5,714,331; and 5,719,262, each of which is herein incorporated by reference. Further teaching of PNA compounds can be found in Nielsen et al. Science vol. 254, 1991, page 1497, which is herein incorporated by reference.

[0421] In certain embodiments, the oligonucleotide of the invention is linked (covalently or non-covalently) to one or more moieties or conjugates that enhance activity, cellular distribution, or localization. Such moieties include, without limitation, lipid moieties such as a cholesterol moiety (Letsinger et al. Proc. Natl. Acad. Sci. USA. vol. 86, 1989, pages 6553-6556), cholic acid (Manoharan et al. Bioorg. Med. Chem. Let. vol. 4, 1994, pages 1053-1060), a thioether, e.g., hexyl-S-tritylthiol (Manoharan et al. Ann. N. Y. Acad. Sci. Vol. 660, 1992, pages 306-309; Manoharan et al. Bioorg. Med. Chem. Let. vol. 3, 1993, pages 2765-2770), a thiocholesterol (Oberhauser et al. Nucl. Acids Res. vol. 20, 1992, pages 533-538), an aliphatic chain, e.g., dodecandiol or undecyl residues (Kabanov et al. Febs Lett. vol. 259, 1990, pages 327-330; Svinarchuk et al. Biochimie. vol. 75, 1993, pages 49-54), a phospholipid, e.g., di-hexadecyl-rac-glycerol or triethylammonium 1,2-di-O-hexadecyl-rac-glycero-3-H-phosphonate (Manoharan et al. Tetrahedron Lett. vol. 36, 1995, pages 3651-3654; Shea et al. Nucl. Acids Res. vol. 18, 1990, pages 3777-3783), a polyamine or a polyethylene glycol chain (Mancharan et al. Nucleosides & Nucleotides vol. 14, 1995, pages 969-973), or adamantane acetic acid (Manoharan et al. Tetrahedron Lett. vol. 36, 1995, pages 3651-3654), a palmityl moiety (Mishra et al. Biochim. Biophys. Acta vol. 1264, 1995, pages 229-237), or an octadecylamine or hexylamino-carbonyl-t oxycholesterol moiety (Crooke et al. J. Pharmacol. Exp. Ther. vol. 277, 1996, pages 923-937), each of which is herein incorporated by reference in its entirety. See also U.S. Pat. Nos. 4,828,979; 4,948,882; 5,218,105; 5,525,465; 5,541,313; 5,545,730; 5,552,538; 5,578,717; 5,580,731; 5,580,731; 5,591,584; 5,109,124; 5,118,802; 5,138,045; 5,414,077; 5,486,603; 5,512,439; 5,578,718; 5,608,046; 4,587,044; 4,605,735; 4,667,025; 4,762,779; 4,789,737; 4,824,941; 4,835,263; 4,876,335; 4,904,582; 4,958,013; 5,082,830; 5,112,963; 5,214,136; 5,082,830; 5,112,963; 5,214,136; 5,245,022; 5,254,469; 5,258,506; 5,262,536; 5,272,250; 5,292,873; 5,317,098; 5,371,241, 5,391,723; 5,416,203, 5,451,463; 5,510,475; 5,512,667; 5,514,785; 5,565,552; 5,567,810; 5,574,142; 5,585,481; 5,587,371; 5,595,726; 5,597,696; 5,599,923; 5,599,928 and 5,688,941, each of which is herein incorporated by reference in its entirety.

[0422] The oligonucleotide of the invention can be modified to incorporate a wide variety of modified nucleotides as desired. For example, the construct may be synthesized entirely of modified nucleotides or with a subset of modified nucleotides. The modifications can be the same or different. Some or all nucleotides may be modified, and those that are modified may contain the same modification. For example, all nucleotides containing the same base may have one type of modification, while nucleotides containing other bases may have different types of modification. All purine nucleotides may have one type of modification (or are unmodified), while all pyrimidine nucleotides have another, different type of modification (or are unmodified). Thus, the construct may comprise any combination of desired modifications, including for example, ribonucleotides (2′-OH), deoxyribonucleotides (2′-deoxy), 2′-amino nucleotides (2′-NH2), 2′-fluoro nucleotides (2′-F) and 2′-0-methyl (2′-OMe) nucleotides.

[0423] In some embodiments, the oligonucleotide of the invention is synthesized using a transcription mixture containing modified nucleotides in order to generate a modified construct. For example, a transcription mixture may contain only 2′-OMe A, G, C and U and/or T triphosphates (2′-OMe ATP, 2′-OMe UTP and/or 2*-OMe TTP, 2*-OMe CTP and 2*-OMe GTP), referred to as an MNA or mRmY mixture. Oligonucleotides generated therefrom are referred to as MNA oligonucleotides or mRmY oligonucleotides and contain only 2′-0-methyl nucleotides. A transcription mixture containing all 2′-OH nucleotides is referred to as an “rN” mixture, and oligonucleotides generated therefrom are referred to as “rN”, “rRrY” or RNA oligonucleotides. A transcription mixture containing all deoxy nucleotides is referred to as a “dN” mixture, and oligonucleotides generated therefrom are referred to as “dN”, “dRdY” or DNA oligonucleotides. Alternatively, a subset of nucleotides (e.g., C, U and/or T) may comprise a first modified nucleotides (e.g, 2′-OMe) nucleotides and the remainder (e.g., A and G) comprise a second modified nucleotide (e.g., 2′-OH or 2′-F). For example, a transcription mixture containing 2′-F U and 2′-OMe A, G and C is referred to as a “fUmV” mixture, and oligonucleotides generated therefrom are referred to as “fUmV” oligonucleotides. A transcription mixture containing 2′-F A and G, and 2′-OMe C and U and/or T is referred to as an “fRmY” mixture, and oligonucleotides generated therefrom are referred to as “fRmY” oligonucleotides. A transcription mixture containing 2′-F A and 2′-OMe C, G and U and/or T is referred to as “fAmB” mixture, and oligonucleotides generated therefrom are referred to as “fAmB” oligonucleotides.

[0424] One of skill in the art can improve pre-identified aptamer segments (e.g., variable regions or immunomodulatory regions that comprise an aptamer to a biomarker target or other entity) using various process modifications. Examples of such process modifications include, but are not limited to, truncation, deletion, substitution, or modification of a sugar or base or internucleotide linkage, capping, and PEGylation. In addition, the sequence requirements of an aptamer may be explored through doped reselections or aptamer medicinal chemistry. Doped reselections are carried out using a synthetic, degenerate pool that has been designed based on the aptamer of interest. The level of degeneracy usually varies from about 70-85% from the aptamer of interest. In general, sequences with neutral mutations are identified through the doped reselection process. Aptamer medicinal chemistry is an aptamer improvement technique in which sets of variant aptamers are chemically synthesized. These variants are then compared to each other and to the parent aptamer. Aptamer medicinal chemistry is used to explore the local, rather than global, introduction of substituents. For example, the following modifications may be introduced: modifications at a sugar, base, and/or internucleotide linkage, such as 2′-deoxy, 2′-ribo, or 2′-O-methyl purines or pyrimidines, phosphorothioate linkages may be introduced between nucleotides, a cap may be introduced at the 5′ or 3′ end of the aptamer (such as 3′ inverted dT cap) to block degradation by exonucleases, or a polyethylene glycol (PEG) element may be added to the aptamer to increase the half-life of the aptamer in the subject.

[0425] Additional compositions comprising an oligonucleotide of the invention and uses thereof are further described below. As the invention provides methods to identify oligonucleotide probes that bind to specific tissues, cells, microvesicles or other biological entities of interest, the oligonucleotide probes of the invention target such entities and are inherently drug candidates, agents that can be used for targeted drug delivery, or both.

[0426] Pharmaceutical Compositions

[0427] In an aspect, the invention provides pharmaceutical compositions comprising one or more oligonucleotide of the invention, e.g., a multipartite construct, an HIV related oligonucleotide, as described above, or any combination thereof. The oligonucleotide may act as a standalone drug, as a drug delivery agent, as a multipartite construct as described above, or any combination thereof. The invention further provides methods of administering such compositions.

[0428] The term “condition,” as used herein means an interruption, cessation, or disorder of a bodily function, system, or organ. Representative conditions include, but are not limited to, diseases such as cancer, inflammation, diabetes, and organ failure.

[0429] The phrase “treating,” “treatment of,” and the like include the amelioration or cessation of a specified condition.

[0430] The phrase “preventing,” “prevention of,” and the like include the avoidance of the onset of a condition.

[0431] The term “salt,” as used herein, means two compounds that are not covalently bound but are chemically bound by ionic interactions.

[0432] The term “pharmaceutically acceptable,” as used herein, when referring to a component of a pharmaceutical composition means that the component, when administered to an animal, does not have undue adverse effects such as excessive toxicity, irritation, or allergic response commensurate with a reasonable benefit/risk ratio. Accordingly, the term “pharmaceutically acceptable organic solvent,” as used herein, means an organic solvent that when administered to an animal does not have undue adverse effects such as excessive toxicity, irritation, or allergic response commensurate with a reasonable benefit/risk ratio. Preferably, the pharmaceutically acceptable organic solvent is a solvent that is generally recognized as safe (“GRAS”) by the United States Food and Drug Administration (“FDA”). Similarly, the term “pharmaceutically acceptable organic base,” as used herein, means an organic base that when administered to an animal does not have undue adverse effects such as excessive toxicity, irritation, or allergic response commensurate with a reasonable benefit/risk ratio.

[0433] The phrase “injectable” or “injectable composition,” as used herein, means a composition that can be drawn into a syringe and injected subcutaneously, intraperitoneally, or intramuscularly into an animal without causing adverse effects due to the presence of solid material in the composition. Solid materials include, but are not limited to, crystals, gummy masses, and gels. Typically, a formulation or composition is considered to be injectable when no more than about 15%, preferably no more than about 10%, more preferably no more than about 5%, even more preferably no more than about 2%, and most preferably no more than about 1% of the formulation is retained on a 0.22 μm filter when the formulation is filtered through the filter at 98° F. There are, however, some compositions of the invention, which are gels, that can be easily dispensed from a syringe but will be retained on a 0.22 μm filter. In one embodiment, the term “injectable,” as used herein, includes these gel compositions. In one embodiment, the term “injectable,” as used herein, further includes compositions that when warmed to a temperature of up to about 40° C. and then filtered through a 0.22 μm filter, no more than about 15%, preferably no more than about 10%, more preferably no more than about 5%, even more preferably no more than about 2%, and most preferably no more than about 1% of the formulation is retained on the filter. In one embodiment, an example of an injectable pharmaceutical composition is a solution of a pharmaceutically active compound (for example, one or more oligonucleotide of the invention, e.g., a multipartite construct, an HIV related oligonucleotide, as described above, or any combination thereof) in a pharmaceutically acceptable solvent. One of skill will appreciate that injectable solutions have inherent properties, e.g., sterility, pharmaceutically acceptable excipients and free of harmful measures of pyrogens or similar contaminants.

[0434] The term “solution,” as used herein, means a uniformly dispersed mixture at the molecular or ionic level of one or more substances (solute), in one or more other substances (solvent), typically a liquid.

[0435] The term “suspension,” as used herein, means solid particles that are evenly dispersed in a solvent, which can be aqueous or non-aqueous.

[0436] The term “animal,” as used herein, includes, but is not limited to, humans, canines, felines, equines, bovines, ovines, porcines, amphibians, reptiles, and avians. Representative animals include, but are not limited to a cow, a horse, a sheep, a pig, an ungulate, a chimpanzee, a monkey, a baboon, a chicken, a turkey, a mouse, a rabbit, a rat, a guinea pig, a dog, a cat, and a human. In one embodiment, the animal is a mammal. In one embodiment, the animal is a human. In one embodiment, the animal is a non-human. In one embodiment, the animal is a canine, a feline, an equine, a bovine, an ovine, or a porcine.

[0437] The phrase “drug depot,” as used herein means a precipitate, which includes one or more oligonucleotide of the invention, e.g., a multipartite construct, an HIV related oligonucleotide, as described above, or any combination thereof, formed within the body of a treated animal that releases the oligonucleotide over time to provide a pharmaceutically effective amount of the oligonucleotide.

[0438] The phrase “substantially free of,” as used herein, means less than about 2 percent by weight. For example, the phrase “a pharmaceutical composition substantially free of water” means that the amount of water in the pharmaceutical composition is less than about 2 percent by weight of the pharmaceutical composition.

[0439] The term “effective amount,” as used herein, means an amount sufficient to treat or prevent a condition in an animal.

[0440] The nucleotides that make up the oligonucleotide of the invention can be modified to, for example, improve their stability, i.e., improve their in vivo half-life, and/or to reduce their rate of excretion when administered to an animal. The term “modified” encompasses nucleotides with a covalently modified base and/or sugar. For example, modified nucleotides include nucleotides having sugars which are covalently attached to low molecular weight organic groups other than a hydroxyl group at the 3′ position and other than a phosphate group at the 5′ position. Modified nucleotides may also include 2′ substituted sugars such as 2′-O-methyl-; 2′-O-alkyl; 2′-O-allyl; 2′-S-alkyl; 2′-S-allyl; 2′-fluoro-; 2′-halo or 2′-azido-ribose; carbocyclic sugar analogues; α-anomeric sugars; and epimeric sugars such as arabinose, xyloses or lyxoses, pyranose sugars, furanose sugars, and sedoheptulose.

[0441] Modified nucleotides are known in the art and include, but are not limited to, alkylated purines and/or pyrimidines; acylated purines and/or pyrimidines; or other heterocycles. These classes of pyrimidines and purines are known in the art and include, pseudoisocytosine; N4,N4-ethanocytosine; 8-hydroxy-N6-methyladenine; 4-acetylcytosine, 5-(carboxyhydroxylmethyl) uracil; 5-fluorouracil; 5-bromouracil; 5-carboxymethylaminomethyl-2-thiouracil; 5-carboxymethylaminomethyl uracil; dihydrouracil; inosine; N6-isopentyl-adenine; 1-methyladenine; 1-methylpseudouracil; 1-methylguanine; 2,2-dimethylguanine; 2-methyladenine; 2-methylguanine; 3-methylcytosine; 5-methylcytosine; N6-methyladenine; 7-methylguanine; 5-methylaminomethyl uracil; 5-methoxy amino methyl-2-thiouracil; f3-D-mannosylqueosine; 5-methoxycarbonylmethyluracil; 5-methoxyuracil; 2 methylthio-N6-isopentenyladenine; uracil-5-oxyacetic acid methyl ester; psueouracil; 2-thiocytosine; 5-methyl-2 thiouracil, 2-thiouracil; 4-thiouracil; 5-methyluracil; N-uracil-5-oxyacetic acid methylester; uracil 5-oxyacetic acid; queosine; 2-thiocytosine; 5-propyluracil; 5-propylcytosine; 5-ethyluracil; 5-ethylcytosine; 5-butyluracil; 5-pentyluracil; 5-pentylcytosine; and 2,6,-diaminopurine; methylpsuedouracil; 1-methylguanine; and 1-methylcytosine.

[0442] An oligonucleotide of the invention can also be modified by replacing one or more phosphodiester linkages with alternative linking groups. Alternative linking groups include, but are not limited to embodiments wherein P(O)O is replaced by P(O)S, P(S)S, P(O)NR2, P(O)R, P(O)OR′, CO, or CH2, wherein each R or R′ is independently H or a substituted or unsubstituted C1-C20 alkyl. A preferred set of R substitutions for the P(O)NR2 group are hydrogen and methoxyethyl. Linking groups are typically attached to each adjacent nucleotide through an —O— bond, but may be modified to include —N— or —S— bonds. Not all linkages in an oligomer need to be identical.

[0443] The oligonucleotide of the invention can also be modified by conjugation to a polymer, for example, to reduce the rate of excretion when administered to an animal. For example, the oligonucleotide can be “PEGylated,” i.e., conjugated to polyethylene glycol (“PEG”). In one embodiment, the PEG has an average molecular weight ranging from about 20 kD to 80 kD. Methods to conjugate an oligonucleotide with a polymer, such PEG, are known to those skilled in the art (See, e.g., Greg T. Hermanson, Bioconjugate Techniques, Academic Press, 1966).

[0444] The oligonucleotide of the invention, e.g., a multipartite construct, an HIV related oligonucleotide, as described above, or any combination thereof, can be used in the pharmaceutical compositions disclosed herein or known in the art.

[0445] In one embodiment, the pharmaceutical composition further comprises a solvent.

[0446] In one embodiment, the solvent comprises water.

[0447] In one embodiment, the solvent comprises a pharmaceutically acceptable organic solvent. Any useful and pharmaceutically acceptable organic solvents can be used in the compositions of the invention.

[0448] In one embodiment, the pharmaceutical composition is a solution of the salt in the pharmaceutically acceptable organic solvent.

[0449] In one embodiment, the pharmaceutical composition comprises a pharmaceutically acceptable organic solvent and further comprises a phospholipid, a sphingomyelin, or phosphatidyl choline. Without wishing to be bound by theory, it is believed that the phospholipid, sphingomyelin, or phosphatidyl choline facilitates formation of a precipitate when the pharmaceutical composition is injected into water and can also facilitate controlled release of the oligonucleotide from the resulting precipitate. Typically, the phospholipid, sphingomyelin, or phosphatidyl choline is present in an amount ranging from greater than 0 to 10 percent by weight of the pharmaceutical composition. In one embodiment, the phospholipid, sphingomyelin, or phosphatidyl choline is present in an amount ranging from about 0.1 to 10 percent by weight of the pharmaceutical composition. In one embodiment, the phospholipid, sphingomyelin, or phosphatidyl choline is present in an amount ranging from about 1 to 7.5 percent by weight of the pharmaceutical composition. In one embodiment, the phospholipid, sphingomyelin, or phosphatidyl choline is present in an amount ranging from about 1.5 to 5 percent by weight of the pharmaceutical composition. In one embodiment, the phospholipid, sphingomyelin, or phosphatidyl choline is present in an amount ranging from about 2 to 4 percent by weight of the pharmaceutical composition.

[0450] The pharmaceutical compositions can optionally comprise one or more additional excipients or additives to provide a dosage form suitable for administration to an animal. When administered to an animal, the oligonucleotide containing pharmaceutical compositions are typically administered as a component of a composition that comprises a pharmaceutically acceptable carrier or excipient so as to provide the form for proper administration to the animal. Suitable pharmaceutical excipients are described in Remington's Pharmaceutical Sciences 1447-1676 (Alfonso R. Gennaro ed., 19th ed. 1995), incorporated herein by reference. The pharmaceutical compositions can take the form of solutions, suspensions, emulsion, tablets, pills, pellets, capsules, capsules containing liquids, powders, suppositories, emulsions, aerosols, sprays, suspensions, or any other form suitable for use.

[0451] In one embodiment, the pharmaceutical compositions are formulated for intravenous or parenteral administration. Typically, compositions for intravenous or parenteral administration comprise a suitable sterile solvent, which may be an isotonic aqueous buffer or pharmaceutically acceptable organic solvent. Where necessary, the compositions can also include a solubilizing agent. Compositions for intravenous administration can optionally include a local anesthetic such as lidocaine to lessen pain at the site of the injection. Generally, the ingredients are supplied either separately or mixed together in unit dosage form, for example, as a dry lyophilized powder or water free concentrate in a hermetically sealed container such as an ampoule or sachette indicating the quantity of active agent. Where oligonucleotide-containing pharmaceutical compositions are to be administered by infusion, they can be dispensed, for example, with an infusion bottle containing, for example, sterile pharmaceutical grade water or saline. Where the pharmaceutical compositions are administered by injection, an ampoule of sterile water for injection, saline, or other solvent such as a pharmaceutically acceptable organic solvent can be provided so that the ingredients can be mixed prior to administration.

[0452] In another embodiment, the pharmaceutical compositions are formulated in accordance with routine procedures as a composition adapted for oral administration. Compositions for oral delivery can be in the form of tablets, lozenges, aqueous or oily suspensions, granules, powders, emulsions, capsules, syrups, or elixirs, for example. Oral compositions can include standard excipients such as mannitol, lactose, starch, magnesium stearate, sodium saccharin, cellulose, and magnesium carbonate. Typically, the excipients are of pharmaceutical grade. Orally administered compositions can also contain one or more agents, for example, sweetening agents such as fructose, aspartame or saccharin; flavoring agents such as peppermint, oil of wintergreen, or cherry; coloring agents; and preserving agents, to provide a pharmaceutically palatable preparation. Moreover, when in tablet or pill form, the compositions can be coated to delay disintegration and absorption in the gastrointestinal tract thereby providing a sustained action over an extended period of time. Selectively permeable membranes surrounding an osmotically active driving compound are also suitable for orally administered compositions. A time-delay material such as glycerol monostearate or glycerol stearate can also be used.

[0453] The pharmaceutical compositions further comprising a solvent can optionally comprise a suitable amount of a pharmaceutically acceptable preservative, if desired, so as to provide additional protection against microbial growth. Examples of preservatives useful in the pharmaceutical compositions of the invention include, but are not limited to, potassium sorbate, methylparaben, propylparaben, benzoic acid and its salts, other esters of parahydroxybenzoic acid such as butylparaben, alcohols such as ethyl or benzyl alcohol, phenolic compounds such as phenol, or quaternary compounds such as benzalkonium chlorides (e.g., benzethonium chloride).

[0454] In one embodiment, the pharmaceutical compositions of the invention optionally contain a suitable amount of a pharmaceutically acceptable polymer. The polymer can increase the viscosity of the pharmaceutical composition. Suitable polymers for use in the compositions and methods of the invention include, but are not limited to, hydroxypropylcellulose, hydoxypropylmethylcellulose (HPMC), chitosan, polyacrylic acid, and polymethacrylic acid.

[0455] Typically, the polymer is present in an amount ranging from greater than 0 to 10 percent by weight of the pharmaceutical composition. In one embodiment, the polymer is present in an amount ranging from about 0.1 to 10 percent by weight of the pharmaceutical composition. In one embodiment, the polymer is present in an amount ranging from about 1 to 7.5 percent by weight of the pharmaceutical composition. In one embodiment, the polymer is present in an amount ranging from about 1.5 to 5 percent by weight of the pharmaceutical composition. In one embodiment, the polymer is present in an amount ranging from about 2 to 4 percent by weight of the pharmaceutical composition. In one embodiment, the pharmaceutical compositions of the invention are substantially free of polymers.

[0456] In one embodiment, any additional components added to the pharmaceutical compositions of the invention are designated as GRAS by the FDA for use or consumption by animals. In one embodiment, any additional components added to the pharmaceutical compositions of the invention are designated as GRAS by the FDA for use or consumption by humans.

[0457] The components of the pharmaceutical composition (the solvents and any other optional components) are preferably biocompatible and non-toxic and, over time, are simply absorbed and/or metabolized by the body.

[0458] As described above, the pharmaceutical compositions of the invention can further comprise a solvent.

[0459] In one embodiment, the solvent comprises water.

[0460] In one embodiment, the solvent comprises a pharmaceutically acceptable organic solvent.

[0461] In an embodiment, the oligonucleotide of the invention, e.g., a multipartite construct, an HIV related oligonucleotide, as described above, or any combination thereof, are available as the salt of a metal cation, for example, as the potassium or sodium salt. These salts, however, may have low solubility in aqueous solvents and/or organic solvents, typically, less than about 25 mg/mL. The pharmaceutical compositions of the invention comprising (i) an amino acid ester or amino acid amide and (ii) a protonated oligonucleotide, however, may be significantly more soluble in aqueous solvents and/or organic solvents. Without wishing to be bound by theory, it is believed that the amino acid ester or amino acid amide and the protonated oligonucleotide form a salt, such as illustrated above, and the salt is soluble in aqueous and/or organic solvents.

[0462] Similarly, without wishing to be bound by theory, it is believed that the pharmaceutical compositions comprising (i) an oligonucleotide of the invention; (ii) a divalent metal cation; and (iii) optionally a carboxylate, a phospholipid, a phosphatidyl choline, or a sphingomyelin form a salt, such as illustrated above, and the salt is soluble in aqueous and/or organic solvents.

[0463] In one embodiment, the concentration of the oligonucleotide of the invention in the solvent is greater than about 2 percent by weight of the pharmaceutical composition. In one embodiment, the concentration of the oligonucleotide of the invention in the solvent is greater than about 5 percent by weight of the pharmaceutical composition. In one embodiment, the concentration of the oligonucleotide in the solvent is greater than about 7.5 percent by weight of the pharmaceutical composition. In one embodiment, the concentration of the oligonucleotide in the solvent is greater than about 10 percent by weight of the pharmaceutical composition. In one embodiment, the concentration of the oligonucleotide in the solvent is greater than about 12 percent by weight of the pharmaceutical composition. In one embodiment, the concentration of the oligonucleotide in the solvent is greater than about 15 percent by weight of the pharmaceutical composition. In one embodiment, the concentration of the oligonucleotide in the solvent is ranges from about 2 percent to 5 percent by weight of the pharmaceutical composition. In one embodiment, the concentration of the oligonucleotide in the solvent is ranges from about 2 percent to 7.5 percent by weight of the pharmaceutical composition. In one embodiment, the concentration of the oligonucleotide in the solvent ranges from about 2 percent to 10 percent by weight of the pharmaceutical composition. In one embodiment, the concentration of the oligonucleotide in the solvent is ranges from about 2 percent to 12 percent by weight of the pharmaceutical composition. In one embodiment, the concentration of the oligonucleotide in the solvent is ranges from about 2 percent to 15 percent by weight of the pharmaceutical composition. In one embodiment, the concentration of the oligonucleotide in the solvent is ranges from about 2 percent to 20 percent by weight of the pharmaceutical composition.

[0464] Any pharmaceutically acceptable organic solvent can be used in the pharmaceutical compositions of the invention. Representative, pharmaceutically acceptable organic solvents include, but are not limited to, pyrrolidone, N-methyl-2-pyrrolidone, polyethylene glycol, propylene glycol (i.e., 1,3-propylene glycol), glycerol formal, isosorbid dimethyl ether, ethanol, dimethyl sulfoxide, tetraglycol, tetrahydrofurfuryl alcohol, triacetin, propylene carbonate, dimethyl acetamide, dimethyl formamide, dimethyl sulfoxide, and combinations thereof.

[0465] In one embodiment, the pharmaceutically acceptable organic solvent is a water soluble solvent. A representative pharmaceutically acceptable water soluble organic solvents is triacetin.

[0466] In one embodiment, the pharmaceutically acceptable organic solvent is a water miscible solvent. Representative pharmaceutically acceptable water miscible organic solvents include, but are not limited to, glycerol formal, polyethylene glycol, and propylene glycol.

[0467] In one embodiment, the pharmaceutically acceptable organic solvent comprises pyrrolidone. In one embodiment, the pharmaceutically acceptable organic solvent is pyrrolidone substantially free of another organic solvent.

[0468] In one embodiment, the pharmaceutically acceptable organic solvent comprises N-methyl-2-pyrrolidone. In one embodiment, the pharmaceutically acceptable organic solvent is N-methyl-2-pyrrolidone substantially free of another organic solvent.

[0469] In one embodiment, the pharmaceutically acceptable organic solvent comprises polyethylene glycol. In one embodiment, the pharmaceutically acceptable organic solvent is polyethylene glycol substantially free of another organic solvent.

[0470] In one embodiment, the pharmaceutically acceptable organic solvent comprises propylene glycol. In one embodiment, the pharmaceutically acceptable organic solvent is propylene glycol substantially free of another organic solvent.

[0471] In one embodiment, the pharmaceutically acceptable organic solvent comprises glycerol formal. In one embodiment, the pharmaceutically acceptable organic solvent is glycerol formal substantially free of another organic solvent.

[0472] In one embodiment, the pharmaceutically acceptable organic solvent comprises isosorbid dimethyl ether. In one embodiment, the pharmaceutically acceptable organic solvent is isosorbid dimethyl ether substantially free of another organic solvent.

[0473] In one embodiment, the pharmaceutically acceptable organic solvent comprises ethanol. In one embodiment, the pharmaceutically acceptable organic solvent is ethanol substantially free of another organic solvent.

[0474] In one embodiment, the pharmaceutically acceptable organic solvent comprises dimethyl sulfoxide. In one embodiment, the pharmaceutically acceptable organic solvent is dimethyl sulfoxide substantially free of another organic solvent.

[0475] In one embodiment, the pharmaceutically acceptable organic solvent comprises tetraglycol. In one embodiment, the pharmaceutically acceptable organic solvent is tetraglycol substantially free of another organic solvent.

[0476] In one embodiment, the pharmaceutically acceptable organic solvent comprises tetrahydrofurfuryl alcohol. In one embodiment, the pharmaceutically acceptable organic solvent is tetrahydrofurfuryl alcohol substantially free of another organic solvent.

[0477] In one embodiment, the pharmaceutically acceptable organic solvent comprises triacetin. In one embodiment, the pharmaceutically acceptable organic solvent is triacetin substantially free of another organic solvent.

[0478] In one embodiment, the pharmaceutically acceptable organic solvent comprises propylene carbonate. In one embodiment, the pharmaceutically acceptable organic solvent is propylene carbonate substantially free of another organic solvent.

[0479] In one embodiment, the pharmaceutically acceptable organic solvent comprises dimethyl acetamide. In one embodiment, the pharmaceutically acceptable organic solvent is dimethyl acetamide substantially free of another organic solvent.

[0480] In one embodiment, the pharmaceutically acceptable organic solvent comprises dimethyl formamide. In one embodiment, the pharmaceutically acceptable organic solvent is dimethyl formamide substantially free of another organic solvent.

[0481] In one embodiment, the pharmaceutically acceptable organic solvent comprises at least two pharmaceutically acceptable organic solvents.

[0482] In one embodiment, the pharmaceutically acceptable organic solvent comprises N-methyl-2-pyrrolidone and glycerol formal. In one embodiment, the pharmaceutically acceptable organic solvent is N-methyl-2-pyrrolidone and glycerol formal. In one embodiment, the ratio of N-methyl-2-pyrrolidone to glycerol formal ranges from about 90:10 to 10:90.

[0483] In one embodiment, the pharmaceutically acceptable organic solvent comprises propylene glycol and glycerol formal. In one embodiment, the pharmaceutically acceptable organic solvent is propylene glycol and glycerol formal. In one embodiment, the ratio of propylene glycol to glycerol formal ranges from about 90:10 to 10:90.

[0484] In one embodiment, the pharmaceutically acceptable organic solvent is a solvent that is recognized as GRAS by the FDA for administration or consumption by animals. In one embodiment, the pharmaceutically acceptable organic solvent is a solvent that is recognized as GRAS by the FDA for administration or consumption by humans.

[0485] In one embodiment, the pharmaceutically acceptable organic solvent is substantially free of water. In one embodiment, the pharmaceutically acceptable organic solvent contains less than about 1 percent by weight of water. In one embodiment, the pharmaceutically acceptable organic solvent contains less about 0.5 percent by weight of water. In one embodiment, the pharmaceutically acceptable organic solvent contains less about 0.2 percent by weight of water. Pharmaceutically acceptable organic solvents that are substantially free of water are advantageous since they are not conducive to bacterial growth. Accordingly, it is typically not necessary to include a preservative in pharmaceutical compositions that are substantially free of water. Another advantage of pharmaceutical compositions that use a pharmaceutically acceptable organic solvent, preferably substantially free of water, as the solvent is that hydrolysis of the oligonucleotide is minimized. Typically, the more water present in the solvent the more readily the oligonucleotide can be hydrolyzed. Accordingly, oligonucleotide containing pharmaceutical compositions that use a pharmaceutically acceptable organic solvent as the solvent can be more stable than oligonucleotide containing pharmaceutical compositions that use water as the solvent.

[0486] In one embodiment, comprising a pharmaceutically acceptable organic solvent, the pharmaceutical composition is injectable.

[0487] In one embodiment, the injectable pharmaceutical compositions are of sufficiently low viscosity that they can be easily drawn into a 20 gauge and needle and then easily expelled from the 20 gauge needle. Typically, the viscosity of the injectable pharmaceutical compositions are less than about 1,200 cps. In one embodiment, the viscosity of the injectable pharmaceutical compositions are less than about 1,000 cps. In one embodiment, the viscosity of the injectable pharmaceutical compositions are less than about 800 cps. In one embodiment, the viscosity of the injectable pharmaceutical compositions are less than about 500 cps. Injectable pharmaceutical compositions having a viscosity greater than about 1,200 cps and even greater than about 2,000 cps (for example gels) are also within the scope of the invention provided that the compositions can be expelled through an 18 to 24 gauge needle.

[0488] In one embodiment, comprising a pharmaceutically acceptable organic solvent, the pharmaceutical composition is injectable and does not form a precipitate when injected into water.

[0489] In one embodiment, comprising a pharmaceutically acceptable organic solvent, the pharmaceutical composition is injectable and forms a precipitate when injected into water. Without wishing to be bound by theory, it is believed, for pharmaceutical compositions that comprise a protonated oligonucleotide and an amino acid ester or amide, that the α-amino group of the amino acid ester or amino acid amide is protonated by the oligonucleotide to form a salt, such as illustrated above, which is soluble in the pharmaceutically acceptable organic solvent but insoluble in water. Similarly, when the pharmaceutical composition comprises (i) an oligonucleotide; (ii) a divalent metal cation; and (iii) optionally a carboxylate, a phospholipid, a phosphatidyl choline, or a sphingomyelin, it is believed that the components of the composition form a salt, such as illustrated above, which is soluble in the pharmaceutically acceptable organic solvent but insoluble in water. Accordingly, when the pharmaceutical compositions are injected into an animal, at least a portion of the pharmaceutical composition precipitates at the injection site to provide a drug depot. Without wishing to be bound by theory, it is believed that when the pharmaceutically compositions are injected into an animal, the pharmaceutically acceptable organic solvent diffuses away from the injection site and aqueous bodily fluids diffuse towards the injection site, resulting in an increase in concentration of water at the injection site, that causes at least a portion of the composition to precipitate and form a drug depot. The precipitate can take the form of a solid, a crystal, a gummy mass, or a gel. The precipitate, however, provides a depot of the oligonucleotide at the injection site that releases the oligonucleotide over time. The components of the pharmaceutical composition, i.e., the amino acid ester or amino acid amide, the pharmaceutically acceptable organic solvent, and any other components are biocompatible and non-toxic and, over time, are simply absorbed and/or metabolized by the body.

[0490] In one embodiment, comprising a pharmaceutically acceptable organic solvent, the pharmaceutical composition is injectable and forms liposomal or micellar structures when injected into water (typically about 500 μL are injected into about 4 mL of water). The formation of liposomal or micellar structures are most often formed when the pharmaceutical composition includes a phospholipid. Without wishing to be bound by theory, it is believed that the oligonucleotide in the form of a salt, which can be a salt formed with an amino acid ester or amide or can be a salt with a divalent metal cation and optionally a carboxylate, a phospholipid, a phosphatidyl choline, or a sphingomyelin, that is trapped within the liposomal or micellar structure. Without wishing to be bound by theory, it is believed that when these pharmaceutically compositions are injected into an animal, the liposomal or micellar structures release the oligonucleotide over time.

[0491] In one embodiment, the pharmaceutical composition further comprising a pharmaceutically acceptable organic solvent is a suspension of solid particles in the pharmaceutically acceptable organic solvent. Without wishing to be bound by theory, it is believed that the solid particles comprise a salt formed between the amino acid ester or amino acid amide and the protonated oligonucleotide wherein the acidic phosphate groups of the oligonucleotide protonates the amino group of the amino acid ester or amino acid amide, such as illustrated above, or comprises a salt formed between the oligonucleotide; divalent metal cation; and optional carboxylate, phospholipid, phosphatidyl choline, or sphingomyelin, as illustrated above. Pharmaceutical compositions that are suspensions can also form drug depots when injected into an animal.

[0492] By varying the lipophilicity and/or molecular weight of the amino acid ester or amino acid amide it is possible to vary the properties of pharmaceutical compositions that include these components and further comprise an organic solvent. The lipophilicity and/or molecular weight of the amino acid ester or amino acid amide can be varied by varying the amino acid and/or the alcohol (or amine) used to form the amino acid ester (or amino acid amide). For example, the lipophilicity and/or molecular weight of the amino acid ester can be varied by varying the R1 hydrocarbon group of the amino acid ester. Typically, increasing the molecular weight of R1 increase the lipophilicity of the amino acid ester. Similarly, the lipophilicity and/or molecular weight of the amino acid amide can be varied by varying the R3 or R4 groups of the amino acid amide.

[0493] For example, by varying the lipophilicity and/or molecular weight of the amino acid ester or amino acid amide it is possible to vary the solubility of the oligonucleotide of the invention in water, to vary the solubility of the oligonucleotide in the organic solvent, vary the viscosity of the pharmaceutical composition comprising a solvent, and vary the ease at which the pharmaceutical composition can be drawn into a 20 gauge needle and then expelled from the 20 gauge needle.

[0494] Furthermore, by varying the lipophilicity and/or molecular weight of the amino acid ester or amino acid amide (i.e., by varying R1 of the amino acid ester or R3 and R4 of the amino acid amide) it is possible to control whether the pharmaceutical composition that further comprises an organic solvent will form a precipitate when injected into water. Although different oligonucleotides exhibit different solubility and behavior, generally the higher the molecular weight of the amino acid ester or amino acid amide, the more likely it is that the salt of the protonated oligonucleotide and the amino acid ester of the amide will form a precipitate when injected into water. Typically, when R1 of the amino acid ester is a hydrocarbon of about C16 or higher the pharmaceutical composition will form a precipitate when injected into water and when R1 of the amino acid ester is a hydrocarbon of about C12 or less the pharmaceutical composition will not form a precipitate when injected into water. Indeed, with amino acid esters wherein R1 is a hydrocarbon of about C12 or less, the salt of the protonated oligonucleotide and the amino acid ester is, in many cases, soluble in water. Similarly, with amino acid amides, if the combined number of carbons in R3 and R4 is 16 or more the pharmaceutical composition will typically form a precipitate when injected into water and if the combined number of carbons in R3 and R4 is 12 or less the pharmaceutical composition will not form a precipitate when injected into water. Whether or not a pharmaceutical composition that further comprises a pharmaceutically acceptable organic solvent will form a precipitate when injected into water can readily be determined by injecting about 0.05 mL of the pharmaceutical composition into about 4 mL of water at about 98° F. and determining how much material is retained on a 0.22 μm filter after the composition is mixed with water and filtered. Typically, a formulation or composition is considered to be injectable when no more than 10% of the formulation is retained on the filter. In one embodiment, no more than 5% of the formulation is retained on the filter. In one embodiment, no more than 2% of the formulation is retained on the filter. In one embodiment, no more than 1% of the formulation is retained on the filter.

[0495] Similarly, in pharmaceutical compositions that comprise a protonated oligonucleotide and a diester or diamide of aspartic or glutamic acid, it is possible to vary the properties of pharmaceutical compositions by varying the amount and/or lipophilicity and/or molecular weight of the diester or diamide of aspartic or glutamic acid. Similarly, in pharmaceutical compositions that comprise an oligonucleotide; a divalent metal cation; and a carboxylate, a phospholipid, a phosphatidyl choline, or a sphingomyelin, it is possible to vary the properties of pharmaceutical compositions by varying the amount and/or lipophilicity and/or molecular weight of the carboxylate, phospholipid, phosphatidyl choline, or sphingomyelin.

[0496] Further, when the pharmaceutical compositions that further comprises an organic solvent form a depot when administered to an animal, it is also possible to vary the rate at which the oligonucleotide is released from the drug depot by varying the lipophilicity and/or molecular weight of the amino acid ester or amino acid amide. Generally, the more lipophilic the amino acid ester or amino acid amide, the more slowly the oligonucleotide is released from the depot. Similarly, when the pharmaceutical compositions that further comprises an organic solvent and also further comprise a carboxylate, phospholipid, phosphatidyl choline, sphingomyelin, or a diester or diamide of aspartic or glutamic acid and form a depot when administered to an animal, it is possible to vary the rate at which the oligonucleotide is released from the drug depot by varying the amount and/or lipophilicity and/or molecular weight of the carboxylate, phospholipid, phosphatidyl choline, sphingomyelin, or the diester or diamide of aspartic or glutamic acid.

[0497] Release rates from a precipitate can be measured injecting about 50 μL of the pharmaceutical composition into about 4 mL of deionized water in a centrifuge tube. The time that the pharmaceutical composition is injected into the water is recorded as T=0. After a specified amount of time, T, the sample is cooled to about −9° C. and spun on a centrifuge at about 13,000 rpm for about 20 min. The resulting supernatant is then analyzed by HPLC to determine the amount of oligonucleotide present in the aqueous solution. The amount of oligonucleotide in the pellet resulting from the centrifugation can also be determined by collecting the pellet, dissolving the pellet in about 10 μL of methanol, and analyzing the methanol solution by HPLC to determine the amount of oligonucleotide in the precipitate. The amount of oligonucleotide in the aqueous solution and the amount of oligonucleotide in the precipitate are determined by comparing the peak area for the HPLC peak corresponding to the oligonucleotide against a standard curve of oligonucleotide peak area against concentration of oligonucleotide. Suitable HPLC conditions can be readily determined by one of ordinary skill in the art.

[0498] Methods of Treatment

[0499] The pharmaceutical compositions of the invention are useful in human medicine and veterinary medicine. Accordingly, the invention further relates to a method of treating or preventing a condition in an animal comprising administering to the animal an effective amount of the pharmaceutical composition of the invention. For example, the invention provides pharmaceutical compositions comprising one or more oligonucleotide of the invention, e.g., a multipartite construct, an HIV related oligonucleotide, as described above, or any combination thereof.

[0500] In one embodiment, the invention relates to methods of treating a condition in an animal comprising administering to an animal in need thereof an effective amount of a pharmaceutical composition of the invention.

[0501] In one embodiment, the invention relates to methods of preventing a condition in an animal comprising administering to an animal in need thereof an effective amount of a pharmaceutical composition of the invention.

[0502] Methods of administration include, but are not limited to, intradermal, intramuscular, intraperitoneal, intravenous, subcutaneous, intranasal, epidural, oral, sublingual, intracerebral, intravaginal, transdermal, rectal, by inhalation, or topical. The mode of administration is left to the discretion of the practitioner. In some embodiments, administration will result in the release of the oligonucleotide of the invention, e.g., a multipartite construct, an HIV related oligonucleotide, as described above, or any combination thereof, into the bloodstream.

[0503] In one embodiment, the method of treating or preventing a condition in an animal comprises administering to the animal in need thereof an effective amount of an oligonucleotide by parenterally administering the pharmaceutical composition of the invention. In one embodiment, the pharmaceutical compositions are administered by infusion or bolus injection. In one embodiment, the pharmaceutical composition is administered subcutaneously.

[0504] In one embodiment, the method of treating or preventing a condition in an animal comprises administering to the animal in need thereof an effective amount of an oligonucleotide by orally administering the pharmaceutical composition of the invention. In one embodiment, the composition is in the form of a capsule or tablet.

[0505] The pharmaceutical compositions can also be administered by any other convenient route, for example, topically, by absorption through epithelial or mucocutaneous linings (e.g., oral, rectal, and intestinal mucosa, etc.).

[0506] The pharmaceutical compositions can be administered systemically or locally.

[0507] The pharmaceutical compositions can be administered together with another biologically active agent.

[0508] In one embodiment, the animal is a mammal.

[0509] In one embodiment the animal is a human.

[0510] In one embodiment, the animal is a non-human animal.

[0511] In one embodiment, the animal is a canine, a feline, an equine, a bovine, an ovine, or a porcine.

[0512] The effective amount administered to the animal depends on a variety of factors including, but not limited to the type of animal being treated, the condition being treated, the severity of the condition, and the specific multipartite construct being administered. A treating physician can determine an effective amount of the pharmaceutical composition to treat a condition in an animal.

[0513] In one embodiment, the multipartite construct comprises an anti-EpCAM aptamer segment. For example, the target of interest comprises EpCAM. In another embodiment, the target is selected from the group of proteins consisting of a EGFR, PBP, EpCAM, and KLK2. In another embodiment, the target is selected from the group of proteins consisting of a tetraspanin, EpCam, CD9, PCSA, CD63, CD81, PSMA, B7H3, PSCA, ICAM, STEAP, KLK2, SSX2, SSX4, PBP, SPDEF, and EGFR. In another embodiment, the target is selected from the group of proteins consisting of CD9, PSMA, PCSA, CD63, CD81, B7H3, IL 6, OPG-13, IL6R, PA2G4, EZH2, RUNX2, SERPINB3, and EpCam. In another embodiment, a target is selected from the group of proteins consisting of A33, a33 n15, AFP, ALA, ALIX, ALP, AnnexinV, APC, ASCA, ASPH (246-260), ASPH (666-680), ASPH (A-10), ASPH (D01P), ASPH (D03), ASPH (G-20), ASPH (H-300), AURKA, AURKB, B7H3, B7H4, BCA-225, BCNP1, BDNF, BRCA, CA125 (MUC16), CA-19-9, C-Bir, CD1.1, CD10, CD174 (Lewis y), CD24, CD44, CD46, CD59 (MEM-43), CD63, CD66e CEA, CD73, CD81, CD9, CDA, CDAC1 1a2, CEA, C-Erb2, C-erbB2, CRMP-2, CRP, CXCL12, CYFRA21-1, DLL4, DR3, EGFR, Epcam, EphA2, EphA2 (H-77), ER, ErbB4, EZH2, FASL, FRT, FRT c.f23, GDF15, GPCR, GPR30, Gro-alpha, HAP, HBD 1, HBD2, HER 3 (ErbB3), HSP, HSP70, hVEGFR2, iC3b, IL 6 Unc, IL-1B, IL6 Unc, IL6R, IL8, IL-8, INSIG-2, KLK2, L1CAM, LAMN, LDH, MACC-1, MAPK4, MART-1, MCP-1, M-CSF, MFG-E8, MIC1, MIF, MIS RII, MMG, MMP26, MMP7, MMP9, MS4A1, MUC1, MUC1 seq1, MUC1 seq11A, MUC17, MUC2, Ncam, NGAL, NPGP/NPFF2, OPG, OPN, p53, p53, PA2G4, PBP, PCSA, PDGFRB, PGP9.5, PIM1, PR (B), PRL, PSA, PSMA, PSME3, PTEN, R5-CD9 Tube 1, Reg IV, RUNX2, SCRN1, seprase, SERPINB3, SPARC, SPB, SPDEF, SRVN, STAT 3, STEAP1, TF (FL-295), TFF3, TGM2, TIMP-1, TIMP1, TIMP2, TMEM211, TMPRSS2, TNF-alpha, Trail-R2, Trail-R4, TrKB, TROP2, Tsg 101, TWEAK, UNC93A, VEGF A, and YPSMA-1. In another embodiment, the target is selected from the group of proteins consisting of 5T4, ACTG1, ADAM10, ADAM15, ALDOA, ANXA2, ANXA6, APOA1, ATP1A1, BASP1, C1orf58, C20orf114, C8B, CAPZA1, CAV1, CD151, CD2AP, CD59, CD9, CD9, CFL1, CFP, CHMP4B, CLTC, COTL1, CTNND1, CTSB, CTSZ, CYCS, DPP4, EEF1A1, EHD1, ENO1, F11R, F2, F5, FAM125A, FNBP1L, FOLH1, GAPDH, GLB1, GPX3, HIST1HIC, HIST1H2AB, HSP90AB1, HSPA1B, HSPA8, IGSF8, ITGB1, ITIH3, JUP, LDHA, LDHB, LUM, LYZ, MFGE8, MGAM, MMP9, MYH2, MYL6B, NME1, NME2, PABPC1, PABPC4, PACSIN2, PCBP2, PDCD6IP, PRDX2, PSA, PSMA, PSMA1, PSMA2, PSMA4, PSMA6, PSMA7, PSMB1, PSMB2, PSMB3, PSMB4, PSMB5, PSMB6, PSMB8, PTGFRN, RPS27A, SDCBP, SERINC5, SH3GL1, SLC3A2, SMPDL3B, SNX9, TACSTD1, TCN2, THBS1, TPI1, TSG101, TUBB, VDAC2, VPS37B, YWHAG, YWHAQ, and YWHAZ. In another embodiment, the target is selected from the group of proteins consisting of CD9, CD63, CD81, PSMA, PCSA, B7H3 and EpCam. CD9, CD63, CD81, PSMA, PCSA, B7H3 and EpCam. In another embodiment, the target is selected from the group of proteins consisting of a tetraspanin, CD9, CD63, CD81, CD63, CD9, CD81, CD82, CD37, CD53, Rab-5b, Annexin V, MFG-E8, Mucld, GPCR 110, TMEM211 and CD24 In another embodiment, the target is selected from the group of proteins consisting of A33, AFP, ALIX, ALX4, ANCA, APC, ASCA, AURKA, AURKB, B7H3, BANK1, BCNP1, BDNF, CA-19-9, CCSA-2, CCSA-3&4, CD10, CD24, CD44, CD63, CD66 CEA, CD66e CEA, CD81, CD9, CDA, C-Erb2, CRMP-2, CRP, CRTN, CXCL12, CYFRA21-1, DcR3, DLL4, DR3, EGFR, Epcam, EphA2, FASL, FRT, GAL3, GDF15, GPCR (GPR110), GPR30, GRO-1, HBD 1, HBD2, HNP1-3, IL-1B, IL8, IMP3, L1CAM, LAMN, MACC-1, MGC20553, MCP-1, M-CSF, MIC1, MIF, MMP7, MMP9, MS4A1, MUC1, MUC17, MUC2, Ncam, NGAL, NNMT, OPN, p53, PCSA, PDGFRB, PRL, PSMA, PSME3, Reg IV, SCRN1, Sept-9, SPARC, SPON2, SPR, SRVN, TFF3, TGM2, TIMP-1, TMEM211, TNF-alpha, TPA, TPS, Trail-R2, Trail-R4, TrKB, TROP2, Tsg 101, TWEAK, UNC93A, and VEGFA. In another embodiment, the target is selected from the group of proteins consisting of CD9, EGFR NGAL, CD81, STEAP, CD24, A33, CD66E, EPHA2, Ferritin, GPR30, GPR110, MMP9, OPN, p53, TMEM211, TROP2, TGM2, TIMP, EGFR, DR3, UNC93A, MUC17, EpCAM, MUC1, MUC2, TSG101, CD63, B7H3, CD24, and a tetraspanin.

[0514] The immunosuppressive target can be a tumor-derived protein found on cMVs and/or cancer cells, including without limitation TGF-β, CD39, CD73, IL10, FasL or TRAIL.

[0515] In one embodiment, the multipartite construct can inhibit angiogenesis. In one embodiment, the multipartite construct can inhibit angiogenesis and the disease being treated is cancer. In one embodiment, the aptamer can inhibit angiogenesis and the disease being treated is a solid tumor.

[0516] The multipartite construct can be a multipartite construct that inhibits a neoplastic growth or a cancer. In embodiments, the cancer comprises an acute lymphoblastic leukemia; acute myeloid leukemia; adrenocortical carcinoma; AIDS-related cancers; AIDS-related lymphoma; anal cancer; appendix cancer; astrocytomas; atypical teratoid/rhabdoid tumor; basal cell carcinoma; bladder cancer; brain stem glioma; brain tumor (including brain stem glioma, central nervous system atypical teratoid/rhabdoid tumor, central nervous system embryonal tumors, astrocytomas, craniopharyngioma, ependymoblastoma, ependymoma, medulloblastoma, medulloepithelioma, pineal parenchymal tumors of intermediate differentiation, supratentorial primitive neuroectodermal tumors and pineoblastoma); breast cancer; bronchial tumors; Burkitt lymphoma; cancer of unknown primary site; carcinoid tumor; carcinoma of unknown primary site; central nervous system atypical teratoid/rhabdoid tumor; central nervous system embryonal tumors; cervical cancer; childhood cancers; chordoma; chronic lymphocytic leukemia; chronic myelogenous leukemia; chronic myeloproliferative disorders; colon cancer; colorectal cancer; craniopharyngioma; cutaneous T-cell lymphoma; endocrine pancreas islet cell tumors; endometrial cancer; ependymoblastoma; ependymoma; esophageal cancer; esthesioneuroblastoma; Ewing sarcoma; extracranial germ cell tumor; extragonadal germ cell tumor; extrahepatic bile duct cancer; gallbladder cancer; gastric (stomach) cancer; gastrointestinal carcinoid tumor; gastrointestinal stromal cell tumor; gastrointestinal stromal tumor (GIST); gestational trophoblastic tumor; glioma; hairy cell leukemia; head and neck cancer; heart cancer; Hodgkin lymphoma; hypopharyngeal cancer; intraocular melanoma; islet cell tumors; Kaposi sarcoma; kidney cancer; Langerhans cell histiocytosis; laryngeal cancer; lip cancer; liver cancer; malignant fibrous histiocytoma bone cancer; medulloblastoma; medulloepithelioma; melanoma; Merkel cell carcinoma; Merkel cell skin carcinoma; mesothelioma; metastatic squamous neck cancer with occult primary; mouth cancer; multiple endocrine neoplasia syndromes; multiple myeloma; multiple myeloma/plasma cell neoplasm; mycosis fungoides; myelodysplastic syndromes; myeloproliferative neoplasms; nasal cavity cancer; nasopharyngeal cancer; neuroblastoma; Non-Hodgkin lymphoma; nonmelanoma skin cancer; non-small cell lung cancer; oral cancer; oral cavity cancer; oropharyngeal cancer; osteosarcoma; other brain and spinal cord tumors; ovarian cancer; ovarian epithelial cancer; ovarian germ cell tumor; ovarian low malignant potential tumor; pancreatic cancer; papillomatosis; paranasal sinus cancer; parathyroid cancer; pelvic cancer; penile cancer; pharyngeal cancer; pineal parenchymal tumors of intermediate differentiation; pineoblastoma; pituitary tumor; plasma cell neoplasm/multiple myeloma; pleuropulmonary blastoma; primary central nervous system (CNS) lymphoma; primary hepatocellular liver cancer; prostate cancer; rectal cancer; renal cancer; renal cell (kidney) cancer; renal cell cancer; respiratory tract cancer; retinoblastoma; rhabdomyosarcoma; salivary gland cancer; Sezary syndrome; small cell lung cancer; small intestine cancer; soft tissue sarcoma; squamous cell carcinoma; squamous neck cancer; stomach (gastric) cancer; supratentorial primitive neuroectodermal tumors; T-cell lymphoma; testicular cancer; throat cancer; thymic carcinoma; thymoma; thyroid cancer; transitional cell cancer; transitional cell cancer of the renal pelvis and ureter; trophoblastic tumor; ureter cancer; urethral cancer; uterine cancer; uterine sarcoma; vaginal cancer; vulvar cancer; Waldenstrom macroglobulinemia; or Wilm's tumor. The compositions and methods of the invention can be used to treat these and other cancers.

### Kits

[0517] The invention also provides a kit comprising one or more reagent to carry out the methods of the invention. For example, the one or more reagent can be the one or more aptamer, a buffer, blocker, enzyme, or combination thereof. The one or more reagent may comprise any useful reagents for carrying out the subject methods, including without limitation aptamer libraries, substrates such as microbeads or planar arrays or wells, reagents for biomarker and/or microvesicle isolation (e.g., via chromatography, filtration, ultrafiltration, centrifugation, ultracentrifugation, flow cytometry, affinity capture (e.g., to a planar surface, column or bead), polymer precipitation, and/or using microfluidics), aptamers directed to specific targets, aptamer pools that facilitate detection of a biomarker/microvesicle population, reagents such as primers for nucleic acid sequencing or amplification, arrays for nucleic acid hybridization, detectable labels, solvents or buffers and the like, various linkers, various assay components, blockers, and the like. The one or more reagent may also comprise various compositions provided by the invention. In an embodiment, the one or more reagent comprises one or more aptamer of the invention. The one or more reagent can comprise a substrate, such as a planar substrate, column or bead. The kit can contain instructions to carry out various assays using the one or more reagent.

[0518] In an embodiment, the kit comprises an oligonucleotide probe or composition provided herein. The kit can be configured to carry out the methods provided herein. For example, the kit can include an aptamer of the invention, a substrate, or both an aptamer of the invention and a substrate.

[0519] In an embodiment, the kit is configured to carry out an assay. For example, the kit can contain one or more reagent and instructions for detecting the presence or level of a biological entity in a biological sample. In such cases, the kit can include one or more binding agent to a biological entity of interest. The one or more binding agent can be bound to a substrate.

[0520] In an embodiment, the kit comprises a set of oligonucleotides that provide a particular oligonucleotide profile for a biological sample. An oligonucleotide profile can include, without limitation, a profile that can be used to characterize a particular disease or disorder. For example, the disease or disorder can be a proliferative disease or disorder, including without limitation a cancer. In some embodiments, the cancer comprises a breast cancer.

### EXAMPLES

### Example 1: Aptamer Target Identification

[0521] In this Example, aptamers conjugated to microspheres are used to assist in determining the target of two aptamers identified by library screening methods as described above. The general approach is shown in FIG. 9A. The approach is used to verify the targets of CAR003, an aptamer identified by library screening to recognize EpCAM. CAR003 is an aptamer candidate identified using the above methodology. As an RNA aptamer, CAR003 with alternate tail sequence has the following RNA sequence (SEQ ID NO. 3):

5′-auccagagug acgcagcagu cuuuucugau ggacacgugg uggucuagua ucacuaagcc accgugucca-3′

[0522] In this approach, the sequence of CAR003 is randomly rearranged before linkage to the microspheres. The microspheres are used as controls to bind to targets that are similar but not identical to the intended target molecule.

[0523] The protocol used is as follows:

[0524] 1) The candidate aptamers (here, CAR003) and negative control aptamers (here, randomly arranged CAR003) are synthesized with modifications to allow capture (here, the aptamers are biotinylated) and crosslinking (here, using the Sulfo-SBED Biotin Label Transfer Reagent and Kit, Catalog Number 33073 from Thermo Fisher Scientific Inc., Rockford, Ill., to allow photocrosslinking).

[0525] 2) Each of the aptamers is individually mixed with microvesicles having the target of interest (here, BrCa cell line microvesicles).

[0526] 3) After incubation to allow the aptamers to bind target, ultraviolet light is applied to the mixtures to trigger crosslinking of the aptamers with the microvesicle targets.

[0527] 4) The microvesicles are lysed, thereby releasing the crosslinked aptamer-target complex into solution.

[0528] 5) The crosslinked aptamer-target complexes are captured from solution using a streptavidin coated substrate.

[0529] 6) The crosslinked aptamer-target complexes for each aptamer are run individually on SDS-PAGE gel electrophoresis. The captured protein targets are visualized with Coomasie Blue staining.

[0530] 7) The crosslinking and binding steps may be promiscuous so that multiple bands including the intended target but also random proteins will appear on each of the gels. The intended target will be found in a band that appears on the gel with the candidate aptamer (here, CAR003) but not the related negative control aptamers (here, randomly arranged CAR003). The bands corresponding to the target are excised from the gel.

[0531] 8) Mass spectrometry (MS) is used to identify the aptamer target from the excised bands.

### Example 2: Oligonucleotide-Sequencing Detection Method

[0532] This example illustrates the use of an oligonucleotide pool to detect microvesicles that are indicative of a phenotype of interest. The method makes use of a pool of oligonucleotides that have been enriched against a target of interest that is indicative of a phenotype of interest. The method in this Example allows efficient use of a library of oligonucleotides to preferentially recognize a target entity.

[0533] For purposes of illustration, the method is described in the Example with a microvesicle target from a bodily fluid sample. One of skill will appreciate that the method can be extended to other types of target entity (e.g., cells, proteins, various other biological complexes), sample (e.g., tissue, cell culture, biopsy, other bodily fluids) and other phenotypes (other cancers, other diseases, etc) by enriching an aptamer library against the desired input samples.

[0534] General Workflow:

[0535] 1) Obtain sample (plasma, serum, urine or any other biological sample) of patients with unknown medical etymology and pre-treating them accordingly to ensure availability of the target of interest (see below). Where the target of interest is a microvesicle population, the microvesicles can be isolated and optionally tethered to a solid support such as a microbead.

[0536] 2) Expose pre-treated sample to an oligonucleotide pool carrying certain specificity against target of interest. As described herein, an oligonucleotide pool carrying certain specificity against the target of interest can be enriched using various selection schemes, e.g., using non-cancer microvesicles for negative selection and cancer microvesicles for positive selection as described above. DNA or RNA oligonucleotides can be used as desired.

[0537] 3) Contact oligonucleotide library with the sample.

[0538] 4) Elute any oligonucleotides bound to the target.

[0539] 5) Sequence the eluted oligonucleotides. Next generation sequencing methods can be used.

[0540] 6) Analyze oligonucleotide profile from the sequencing. A profile of oligonucleotides known to bind the target of interest indicates the presence of the target within the input sample. The profile can be used to characterize the sample, e.g., as cancer or non-cancer.

[0541] Protocol Variations:

[0542] Various configurations of the assay can be performed. Four exemplary protocols are presented for the purposes of the oligonucleotide-sequencing assay. Samples can be any appropriate biological sample. The protocols can be modified as desired. For example, the microvesicles can be isolated using alternate techniques instead or or in addition to ultracentrifugation. Such techniques can be disclosed herein, e.g., polymer precipitation (e.g., PEG), column chromatography, and/or affinity isolation.

[0543] Protocol 1:

[0544] Ultracentrifugation of 1-5 ml bodily fluid samples (e.g., plasma/serum/urine) (120K×g, no sucrose) with two washes of the precipitate to isolate microvesicles.

[0545] Measure total protein concentration of recovered sample containing the isolated microvesicles.

[0546] Conjugate the isolated microvesicles to magnetic beads (for example MagPlex beads (Luminex Corp. Austin Tex.)).

[0547] Incubate conjugated microvesicles with oligonucleotide pool of interest.

[0548] Wash unbound oligonucleotides by retaining beads using magnet.

[0549] Elute oligonucleotides bound to the microvesicles.

[0550] Amplify and purify the eluted oligonucleotides.

[0551] Oligonucleotide sequencing (for example, Next generation methods; Ion Torrent: fusion PCR, emulsion PCR, sequencing).

[0552] Assess oligonucleotide profile.

[0553] Protocol 2:

[0554] This alternate protocol does not include a microvesicle isolation step, microvesicles conjugation to the beads, or separate partitioning step. This may present non-specific binding of the oligonucleotides against the input sample.

[0555] Remove cells/debris from bodily fluid sample and dilute sample with PBS containing MgCl₂ (2 mM).

[0556] Pre-mix sample prepared above with oligonucleotide library.

[0557] Ultracentrifugation of oligonucleotide/sample mixture (120K×g, no sucrose). Wash precipitated microvesicles.

[0558] Recover precipitate and elute oligonucleotides bound to microvesicles.

[0559] Amplify and purify the eluted oligonucleotides.

[0560] Oligonucleotide sequencing (for example, Next generation methods; Ion Torrent: fusion PCR, emulsion PCR, sequencing).

[0561] Assess oligonucleotide profile.

[0562] Protocol 3:

[0563] This protocol uses filtration instead of ultracentrifugation and should require less time and sample volume.

[0564] Remove cells/debris from bodily fluid sample and dilute it with PBS containing MgCl₂ (2 mM).

[0565] Pre-mix sample prepared above with oligonucleotide library.

[0566] Load sample into filter (i.e., 150K or 300K MWCO filter or any other that can eliminate unbound or unwanted oligonucleotides). Centrifuge sample to concentrate. Concentrated sample should contain microvesicles.

[0567] Wash concentrate. Variant 1: Dilute concentrate with buffer specified above to the original volume and repeat centrifugation. Variant 2: Dilute concentrate with buffer specified above to the original volume and transfer concentrate to new filter unit and centrifuge. Repeat twice.

[0568] Recover concentrate and elute oligonucleotides bound to microvesicles.

[0569] Amplify and purify the eluted oligonucleotides.

[0570] Oligonucleotide sequencing (for example, Next generation methods; Ion Torrent: fusion PCR, emulsion PCR, sequencing).

[0571] Assess oligonucleotide profile.

[0572] Protocol 4:

[0573] Ultracentrifugation of 1-5 ml bodily fluid sample (120K×g, no sucrose) with 2 washes of the precipitate to isolate microvesicles.

[0574] Pre-mix microvesicles with oligonucleotide pool.

[0575] Load sample into 300K MWCO filter unite and centrifuge (2000×g). Concentration rate is ˜3×.

[0576] Wash concentrate. Variant 1: Dilute concentrate with buffer specified above to the original volume and centrifuge. Repeat twice. Variant 2: Dilute concentrate with buffer specified above to the original volume and transfer concentrate to new filter unit and centrifuge. Repeat twice

[0577] Recover concentrate and elute oligonucleotides bound to microvesicles.

[0578] Amplify and purify the eluted oligonucleotides.

[0579] Oligonucleotide sequencing (for example, Next generation methods; Ion Torrent: fusion PCR, emulsion PCR, sequencing).

[0580] Assess oligonucleotide profile.

[0581] In alterations of the above protocols, polymer precipitation is used to isolate microvesicles from the patient samples. For example, the oligonucleotides are added to the sample and then PEG4000 or PEG8000 at 4% or 8% concentration is used to precipitate and thereby isolate microvesicles. Elution, recovery and sequence analysis continues as above.

### Example 3: Plasma/Serum Probing with an Oligonucleotide Probe Library

[0582] The following protocol is used to probe a plasma or serum sample using an oligonucleotide probe library.

[0583] Input oligonucleotide library:

[0584] Use 2 ng input of oligonucleotide library per sample.

[0585] Input oligonucleotide library is a mixture of two libraries, cancer and non-cancer enriched, concentration is 16.3 ng/ul.

[0586] Dilute to 0.2 ng/ul working stock using Aptamer Buffer (3 mM MgCl₂ in 1×PBS)

[0587] Add 10 ul from working stock (equal to 2 ng library) to each optiseal tube

[0588] Materials:

[0589] PBS, Hyclone SH30256.01, LN: AYG165629, bottle#8237, exp. July 2015

[0590] Round Bottom Centrifuge Tubes, Beckman 326820, LN:P91207

[0591] OptiSeal Centrifuge tubes and plugs, polyallomer Konical, Beckman 361621, lot# Z10804SCA

[0592] Ultracentrifuge rotor: 50.4 TI

[0593] Ultracentrifuge rotor: 50.4 TI, Beckman Caris ID#0478

[0594] Protocol:

[0595] 1 Pre-chill tabletop centrifuge, ultracentrifuge, buckets, and rotor at 4° C.

[0596] 2 Thaw plasma or serum samples

[0597] 3 Dilute 1 ml of samples with 1:2 with Aptamer Buffer (3 mM MgCl₂ in 1×PBS)

[0598] 4 Spin at 2000×g, 30 min, 4° C. to remove debris (tabletop centrifuge)

[0599] 5 Transfer supernatants for all samples to a round bottom conical

[0600] 6 Spin at 12,000×g, 45 min, 4° C. in ultracentrifuge to remove additional debris.

[0601] 7 Transfer supernatant about 1.8 ml for all samples into new OptiSeal bell top tubes (uniquely marked).

[0602] 8 Add 2 ng (in 10 ul) of DNA Probing library to each optiseal tube

[0603] 9 QS to 4.5 ml with Aptamer Buffer

[0604] 10 Fix caps onto the OptiSeal bell top tubes

[0605] 11 Apply Parafilm around caps to prevent leakage

[0606] 12 Incubate plasma and oligonucleotide probe library for 1 hour at room temperature with rotation

[0607] 13 Remove parafilm (but not caps)

[0608] 14 Place correct spacer on top of each plugged tube

[0609] 15 Mark pellet area on the tubes, insure this marking is facing outwards from center.

[0610] 16 Spin tubes at 120,000×g, 2 hr, 4° C. (inner row, 33,400 rpm) to pellet microvesicles.

[0611] 17 Check marking is still pointed away from center.

[0612] 18 Completely remove supernatant from pellet, by collecting liquid from opposite side of pellet marker and using a 10 ml syringe barrel and 21G2 needle

[0613] 19 Discard supernatant in appropriate biohazard waste container

[0614] 20 Add 1 ml of 3 mM MgCl2 diluted with 1×PBS

[0615] 21 Gentle vortex, 1600 rpm for 5 sec and incubate 5 min at RT.

[0616] 22 QS to ˜4.5 mL with 3 mM Mg Cl2 diluted with 1×PBS

[0617] 23 Fix caps onto the OptiSeal bell top tubes.

[0618] 24 Place correct spacer on top of each plugged tube.

[0619] 25 Mark pellet area on the tubes, insure this marking is facing outwards from center.

[0620] 26 Spin tubes at 120,000×g, 70 min, 4° C. (inner row 33,400 rpm) to pellet microvesicles

[0621] 27 Check marking in still pointed away from center.

[0622] 28 Completely remove supernatant from pellet, by collecting liquid from opposite side of pellet marker and using a 10 ml syringe barrel and 21G2 needle

[0623] 29 Discard supernatant in appropriate biohazard waste container

[0624] 30 Add 1 ml of 3 mM MgCl2 diluted with 1×PBS

[0625] 31 Gentle vortex, 1600 rpm for 5 sec and incubate 5 min at RT.

[0626] 32 QS to ˜4.5 mL with 3 mM Mg Cl2 diluted with 1×PBS

[0627] 33 Fix caps onto the OptiSeal bell top tubes.

[0628] 34 Place correct spacer on top of each plugged tube.

[0629] 35 Mark pellet area on the tubes, insure this marking is facing outwards from center.

[0630] 36 Spin tubes at 120,000×g, 70 min, 4° C. (inner row 33,400 rpm) to pellet microvesicles

[0631] 37 Check marking is still pointed away from center.

[0632] 38 Save an aliquot of the supernatant (100 ul into a 1.5 ml tube)

[0633] 39 Completely remove supernatant from pellet, by collecting liquid from opposite side of pellet marker and using a 10 ml syringe barrel and 21G2 needle

[0634] 40 Add 50 ul of Rnase-free water to the side of the pellet

[0635] 41 Leave for 15 min incubation on bench top

[0636] 42 Cut top off tubes using clean scissors.

[0637] 43 Resuspend pellet, pipette up and down on the pellet side

[0638] 44 Measure the volume, make a note on the volume in order to normalize all samples

[0639] 45 Transfer the measured resuspended eluted microvesicles with bound oligonucleotides to a Rnase free 1.5 ml Eppendorf tube

[0640] 46 Normalize all samples to 100 ul to keep it even across samples and between experiments.

[0641] Next Generation Sequencing Sample Preparation:

[0642] I) Use 50 ul of sample from above, resuspended in 100 ul H2O and containing microvesicle/oligo complexes, as template in Transposon PCR, 14 cycles.

[0643] II) AMPure transposon PCR product, use entire recovery for indexing PCR, 10 cycles.

[0644] III) Check indexing PCR product on gel, proceed with AMPure if band is visible. Add 3 cylces if band is invisible, check on gel. After purification quantify product with QuBit and proceed with denaturing and dilting for loading on HiSeq flow cell (Illumina Inc., San Diego, Calif.).

[0645] IV) 5 samples will be multiplexed per one flow cell. 10 samples per HiSeq.

### Example 4: Oligonucleotide Probe Library

[0646] This Example presents development of an oligonucleotide probe library to detect biological entities. In this Example, steps were taken to reduce the presence of double stranded oligonucleotides (dsDNA) when probing the patient samples. The data were also generated comparing the effects of 8% and 6% PEG used to precipitate microvesicles (and potentially other biological entities) from the patient samples.

[0647] Protocol:

[0648] 1) Pre-chill tabletop centrifuge at 4° C.

[0649] 2) Protease inhibition: dissolve 2 tablets of “cOmplete ULTRA MINI EDTA-free EASYpack” protease inhibitor in 1100 ul of H₂O (20× stock of protease inhibitor).

[0650] 3) Add 50 ul of protease inhibitor to the sample (on top of frozen plasma) and start thawing: 1 ml total ea.

[0651] 4) To remove cells/debris, spin samples at 10,000×g, 20 min, 4° C. Collect 1 ml supernatant (SN).

[0652] 5) Mix 1 ml supernatant from step 4 with 1 ml of 2×PBS 6 mM MgCl₃, collect 400 ul into 3 tubes (replicates A, B, C) and use it in step 6.

[0653] 6) Add competitor per Table 5: make dilutions in 1×PBS, 3 mM MgCl₂, mix well, pour into trough, pipet using multichannel.

TABLE 5
Competitors

| | | | | | Volume | | | |
|---|---|---|---|---|---|---|---|---|
| | | | | | from stock to | Buffer to | | |
| | | | Intermediate | Number | make | make | Final | |
| | Type of | Stock | stock | of | intermediate | intermediate | Volume, | Final |
| units | Competitor | Concentration | concentration | samples | stock, ul | stock | ul | Concentration |
| ng/ul | Salmon | — | 40 | — | — | — | 425.5 | 0.8 |
| | DNA | | | | | | | |
| ng/ul | tRNA | — | 40 | — | — | — | 425.5 | 0.8 |
| x | S1 | 20 | 0.5 | 280 | 65.5 | 2555.6 | 425.5 | 0.01 |

[0654] 7) Incubate for 10 min, RT, end-over-end rotation

[0655] The screened library comprised a 5′ region (5′ CTAGCATGACTGCAGTACGT 3′ (SEQ ID NO. 4)) followed by the random naïve aptamer sequences and a 3′ region (5′ CTGTCTCTTATACACATCTGACGCTGCCGACGA (SEQ ID NO. 5)). Pool of 6-3S and 8-3S oligonucleotide probing libraries is ready: 2.76 ng/ul (˜185 ng). Save pool stock and dilutions. New pool can be made by mixing 171.2 ul (500 ng) of library 6-3S (2.92 ng/ul) with 190.8 ul (500 ng) of library 8-3S (2.62 ng/ul). Aliquot pooled library into 30 ul and store at −80 C.

[0656] Add ssDNA oligonucleotide probing library to the final concentration 2.5 pg/ul for binding. Make dilutions in 1×PBS, 3 mM MgCl₂.

TABLE 6
Probe library calculations

| | | | | | | | Volume | |
|---|---|---|---|---|---|---|---|---|
| | | | ul from | | | | per | |
| | | Required | original | ul of | | | sample | |
| Original | | working | stock to | buffer to | | | from | Final |
| stock, | | stock | make | make | Final | Number of | working | concentration |
| ng/ul | Lib Name | (ng/ul) | working | working | volume, ul | samples | stock | (pg/ul) |
| 2.76 | Pooled | 0.1 | 26.1 | 694.1 | 720.2 | 60 | 10.9 | 2.5 |
| | library 6- | | | | | | | |
| | 3S/8-3S | | | | | | | |

[0657] 8) Binding: Incubate for 1h at RT with rotation.

[0658] 9) Prepare polymer solution: 20% PEG8000 in 1×PBS 3 mM MgCl2 (dilute 40% PEG8000 with 2×PBS with 6 mM MgCl2). Add 20% PEG8000 to sample to the final concentration 6%. Invert few times to mix, incubate for 15 min at 4C

TABLE 7
PEG calculations

| | | | | | Volume of | Sample | | |
|---|---|---|---|---|---|---|---|---|
| | | | | Volume | buffer to | volume | | Total 20% |
| PEG | PEG stock, | Final conc., | Final | 20% PEG | adjust final | before | Total | PEG |
| MW | % | % | volume, ul | to add, ul | volume, ul | adding PEG | samples | needed, ml |
| 8000 | 20 | 6 | 622.8 | 186.9 | −0.4 | 436.4 | 60 | 11.2 |

[0659] 10) Spin at 10,000×g for 5 min, RT.

[0660] 11) Remove SN, add 1 ml 1×PBS, 3 mM MgCl2 and wash pellet by gentle inversion with 1 ml aptamer buffer.

[0661] 12) Remove buffer, Re-suspend pellets in 100 ul H2O: incubate at RT for 10 min on mixmate 900 rpm to re-suspend.

[0662] 13) Make sure each sample is re-suspended by pipeting after step 13. Make notes on hardly re-suspendable samples.

[0663] 14) 50 ul of re-suspended sample to indexing PCR->next generation sequencing (NGS).

[0664] 15) Keep leftover at 4C

[0665] Technical Validation:

[0666] The current protocol was tested versus a protocol using 8% PEG8000 to precipitate microvesicles. The current protocol further comprises steps to reduce dsDNA in the oligonucleotide probing libraries.

[0667] FIG. 5A shows the within sample variance (black) between binding replicates and the between sample variance (grey). Black is on top of grey, thus any observable grey oligo is informative about differences in the biology of two patient samples. This evaluation of Sources of Variance shows that the technical variances is significantly smaller than the biological variance.

[0668] FIG. 5B shows the impact of using a higher proportion of single stranded DNA and PEG 6% isolation (white bars) compared to when there is a higher amount of double stranded DNA and 8% PEG (grey). This data indicates that the protocol in this Example improves biological separation between patients.

[0669] The plots in FIG. 5C show the difference between an earlier protocol (PEG 8% with increased dsDNA) and a modified protocol of the Example (PEG 6% no dsDNA). The black is the scatter between replicates (independent binding events) and the grey is the difference between patients. This data shows that the signal to noise increased significantly using the newer protocol.

[0670] Patient Testing:

[0671] The protocol above was used to test patient samples having the following characteristics:

TABLE 8
Patient characteristics

| Sample Type | Description |
|---|---|
| Cancer | Mixed type carcinoma; Malignant; |
| Cancer | Invasive, predominant intraductal component (8500/3) |
| Cancer | Fibrocystic Changes; Invasive lobular carcinoma - 8520/3; Lobular carcinoma in |
| | situ - 8520/2; Benign; In situ and grade 3 intraepith; Malignant; Fat necrosis, |
| | periductal inflammation, malignant cellsFat necrosis; Inflammation; Benign; |
| Cancer | Invasive, predominant intraductal component (8500/3) |
| Cancer | Mucinous (colloid) adenocarcinoma (8480/3) |
| Cancer | Invasive lobular carcinoma - 8520/3; Microcalcifications; Benign; Malignant; |
| Cancer | Otherfibrocystic changeInvasive, NOS (8500/3) |
| Cancer | Invasive ductal carcinoma, not otherwise specified (NOS) - 8500/3; Malignant; |
| Cancer | Invasive ductal carcinoma, not otherwise specified (NOS) - 8500/3; Malignant; |
| Cancer | Intraductal carcinoma, non-infiltrating, NOS (in situ) (8500/2) |
| Cancer | Atypical lobular hyperplasia |
| | Otherfibrocystic changes, inter and intralobular fibrosis, apocrine metaplasia, |
| | columnar cell change, microcalcificationsInvasive, NOS (8500/3) |
| Cancer | FibroadenomaInvasive, NOS (8500/3) |
| Cancer | Ductal carcinoma in situ - 8500/2; Invasive ductal carcinoma, not otherwise |
| | specified (NOS) - 8500/3; Microcalcifications; Benign; In situ and grade 3 |
| | intraepith; Malignant; |
| Cancer | Ductal carcinoma in situ - 8500/2; Invasive lobular carcinoma - 8520/3; Lobular |
| | carcinoma in situ - 8520/2; In situ and grade 3 intraepith; Malignant; |
| Cancer | Ductal carcinoma in situ - 8500/2; Invasive ductal carcinoma, not otherwise |
| | specified (NOS) - 8500/3; Microcalcifications; Benign; In situ and grade 3 |
| | intraepith; Malignant; Focal Micropapillary Features, invasive ductal carcinoma |
| | with micropapillary features, invasive ductal carcinoma with mucinous and |
| | micropapillary featInvasive ductal carcinoma with micropapillary and mucinous |
| | features; Invasive micropapillary carcinoma - 8507/3; Malignant; |
| Cancer | Invasive, predominant intraductal component (8500/3) |
| Cancer | Invasive ductal carcinoma, not otherwise specified (NOS) - 8500/3; Malignant; |
| Cancer | Invasive, NOS (8500/3) |
| Cancer | Infiltrating duct and lobular carcinoma (8522/3) |
| Cancer | Invasive, predominant in situ component (8522/3) |
| Non-Cancer | Otherusual ductal hyperplasia, apocrine metaplasia, microcysts, elastosis |
| Non-Cancer | Otherstromal fibrosis, fibrous cyst wall |
| Non-Cancer | Otherfibrocystic change, stromal fibrosis, cyst formation, microcalcifications, |
| | apocrine metaplasia, sclerosing adenosis, usual ductal hyperplasia |
| Non-Cancer | Otherfibrocystic changes, apocrine metaplasia, cystic change, usual ductal |
| | hyperplasia |
| Non-Cancer | Otherfibrocystic change, microcalcifications |
| Non-Cancer | Fibroadenoma |
| Non-Cancer | Otherintraductal papilloma, sclerosis, microcalcifications, stromal fibrosis |
| Non-Cancer | Fibroadenoma |
| Non-Cancer | Otherfat necrosis |
| Non-Cancer | Otherstromal fibrosis, microcalcifications |
| Non-Cancer | Otherfibrocystic change, microcystic change, focal secretory features |
| Non-Cancer | Otherstromal fibrosis |
| Non-Cancer | Fibroadenoma Otheradenosis, columnar cell change/hyperplasia, usual ductal |
| | hyperplasia |
| Non-Cancer | OtherFNA - insufficient material for diagnosis |
| Non-Cancer | Otherintraductal papilloma |
| Non-Cancer | Otherfibrocystic changes, duct ectasia, usual ductal hyperplasia, apocrine |
| | metaplasia, microcalcifications |

[0672] Microvesicles (and potentially other biological entities) were precipitated in blood (plasma) samples from the above patients using polymer precipitation with PEG as indicated above. The protocol was used to probe the samples with the oligonucleotide probe libraries. Sequences that bound the PEG precipitated samples were identified using next generation sequencing (NGS).

[0673] FIG. 5D shows scatter plots of a selection of results from testing the 40 patients listed previously. The spread in the data indicates that large numbers of oligos were detected that differed between samples. The number of significant oligos found is much greater than would be expected randomly as shown in Table 9. The table shows the number of oligonucleotides sorted by copy number detected and p-value. The d-# indicates the number copies of a sequence observed for the data in the rows.

TABLE 9
Expected versus observed sequences

| | Total Number | P-0.1 | P-0.05 | P-0.01 | P-0.005 |
|---|---|---|---|---|---|
| d-50 | 83,632 | 47,020 | 30,843 | 5,934 | 2,471 |
| d-100 | 52,647 | 29,106 | 19,446 | 3,893 | 1,615 |
| d-200 | 28,753 | 14,681 | 9,880 | 2,189 | 914 |
| d-500 | 10,155 | 4,342 | 2,927 | 725 | 315 |
| d-50 | 100.0% | 56.2% | 36.9% | 7.1% | 3.0% |
| d-100 | 100.0% | 55.3% | 36.9% | 7.4% | 3.1% |
| d-200 | 100.0% | 51.1% | 34.4% | 7.6% | 3.2% |
| d-500 | 100.0% | 42.8% | 28.8% | 7.1% | 3.1% |

| | | | | |
|---|---|---|---|---|
| Maximum expected | 10.0% | 5.0% | 1.0% | 0.5% |

[0674] As a control, the cancer and non-cancer samples were randomly divided into two groups. Such randomization of the samples significantly reduced the number of oligos found that differentiate between sample groups. Indeed, there was a 50-fold increase in informative oligos between the cancer/non-cancer grouping versus random grouping. FIG. 5E shows data as in Table 9 and indicates the number of observed informative oligos between the indicated sample groups.

[0675] FIG. 5F shows distinct groups of oligos that differentiate between cancer and non-cancer samples. The figure shows a heatmap of the 40 samples tested with oligos selected that had more than 500 copies and p-value less than 0.005. There are clear subpopulations emerging with a distinct non-cancer cohort at the top. The non-cancer samples have boxes around them on the left axis. FIG. 5G is similar and shows results with an additional 20 cancer and 20 non-cancer samples. As shown, analysis with the 80 samples provides the emergence of more distinct and larger clusters.

[0676] The data for the additional 80 samples was also used to compare the consistency of informative oligos identified in different screening experiments. Of the 315 informative oligos identified using the first set of 40 patients, 86% of them showed fold-change in a consistent manner when tested on the independent set of 40 patients.

### Example 5: Enrichment of Oligonucleotide Probes Using a Balanced Library Design

[0677] In this Example, a naïve ADAPT oligonucleotide library was screened to enrich oligonucleotides that identify microvesicles circulating in the blood of breast cancer patients and microvesicles circulating in the blood of healthy, control individuals (i.e., without breast cancer). The input library was the naïve F-TRin-35n-B 8-3s library, which comprises a 5′ region (5′ CTAGCATGACTGCAGTACGT (SEQ ID NO. 4)) followed by the random naïve aptamer sequences of 35 nucleotides and a 3′ region (5′ CTGTCTCTTATACACATCTGACGCTGCCGACGA (SEQ ID NO. 5)). The “balanced” design is described in Example 23 of Int'l Patent Publication WO/2015/031694 (Appl. No. PCT/US2014/053306, filed Aug. 28, 2014), which is incorporated by reference herein in its entirety. The working library comprised approximately 2×10¹³ synthetic oligonucleotide sequences. The naïve library may be referred to as the “L0 Library” herein.

[0678] The L0 Library was enriched against fractionated plasma samples from breast cancer patients and from healthy (non-breast cancer) controls using the protocol shown in FIG. 11A. In Step 1, an aliquot of approximately 10¹¹ sequences of PCR-amplified L0 was incubated with pooled blood-plasma from 59 breast cancer patients with positive biopsy (represented by “Source A” in FIG. 11A). In parallel, another aliquot of 10¹¹ sequences was incubated with pooled blood-plasma from 30 patients with suspected breast cancer who proved negative on biopsy and 30 self declared healthy women (represented by “Source B” in FIG. 11A). In Step 2, microvesicles (extracellular vesicles, “EV”) were precipitated using ultracentrifugation (UC) from both L0-samples. The EV-associated oligodeoxynucleotides (ODNs) were recovered from the respective pellets. In Step 3, a counter-selection step (Step 3) was carried out by incubation of each enriched library with plasma from the different cohorts to drive the selection pressure towards enrichment of ODNs specifically associated with each sample cohort. In this step, sequences contained in the EV pellets were discarded. In Step 4, a second positive selection was performed. In this step, the sequences contained in the respective supernatants (sn) from Step 3 were mixed with plasma from another aliquot of each positive control sample-population, and EVs were again isolated. EV-associated ODNs were recovered, representing two single-round libraries called library L1 for positive enrichment of cancer (positive biopsy) patients, and library L2 for the positive enrichment against control patients. In a final step, L1 and L2 were amplified by PCR, reverted to single stranded DNA (ssDNA), and mixed to yield library L3.

[0679] This enrichment scheme was iterated two times more using L3 as the input to further reduce the complexity of the profiling library to approximately 10⁶ different sequences. In Step 2, UC was used for partitioning of microvesicles, which may increase the specificity for the EV fraction. In Steps 3 and 4, partitioning was performed using PEG-precipitation. This procedure enriches for ODNs specific for each biological source. Library L3 contains those ODNs that are associated with targets characteristic for EV-populations from both sources, i.e. ODNs acting as aptamers that bind to molecules preferentially expressed in each source. A total of biopsy-positive (n=59), biopsy-negative (n=30), and self-declared normal (n=30) were used in the first round of L3 enrichment, while only the cancer and non-cancer samples were used in the subsequent rounds.

[0680] The enriched libraries were characterized using next-generation-sequencing (NGS) to measure copy numbers of sequences contained in each profiling library. NGS of L0 shows that the vast majority of sequences existed in low copy numbers, whereas libraries L1 and L2 showed significantly higher average counts per sequence (FIG. 11B) and a reduced amount of different sequences, with unaltered total valid reads, (FIG. 11C) consistent with an enrichment process.

### Example 6: Analysis of ADAPT-Identified Biomarkers

[0681] As described herein, e.g., in the section entitled “Aptamer Target Identification,” an unknown target recognized by an aptamer can be identified. In this Example, an oligonucleotide probe library (also referred to as Adaptive Dynamic Artificial Poly-ligand Targeting (ADAPT) libraries or Topographical Oligonucleotide Probe “TOP” libraries) was developed as described here and targets of the screened oligonucleotides were determined. This Example used a ADAPT library generated by enriching microvesicles collected from the blood of breast cancer patients and normal controls (i.e., non-cancer individuals). The enrichment protocols are described herein in Example 5.

[0682] Materials & Methods

[0683] SBED Library Conjugation

[0684] A naïve F-TRin-35n-B 8-3s library was enriched against microvesicles from normal female plasma. The naïve unenriched library comprised a 5′ region (5′ CTAGCATGACTGCAGTACGT (SEQ ID NO. 4)) followed by the random naïve aptamer sequences of 35 nucleotides and a 3′ region (5′ CTGTCTCTTATACACATCTGACGCTGCCGACGA (SEQ ID NO. 5)). The naïve library may be referred to as the “L0 Library” herein and the enriched library referred to as the “L2 library.” See Example 5. The screened library was PCR amplified with a C6-amine sense primer (C6 Amine-5′ CTAGCATGACTGCAGTACGT 3′ (SEQ ID NO. 4)) and a 5′ phosphorylated anti-sense primer (5′ Phos TCGTCGGCAGCGTCA (SEQ ID NO. 6)), the purified product was strand separated and conjugated with sulfo-SBED (Thermo Scientific) according to Vinkenborg et al. (Angew Chem Int Ed Engl. 2012, 51:9176-80) with the following modifications: The reaction was scaled down to 5μg C6-amine DNA library (8.6 μM) in 25 mM HEPES-KOH, 0.1M NaCl, pH 8.3 and incubated with either 100-fold molar excess of sulfo-SBED or DMSO in a 21 μL volume for 30 min at room temp in the dark. The SBED-conjugated library was immediately separated from the unconjugated library and free sulfo-SBED by injection onto a Waters X-Bridge™ OST C-18 column (4.6 mm×50 mm) and fractionated by HPLC (Agilent 1260 Infinity) with a linear gradient Buffer A: 100 mM TEAA, pH7.0, 0% ACN to 100 mM TEAA, pH7.0, 25% ACN at 0.2 ml/min, 65° C. There SBED-conjugated fractions were desalted into water with Glen Gel-Pak™ Cartridges and concentrated by speed-vac. SBED conjugation was confirmed by LC-MS and/or a dot blot with streptavidin-HRP detection.

[0685] Binding Reaction and Cross-Linking

[0686] SBED library functionalization was tested by performing the ADAPT assay with SBED vs DMSO mock conjugated control C6-amine library and sequenced on a HiSeq 2500™ (Illumina Corp.). The aptamer precipitation was performed with forty-eight ADAPT reactions incubated for 1 hr with end-over-end rotation at room temp with a 5 ng input of SBED conjugated library per 200 μL of plasma (pre-spun to remove cellular debris at 10,000×g for 20 min, 4° C.) in 1×PBS, 3 mM MgCl₂, 0.01 mM dextran sulfate, 40 ng/μl salmon sperm DNA and 40 ng/μl yeast transfer RNA, and cOmplete ULTRA Mini EDTA-free™ protease inhibitors (Roche) equivalent to ˜240 ng library and 9.6 mls plasma. A duplicate set of 48 reactions was prepared with the DMSO control C6-amine library. Aptamer library-protein complexes were precipitated with incubation in 6% PEG8000 for 15 min at 4° C. then centrifuged at 10,000×g for 5 min. Pellets were washed with 1 ml 1×PBS, 3 mM MgCl2 by gentle inversion to remove unbound aptamers. The washed pellets were resuspended in 100 μL of water and subjected to photo-cross-linking at 365 nm with a hand-held 3UV (254NM/302NM/365NM) lamp, 115 volts (Thermo Scientific) for 10 min on ice with 1-2 cm between the 96-well plate and lamp.

[0687] Oligonucleotide Precipitation

[0688] Cross-linked reactions were subsequently pooled (˜4.8 ml) per library or 4.8 ml of 1×PBS (AP bead only control) and incubated with 10 μL of Prepared Dynabeads® MyOne™ Streptavidin C1 (10 mg/ml) (Life Technologies) (pre-washed with 1×PBS, 0.01% Triton X-100) shaking for 1 hr at room temp. Beads were transferred to an eppendorf tube and lysed for 20 min with lysis buffer (50 mM Tris-HCl, 10 mM MgCl2, 200 mM NaCl, 0.5% Triton X-100, 5% glycerol, pH 7.5) on ice, washed 3 times with wash buffer 1 (10 mM Tris-HCl, 1 mM EDTA, 2M NaCl, 1% Triton X-100), followed by 2 times with wash buffer 2 (10 mM Tris-HCl, 1 mM EDTA, 2M NaCl, 0.01% Triton X-100) as described by Vinkenborg et al. (Angew Chem Int Ed Engl. 2012, 51:9176-80). Cross-linked proteins were eluted by boiling 15 min in 1×LDS sample buffer with reducing agent added (Life Technologies) and loaded on a 4-12% SDS-PAGE gradient gel (Life Technology). Proteins and DNA were detected with double staining with Imperial Blue Protein Stain (Thermo Scientific) followed by Prot-SIL2 TM silver stain kit (Sigma) used according to manufacturer's instructions in order to enhance sensitivity and reduce background.

[0689] Protein Identification

[0690] Protein bands that appeared to differ between the cancer and normal were excised from the gradient gels and subjected to liquid chromatography-tandem mass spectrometry (LC-MS/MS).

[0691] Results

[0692] ADAPT protein targets were identified from bands cut from a silver stained SDS-PAGE gel (FIG. 6). Aptamer-SBED protein complexes (lane 3) or Aptamer-DMSO protein complexes (control-lane 4) were precipitated with 6% PEG8000, subjected to UV photo-cross-linking, and pulled-down with Streptavidin coated beads. Eluate was analyzed under reducing conditions by SDS-PAGE and silver staining. Aptamer library alone (5 ng) (lane 1) was loaded as a control for migration of the library (second to bottom arrows) and an equal volume of eluate from a bead only sample (lane 4) was loaded as a streptavidin control to control for potential leaching of the streptavidin monomer (bottom arrow) under the harsh elution conditions. Upper arrows (“Targets”) indicate specific or more predominant bands identified with the SBED-conjugated library vs. the mock DMSO treated control C6-amine library. Indicated target protein bands were cut out and sent for LC-MS/MS protein identification or indicated DNA library bands were eluted, reamplified and sequenced. The identified proteins are those that appeared as upregulated in the normal samples.

[0693] Tables 10-17 list human proteins that were identified in 8 bands excised from the silver stained gel. In all tables the proteins are those identified in the oligo-SBED protein complexes with proteins identified in the corresponding control lanes removed. The band numbers in the tables indicate different bands cut from the gel (FIG. 6). Accession numbers in the table are from the UniProt database (www.uniprot.org). “GN=” is followed by the gene name. Various protein classifications indicated in the Tables 10-17 include Nucleic Acid Binding Proteins (NAB), Tumor suppressors (TS), cell adhesion/cytoskeletal (CA/CK) and abundant plasma proteins (ABP).

TABLE 10
Band 3

| Accession | | |
|---|---|---|
| number | Class | Protein name |
| P02538 | CA/CK | Keratin, type II cytoskeletal 6A GN = KRT6A |
| P15924 | CA/CK | Desmoplakin GN = DSP |
| P04259 | CA/CK | Keratin, type II cytoskeletal 6B GN = KRT6B |
| P60709 | CA/CK | Actin, cytoplasmic 1 GN = ACTB |
| P20930 | CA/CK | Filaggrin GN = FLG |
| P07476 | CA/CK | Involucrin GN = IVL |
| P31947 | TS | 14-3-3 protein sigma GN = SFN |
| Q7Z794 | CA/CK | Keratin, type II cytoskeletal 1b GN = KRT77 |
| P02545 | NAB | Prelamin-A/C GN = LMNA |
| P19012 | CA/CK | Keratin, type I cytoskeletal 15 GN = KRT15 |
| P47929 | CA/CK & TS | Galectin-7 GN = LGALS7 |
| P11142 | | Heat shock cognate 71 kDa protein GN = HSPA8 |
| P58107 | NAB | Epiplakin GN = EPPK1 |
| P08107 | | Heat shock 70 kDa protein 1A/1B GN = HSPA1A |
| Q02413 | CA/CK | Desmoglein-1 GN = DSG1 |
| P06396 | CA/CK | Gelsolin GN = GSN |
| O60814 | NAB | Histone H2B type 1-K GN = HIST1H2BK |
| P68104 | NAB | Elongation factor 1-alpha 1 GN = EEF1A1 |
| P05387 | NAB | 60S acidic ribosomal protein P2 GN = RPLP2 |
| Q7RTS7 | CA/CK | Keratin, type II cytoskeletal 74 GN = KRT74 |
| P31946 | TS | 14-3-3 protein beta/alpha GN = YWHAB |
| Q13835 | CA/CK | Plakophilin-1 GN = PKP1 |
| P14923 | CA/CK | function plakoglobin GN = JUP |
| P09651 | NAB | Heterogeneous nuclear ribonucleoprotein A1 GN = HNRNPA1 |
| P07900 | | Heat shock protein HSP 90-alpha GN = HSP90AA1 |
| Q96KK5 | NAB | Histone H2A type 1-H GN = HIST1H2AH |
| P04406- | CA/CK | Glyceraldehyde-3-phosphate dehydrogenase GN = GAPDH |
| P10412 | NAB | Histone H1.4 GN = HIST1H1E |
| P04792 | | Heat shock protein beta-1 GN = HSPB1 |
| Q9NZT1 | | Calmodulin-like protein 5 GN = CALML5 |
| P81605 | | Dermcidin GN = DCD |
| P27348 | TS | 14-3-3 protein theta GN = YWHAQ |
| P55072 | NAB | Transitional endoplasmic reticulum ATPase GN = VCP |
| Q09666 | NAB | Neuroblast differentiation-associated protein AHNAK GN = AHNAK |
| P23246 | NAB | Splicing factor, proline- and glutamine-rich GN = SFPQ |
| Q15149 | CA/CK | Plectin GN = PLEC |
| Q8NC51 | NAB | Plasminogen activator inhibitor 1 RNA-binding protein GN = SERBP1 |
| P07237 | | Protein disulfide-isomerase GN = P4HB |
| O60437 | CA/CK | Periplakin GN = PPL |
| P01717 | ABP | Ig lambda chain V-IV region Hil |
| P55884 | NAB | Eukaryotic translation initiation factor 3 subunit B GN = EIF3B |
| P11021 | | 78 kDa glucose-regulated protein GN = HSPA5 |
| P01024 | | Complement C3 GN = C3 |
| P04350 | CA/CK | Tubulin beta-4A chain GN = TUBB4A |
| P01857 | ABP | Ig gamma-1 chain C region GN = IGHG1 |
| P61247 | NAB | 40S ribosomal protein S3a GN = RPS3A |
| P62937 | | Peptidyl-prolyl cis-trans isomerase A GN = PPIA |
| O15020 | CA/CK | Spectrin beta chain, non-erythrocytic 2 GN = SPTBN2 |
| P30101 | | Protein disulfide-isomerase A3 GN = PDIA3 |
| Q6KB66 | CA/CK | Keratin, type II cytoskeletal 80 GN = KRT80 |
| Q9UJU6 | CA/CK | Drebrin-like protein GN = DBNL |
| P47914 | NAB | 60S ribosomal protein L29 GN = RPL29 |
| P39023 | NAB | 60S ribosomal protein L3 GN = RPL3 |
| A6NMY6 | CA/CK | Putative annexin A2-like protein GN = ANXA2P2 |
| P60174 | CA/CK | Triosephosphate isomerase GN = TPI1 |
| P35241 | CA/CK | Radixin GN = RDX |
| P07305 | NAB | Histone H1.0 GN = H1F0 |
| P15259 | CA/CK | Phosphoglycerate mutase 2 GN = PGAM2 |
| P0CG05 | ABP | Ig lambda-2 chain C regions GN = IGLC2 |
| Q92817 | CA/CK | Envoplakin GN = EVPL |
| P06733 | NAB | MBP-1 of Alpha-enolase GN = ENO1 |
| P22626 | NAB | Heterogeneous nuclear ribonucleoproteins A2/B1 GN = HNRNPA2B1 |
| P62424 | NAB | 60S ribosomal protein L7a GN = RPL7A |
| P60660 | CA/CK | Myosin light polypeptide 6 GN = MYL6 |
| P04083 | NAB | Annexin A1 GN = ANXA1 |
| Q14134 | NAB | Tripartite motif-containing protein 29 GN = TRIM29 |
| P39019 | NAB | 40S ribosomal protein S19 GN = RPS19 |
| Q8WVV4 | CA/CK | Protein POF1B GN = POF1B |
| Q02878 | NAB | 60S ribosomal protein L6 GN = RPL6 |
| Q9Y6X9 | NAB | MORC family CW-type zinc finger protein 2 GN = MORC2 |
| Q9NQC3 | NAB | Reticulon-4 GN = RTN4 |
| Q5T753 | CA/CK | Late cornified envelope protein 1E GN = CA/CK E |

SBED associated

| | |
|---|---|
| P56202 | Cathepsin W |
| P80188 | Neutrophil gelatinase-associated lipocalin precursor |
| Q13017 | Rho GTPase-activating protein 5 |
| Q6UB98 | Ankyrin repeat domain-containing protein 12 |
| P54753 | Ephrin type-B receptor 3 |
| Q5JRS4 | Olfactory receptor 10J3 |
| P82279 | Protein crumbs homolog 1 |
| O00763 | Acteyl-CoA carboxylase 2 |
| P02533; P08779 | Keratin, type 1 cytoskeletal 14, 16 |
| P26012 | Integrin beta-8 |
| Q14766 | Latent-transforming growth factor beta-binding protein 1 |

TABLE 11
Band 9

| Accession | | |
|---|---|---|
| number | Class | Protein name |
| P61626 | | Lysozyme C GN = LYZ |
| Q9HCK1 | NAB | DBF4-type zinc finger-containing protein 2 |
| | | GN = ZDBF2 |

TABLE 12
Band 1

| Accession | | |
|---|---|---|
| number | Class | Protein name |
| P01834 | ABP | Ig kappa chain C region GN = IGKC |
| P01765 | ABP | Ig heavy chain V-III region TIL |
| P04003 | NAB | C4b-binding protein alpha chain GN = C4BPA |
| P60709 | CA/CK | Actin, cytoplasmic 1 GN = ACTB |
| Q5T751 | CA/CK | Late cornified envelope protein 1C GN = LCE1C |

TABLE 13
Band 5

| Accession | | |
|---|---|---|
| number | Class | Protein name |
| P01860 | ABP | Ig gamma-3 chain C region GN = IGHG3 |
| O60902 | NAB | Short stature homeobox protein 2 GN = SHOX2 |

TABLE 14
Band 7

| Accession | | |
|---|---|---|
| number | Class | Protein name |
| Q04695 | CA/CK | Keratin, type I cytoskeletal 17 GN = KRT17 |
| Q7Z794 | CA/CK | Keratin, type II cytoskeletal 1b GN = KRT77 |
| Q6KB66 | CA/CK | Keratin, type II cytoskeletal 80 GN = KRT80 |
| P01833 | | Polymeric immunoglobulin receptor GN = PIGR |
| P01042 | | Kininogen-1 GN = KNG1 |
| Q02413 | CA/CK | Desmoglein-1 GN = DSG1 |
| P15924 | CA/CK | Desmoplakin GN = DSP |
| Q8TF72 | | Protein Shroom3 GN = SHROOM3 |
| P02671 | ABP | Fibrinogen alpha chain GN = FGA |
| Q5T749 | CA/CK | Keratinocyte proline-rich protein GN = KPRP |
| Q5VZP5 | | Inactive dual specificity phosphatase 27 |
| | | GN = DUSP27 |
| Q5T751 | CA/CK | Late cornified envelope protein 1C GN = LCE1C |
| Q9UL12 | | Sarcosine dehydrogenase, mitochondrial |
| | | GN = SARDH |
| P00698 | | Lysozyme C OS = Gallus gallus GN = LYZ |
| Q8N114 | | Protein shisa-5 GN = SHISA5 |

TABLE 15
Band 15

| Accession | | |
|---|---|---|
| number | Class | Protein name |
| P08238 | | Heat shock protein HSP 90-beta GN = HSP90AB1 |
| P68104 | NAB | Elongation factor 1-alpha 1 GN = EEF1A1 |
| P02675 | ABP | Fibrinogen beta chain GN = FGB |
| Q8TF72 | | Protein Shroom3 GN = SHROOM3 |
| P0CG05 | ABP | Ig lambda-2 chain C regions GN = IGLC2 |
| P78386 | CA/CK | Keratin, type II cuticular Hb5 GN = KRT85 |
| Q7Z5Y6 | | Bone morphogenetic protein 8A GN = BMP8A |
| O14633 | CA/CK | Late cornified envelope protein 2B GN = LCE2B |

TABLE 16
Band 17

| Accession | | |
|---|---|---|
| number | Class | Protein name |
| P02538 | CA/CK | Keratin, type II cytoskeletal 6A GN = KRT6A |
| P01834 | ABP | Ig kappa chain C region GN = IGKC |
| P06702 | | Protein S100-A9 GN = S100A9 |
| P68104 | NAB | Elongation factor 1-alpha 1 GN = EEF1A1 |
| P01024 | | Complement C3 GN = C3 |
| P81605 | | Dermcidin GN = DCD |
| P05109 | | Protein S100-A8 GN = S100A8 |
| Q5T751 | CA/CK | Late cornified envelope protein 1C GN = LCE1C |

TABLE 17
Band 19

| Accession | | |
|---|---|---|
| number | Class | Protein name |
| P02768 | NAB | Serum albumin GN = ALB |
| P0CG05 | ABP | Ig lambda-2 chain C regions GN = IGLC2 |
| P06702 | | Protein S100-A9 GN = S100A9 |
| P08238 | | Heat shock protein HSP 90-beta GN = HSP90AB1 |
| P60709 | CA/CK | Actin, cytoplasmic 1 GN = ACTB |
| P13647 | CA/CK | Keratin, type II cytoskeletal 5 GN = KRT5 |
| P01616 | ABP | Ig kappa chain V-II region MIL |
| Q86YZ3 | CA/CK | Homerin GN = HRNR |
| P01857 | ABP | Ig gamma-1 chain C region GN = IGHG1 |
| P62805 | NAB | Histone H4 GN = HIST1H4A |
| P59665 | | Neutrophil defensin 1 GN = DEFA1 |
| P61626 | | Lysozyme C GN = LYZ |
| P01024 | ABP | Complement C3 GN = C3 |
| Q8TF72 | | Protein Shroom3 GN = SHROOM3 |
| P83593 | ABP | Ig kappa chain V-IV region STH (Fragment) |
| P01700 | ABP | Ig lambda chain V-I region HA |
| P01877 | ABP | Ig alpha-2 chain C region GN = IGHA2 |
| Q9UL12 | | Sarcosine dehydrogenase, mitochondrial |
| | | GN = SARDH |
| Q6NXT2 | NAB | Histone H3.3C GN = H3F3C |
| P02788 | NAB | Lactotransferrin GN = LTF |
| P02787 | ABP | Serotransferrin GN = TF |

[0694] Certain proteins were identified in multiple bands. For example, IGLC2 was identified in bands 3, 15 and 19 and SHROOM3 was identified in bands 7, 15, 19. This may be due to degradation products, isoforms or the like. These experiments identified 108 proteins (plus 2 lysozyme controls), comprising among others 34 Nucleic Acid Binding Proteins (NAB) where 7 of the 34 are putative tumor suppressors/repressors; 37 cell adhesion/cytoskeletal (CA/CK); and 14 abundant plasma proteins (ABP). All of the tumor suppressors/repressors are DNA/RNA binding proteins. Other proteins comprise chaperones, signaling molecules etc.

[0695] The biomarkers in this Example can be used to detect microvesicles that are indicative of cancer or non-cancer samples.

### Example 7: Identification of Biomarkers Through Affinity Enrichment with an Enriched Oligonucleotide Library and Mass Spectrometry

[0696] This Example continues upon the Example above. Identification of protein-protein and nucleic acid-protein complexes by affinity purification mass spectrometry (AP-MS) can be hampered in samples comprising complex mixtures of biological components (e.g., bodily fluids including without limitation blood and derivatives thereof). For example, it may be desirable to detect low abundance protein and nucleic acid-protein complexes in a complex milieu comprising various components that may interact promiscuously with specific binding sites such as high abundance proteins that interact non-specifically with the affinity resin. AP-MS has been used previously to enrich for pre-identified targets of interest using individual DNA or RNA aptamers or specific nucleic acid binding domains. In this Example, an enriched oligonucleotide probing library was used as the affinity reagent. This approach combined with mass spectrometry enables the identification of differentially expressed biomarker from different disease states or cellular perturbations without relying on a priori knowledge of the targets of interest. Such biomarker may comprise proteins, nucleic acids, miRNA, mRNA, carbohydrates, lipid targets, combinations thereof, or other components in a biological system.

[0697] The method comprises identification of an enriched oligonucleotide probe library according to the methods of the invention followed by target identification with affinity purification of the bound probing library and mass spectrometry. The members of the enriched oligonucleotide probing library comprise an affinity tag. A biological sample is probed with the oligonucleotide probe library, affinity purification of the oligonucleotide probe library via the affinity tag is performed which will accordingly purify biological entities in complex with various members of the probe library, and read-out of targets that purified with the members of the probe library is performed using liquid chromatography-tandem mass spectrometry (LC-MS/MS) for proteins or oligonucleotide targets (e.g., miRNA or mRNA) with next generation sequencing (NGS). Confirmation of protein targets is performed using quantitative mass spectrometry (MS), e.g., using MRM/SRM or SWATH based methods.

[0698] The method of the Example lends itself to various options. For example, any appropriate affinity tags can be used for affinity pull-down, including without limitation anti-sense oligonucleotides, biotin, polyhistidine, FLAG octapeptide (i.e., N-DYKDDDDK-C(SEQ ID NO. 7), where N stands for Amino-terminus and C stands for Carboxy terminus), 3× FLAG, Human influenza hemagglutinin (HA)-tag (i.e., N-YPYDVPDYA-C (SEQ ID NO. 8)), myc-tag (N-EQKLISEEDL-C (SEQ ID NO. 9)), other such as known in the art, and combinations thereof. Similarly, any appropriate enrichment support can be used in addition to the magnetic streptavidin beads exemplified herein, including without limitation other bead systems, agarose beads, planar arrays or column chromatography supports. It follows that the various supports can be coupled with the various affinity reagents appropriate for the oligonucleotide library, including without limitation streptavidin, avidin, anti-His tag antibodies, nickel, and the like. The different affinity tags and supports can be combined as desired. This Example used cross-linking but in certain cases such cross-linking is not necessary and may even be undesirable, e.g., to favor identification of high affinity complex formation. When cross-linking is desired, any appropriate cross-linkers can be used to carry out the invention, including BS2G, DSS, formaldehyde, and the like. Other appropriate cross-linkers and methods are described herein. See, e.g., Section “Aptamer Target Identification.” Lysis buffers and wash stringencies can be varied, e.g, depending on whether complexes are cross-linked or not. Less stringent lysis/wash conditions may produce a wider array of potential protein complexes of interest whereas more stringent lysis/wash conditions may favor higher affinity oligo-target complexes and/or targets comprising specific proteins (e.g., by disassociating larger complexes bound to the oligos). One of skill will further appreciate that qualitative and/or quantitative LC-MS/MS may be used for target detection and verification. Similarly, metabolic labeling and label-free approaches may be used for quantitative MS, including without limitation spectral counting, SILAC, dimethyl labeling, TMT labeling, Targeted MS with SRM/MRM or SWATH, and the like.

### REFERENCES

[0699] Vickenborg et al. “Aptamer based affinity labeling of proteins”, Angew Chem Int. 51(36):9176-80 (2012).
[0700] Tacheny, M, Arnould, T., Renard, A. “Mass spectrometry-based identification of proteins interacting with nucleic acids”, Journal of Proteomics 94; 89-109 (2013).
[0701] Faoro C and Ataide SF. “Ribonomic approaches to study the RNA-binding proteome.”, FEBS Lett. 588(20):3649-64 (2014).
[0702] Budayeva H G, Cristea, I M, “A mass spectrometry view of stable and transient protein inteeractions.” Adv Exp Med Biol. 806:263-82 (2014).

### Example 8: Protocol for Affinity Capture Using Oligonucleotide Probing Library

[0703] This Example presents a detailed protocol for the method of affinity capture using an oligonucleotide probing library presented in the Example above.

[0704] Protocol:

[0705] The oligonucleotide probe library comprises F-TRin-35n-B-8-3s described herein either desthiobiotin labeled or unlabeled library and binding to normal (i.e., non-cancer) female plasma. The oligonucleotide probe library is enriched against the plasma samples as described elsewhere (e.g., in Example 4). The plasma samples are processed separately against the desthiobiotin labeled or unlabeled oligonucleotide libraries. General parameters included the following:

[0706] 48 normal plasma samples are pooled for enrichment of each oligonucleotide library (Desthiobiotin or Unlabeled)

[0707] 200 μl input plasma per sample

[0708] Ultracentrifugation (UC) is used to pre-clear the samples

[0709] 5 ng of each aptamer library is added to each sample

[0710] Binding competitors for all library samples include 0.01 mM dextran sulfate, 340 ng for tRNA and 340 ng Salmon sperm DNA as described elsewhere herein

[0711] 6% PEG 8000 is used for precipitation of microvesicles within the samples

[0712] Affinity purification is performed with C1 Streptavidin beads (MyOne Streptavidin Beads C1-65001, lot 2 ml (10 mg/ml))

[0713] Buffers:

[0714] Plasma dilution: 6 mM MgCl2 in 2×PBS

[0715] Pellet Wash Buffer: 1×PBS, 3 mM MgCl2

[0716] PEG Ppt Buffer: 20% Peg8000 in 1×PBS, 3 mM MgCl2

[0717] Bead Prep Buffer: 1XPBS containing 0.01% Triton X-100

[0718] Lysis Buffer: prepare a 2× stock solution consisting of 100 mM Tris-HCl, 20 mM MgCl2, 400 mM NaCl, 1% Triton X-100, 10% glycerol, pH 7.5. Diluted to 1× with water 1:1 prior to using.

[0719] AP Wash buffer 1: 10 mM Tris-HCl, 1 mM EDTA, 2M NaCl, 1% Triton X-100, pH 7.5

[0720] AP wash buffer 2: 10 mM Tris-HCL, 1 mM EDTA, 2M NaCl, 0.01% Triton X-100, pH 7.5

[0721] Biotin Elution buffer 1: 5 mM Biotin, 20 mM Tris, 50 mM NaCl, pH 7.5

[0722] 1×LDS, 1× Reducing buffer 2

[0723] Reagent/Instrument Prep:

[0724] Pre-chill Ultracentrifuge to 4° C.

[0725] Protease inhibition: dissolve 2 tablets of “cOmplete ULTRA MINI EDTA-free EASYpack” protease inhibitor in 1100 μl of H2O (20× stock of protease inhibitor).

[0726] Plasma Preparation (for each of Desthiobiotin or Unlabeled oligonucleotide libraries):

[0727] 1. Add 50 μl of protease inhibitor to each ml of sample (on top of frozen plasma) in a room temperature (RT) water bath. Will use 22 mls of pooled plasma, so 1100 μl inhibitor.

[0728] 2. To remove cell/debris, spin samples at 7500×g 20 min, 4° C. in the Ultracentrifuge.

[0729] 3. Collect the supernatant, pool and measure volume & record.

[0730] 4. Add an equal volume of 2×PBS, 6 mM MgCl₂ to the plasma.

[0731] 5. Label low-retention eppendorf tubes 1-96.

[0732] 6. Transfer 400 μl of each sample to eppendorf tubes based on appropriate tube map

[0733] 7. Using an electronic P200, add competitors: 8.6 μl of 40 ng/μl Salmon sperm DNA; 8.6 μl of 40 ng/μl tRNA; 8.6 μl of 0.5× S1.

[0734] 8. Incubate at RT with end over end rotation for 10 min.

[0735] 9. Add 10 μL of appropriate oligo library, mix well. Save any leftover diluted library for gel control (see below).

[0736] 10. Incubate 1 hr at RT with end over end rotation.

[0737] 11. Using an electronic repeat P100, add 187 μl of 20% PEG 8000 to sample for a final 6% concentration to the 435.5 μl of sample/oligo library. Invert a few times to mix and incubate for 15 min at 4° C.

[0738] 12. Spin each sample in table top centrifuge at 10,000×g for 5 min.

[0739] 13. Remove supernatant and discard, add 1 ml 1×PBS, 3 mM MgCl₂ to pellet.

[0740] 14. Wash pellet by gentle inversion

[0741] 15. Remove buffer, re-suspend pellets in 100 μl 1×PBS, 3 mM MgCl₂: incubate at RT for 10 min on mixmate @ 900 rpm to re-suspend. Make sure each sample is well re-suspended by pipetting.

[0742] 16. Pool all desthiobiotin library samples into one 50 ml falcon tube, and the unlabeled library into another, total volume for each should be 4800 μl.

[0743] 17. Take 10 μL aliquot for the input into AP sample for gel (add 10 μL of 2×LDS buffer w/2× reducing agent.

[0744] Affinity Purification:

[0745] 18. Prepare 10 μL of MyOne Strep-coated Magnetic beads per each condition into a 1.5 ml eppendorf tube and place on a magnetic bead rack. Have a Bead only control as well (n=3)

[0746] 19. Remove supernatant and wash 1×500 μl with Bead buffer.

[0747] 20. Discard supernatant

[0748] 21. Resuspend beads in an equal volume of 1×PBS, 3 mM MgCl₂ (equal vol to what was taken out originally=10 μl)

[0749] 22. Add the 10 μl of beads directly to the 4780 μL from step 19. To Bead only control add PBS.

[0750] 23. Incubate samples with streptavidin beads 1 hr RT on plate shaker (taped).

[0751] 24. Place on the large magnetic stand for 1 min and remove supernatant

[0752] 25. Add 1.5 mL of 1× lysis buffer to the samples (do 3×500 μl with a good rinse of the 50 mL falcon tube for each to collect all the beads) and transfer to a new set of eppendorf tubes.

[0753] 26. Incubate for 20 min on ice.

[0754] 27. Place tubes in magnetic bead rack, let equilibrate 1 min and remove the supernatant.

[0755] 28. Wash the beads with wash buffer #1 via vortexing. Resuspend well.

[0756] 29. Place tubes on magnetic bead rack, let equilibrate 1 min and remove the supernatant

[0757] 30. Wash 2 additional times as with wash buffer #1 steps 27-29 (total 3 washes with wash buffer #1)

[0758] 31. Repeat steps 27-29 (2) additional times with wash buffer #2

[0759] 32. During the last wash transfer beads to a new eppendorf tube. (to reduce non-specific binding)

[0760] 33. Do one dry spin to make sure all residual wash buffer is removed.

[0761] 34. Add 10 μl of Biotin Elution buffer 1 to beads

[0762] 35. Incubate for 15 minutes at 37° C.

[0763] 36. Place on magnetic stand for 1 min, collect sup and transfer to a new tube, add 10 μL of 2× LDS, 2× Reducing agent to eluted sample. Save as Elution #1.

[0764] 37. Add 10 μl of 1×LDS Sample Buffer, 1× Reducing buffer to magnetic beads.

[0765] 38. Boil the samples for 15 min at 90° C. The boiling time is 15 minutes to ensure the streptavidin on the beads unfolds and releases the biotinylated aptamer-protein complex.

[0766] 39. Place samples on magnetic stand on ice and collect the eluted sample. This is Elution #2. Discard the beads.

[0767] 40. Gel 1 layout:

[0768] Lane 1: 5 ng Desthiobiotin library

[0769] Lane 2: 1×LDS

[0770] Lane 3: Marker

[0771] Lane 4: Desthiobiotin Elution #1

[0772] Lane 5: Unlabeled Elution #1

[0773] Lane 6: Bead only Elution #1

[0774] Lane 7: Desthiobiotin Elution #2

[0775] Lane 8: Unlabeled Elution #2

[0776] Lane 9: Bead only Elution #2

[0777] Lane 10: Input for AP (saved from step 17)

[0778] Running Reducing SDS Gel:

[0779] Prepare 1× MOPS SDS Running Buffer from 20× MOPS SDS Buffer

[0780] Use 10 or 12 well 4-12% Bis Tris gel

[0781] Peel off tape seal and place in the gel box. Insert spacer for second gel cassette if needed

[0782] Fill the inside/upper chamber with running buffer MOPS (1×) and 500 ul Antioxidant

[0783] Remove the comb carefully, not disturbing the wells

[0784] Rinse the wells with the running buffer to remove the storage buffer which can interfere with sample running

[0785] Slowly load samples to each well carefully using L-20 tip

[0786] Fill the outer/lower chamber with approximately 600 ml of running buffer MOPS (1×)

[0787] Place top portion of unit and secure correct electrodes

[0788] Run the gel to migrate proteins

[0789] 100 V constant for samples to move through stack (until all samples line up) for 15 min

[0790] Increase to 150 V constant for running (until visible sample buffer comes to bottom) for ˜1 hr

[0791] At the end of the run, stop the power supply and remove the gel cassettes from cell

[0792] Disassemble the gel cassette by with gel knife.

[0793] Remove one side of cassette case. Trim off the gel foot and wells (avoid drying gel).

[0794] Transfer gel into container filled with Mili Q water and perform a quick wash.

[0795] Silver Staining:

[0796] Materials:

[0797] ProteoSilver TMSilver Stain Kit, Sigma Catalog No. PROT-SIL1, Lot No. SLBJ0252V

[0798] Ethanol, Fisher Scientific Catalog No. BP2818-4, Lot No. 142224

[0799] Acetic acid, Acros organics Catalog No. 14893-0025, Lot No. B0520036

[0800] Water, Sigma Catalog No. W4502, Lot No. RNBD1581

[0801] Preparation:

[0802] 1. Fixing solution. Add 50 ml of ethanol and 10 ml of acetic acid to 40 ml of ultrapure water.

[0803] 2. 30% Ethanol solution. Add 30 ml of ethanol to 70 ml of ultrapure water.

[0804] 3. Sensitizer solution. Add 1 ml of ProteoSilver Sensitizer to 99 ml of ultrapure water. The prepared solution should be used within 2 hours. A precipitate may form in the ProteoSilver Sensitizer. This precipitate will not affect the performance of the solution. Simply allow the precipitate to settle and remove 1 ml of the supernatant.

[0805] 4. Silver solution. Add 1 ml of ProteoSilver Silver Solution to 99 ml of ultrapure water. The prepared solution should be used within 2 hours.

[0806] 5. Developer solution. Add 5 ml ProteoSilver Developer 1 and 0.1 ml ProteoSilver Developer 2 to 95 ml of ultrapure water. The developer solution should be prepared immediately (<20 minutes) before use.

[0807] 6. All steps should be carried out in the hood and waste needs to be collected in toxic designated container.

[0808] Procedure

[0809] A. Direct Silver Staining

[0810] All steps are carried out at room temperature on an orbital shaker at 60 to 70 rpm.

[0811] 1. Fixing—After electrophoresis of the proteins in the mini polyacrylamide gel, place the gel into a clean tray with 100 ml of the Fixing solution overnight in the hood. Cover tightly.

[0812] 2. Ethanol wash—Decant the Fixing solution and wash the gel for 10 minutes with 100 ml of the 30% Ethanol solution.

[0813] 3. Water wash—Decant the 30% Ethanol solution and wash the gel for 10 minutes with 200 ml of ultrapure water.

[0814] 4. Sensitization—Decant the water and incubate the gel for 10 minutes with 100 ml of the Sensitizer solution.

[0815] 5. Water wash—Decant the Sensitizer solution and wash the gel twice, each time for 10 minutes with 200 ml of ultrapure water.

[0816] 7. Silver equilibration—Decant the water and equilibrate the gel for 10 minutes with 100 ml of the Silver solution.

[0817] 8. Water wash—Decant the Silver solution and wash the gel for 1 to 1.5 minutes with 200 ml of ultrapure water.

[0818] 9. Gel development—Decant the water and develop the gel with 100 ml of the Developer solution. Development times of 3 to 7 minutes are sufficient to produce the desired staining intensity for most gels. Development times as long as 10 to 12 minutes may be required to detect bands or spots with very low protein concentrations (0.1 ng/mm2).

[0819] 10. Stop—Add 5 ml of the ProteoSilver Stop Solution to the developer solution to stop the developing reaction and incubate for 5 minutes. Bubbles of CO₂ gas will form in the mixture.

[0820] 11. Storage—Decant the Developer/Stop solution and wash the gel for 15 minutes with 200 ml of ultrapure water. Store the gel in fresh, ultrapure water and take picture for documentation.

[0821] Protein Identification

[0822] Protein bands of interest were excised from the gradient gels and subjected to liquid chromatography-tandem mass spectrometry (LC-MS/MS) as above.

### Example 9: Use of an Oligonucleotide Probe Library to Characterize Breast Cancer Samples

[0823] An oligonucleotide probe library comprising approximately 2000 different probe sequences was constructed and used to probe approximately 500 individual breast cancer and non-cancer samples. The probe sequences were derived from different screening experiments and are listed herein in SEQ ID NOs 10-2921. The oligonucleotides listed in these tables were synthesized and pooled together. The samples were plasma samples from 212 breast cancer patients, 177 biopsy confirmed non-cancer patients, and 117 normal control patients (self-reported as non-cancer). The plasma samples were contacted with the oligonucleotide probe library and microvesicles were isolated using PEG precipitation. Oligonucleotides that were recovered with the microvesicles were isolated. Next Generation Sequencing (Illumina HiSeq) was used to identify the isolated sequences for each sample.

[0824] Analysis of significance of difference identified 18 aptamers with p-values below 0.01 when compared Cancer/Normal, 15 aptamers with p-values below 0.001 when compared cancer/Non-Cancer, 28 aptamers with p-values below 0.001 when compared Non-Cancer/Normal.

[0825] Multi-oligonucleotide panels were next constructed using a cross-validation approach. Briefly, 50 samples were randomly withheld from the sample cohort. The performance of individual oligonucleotides to distinguish the remaining cancers and non-cancer/normals was determined using logistic regression methodology. Additional oligonucleotides were added iteratively and performance was assessed using logistic regression until further performance improvements were no longer obtained with additional oligonucleotides. The approach generally led to panels of approximately 20-100 different probe sequences. The constructed panels were then used to classify the 50 withheld samples and diagnostic performance was assessed using Receiver Operating Curve (ROC) analysis and estimation of the Area Under the Curve (AUC).

[0826] In approximately 300 rounds of cross-validation, the average AUC was 0.6, thus showing that the average performance was statistically better than random (i.e., AUC of 0.5) and that the probe library could distinguish breast cancer and non-breast cancer/normal patient samples. AUC values as high as 0.8 were observed for particular cross validations. FIGS. 7A-B illustrate a model generated using a training (FIG. 7A) and test (FIG. 7B) set from a round of cross validation. The AUC was 0.803. The variable regions of the sequences used to build this model are shown in Table 18. Another exemplary round of cross-validation is shown in FIGS. 7C-D. The AUC was 0.678.

[0827] The SEQ ID NOs. of the sequences used in the model in FIGS. 7A-B are listed in rank in Table 18. The oligonucleotides were synthesized with a 5′ region consisting of the sequence (5′-CTAGCATGACTGCAGTACGT (SEQ ID NO. 4)) and a 3′ region consisting of the sequence (5′-CTGTCTCTTATACACATCTGACGCTGCCGACGA (SEQ ID NO. 5)) flanking the variable regions.

TABLE 18
Oligonucleotide Probe Variable Regions
Rank Ordered SEQ ID NOs

88, 1057, 834, 1608, 653, 1090, 2803, 499, 2587, 1082, 237, 2873, 2886, 759, 287, 390, 472, 119, 289,
96, 380, 459, 1226, 1331, 1012, 2542, 1284, 2765, 2528, 334, 1688, 949, 172, 1180, 832, 658, 195, 509,
1015, 538, 465, 696, 41, 954, 2771, 55, 407, 1351, 2524, 2760, 1728, 2600, 1731, 729, 2920, 156, 1322,
1745, 478, 236, 139, 2911, 2013, 1077, 525, 507, 2534, 1041, 1499, 766, 1037, 1143, 912, 1502, 968,
1420

[0828] The data presented in this Example demonstrate that an oligonucleotide pool comprising members having the variable regions listed in SEQ ID NOs 10-2921, e.g., a pool of probes having the variable regions listed in Table 18, can be used to distinguish plasma from individuals having breast cancer versus plasma from non-breast cancer individuals.

### Example 10: Oligonucleotide Probes to HIV Latent T Cells

[0829] CD4+ T cells are the major targets cells for human immunodeficiency virus type 1 (HIV-1) that can establish a state of latent infection by integrating into the host DNA. This process presents the major hurdle for curing HIV infections. Therefore, reactivation followed by elimination of the virus is the goal of several approaches. In order to find new targets that play a role in preservation of the latent state or reactivation of the virus the objective of this Example was to identify biomarkers that differentiate between CD4+ T cells infected with latent HIV and cells infected with active HIV and/or uninfected cells.

[0830] In this Example, we enriched oligodinucleotide probes (ODNs, aptamers) on cells and cell lysates using the enrichment methodology as provided herein to identify biomarkers specific to CD4+ T cells with latent HIV. Further as described herein, we performed target ID using pull down experiments using selected oligonucleotide probes from the selection on cells after fixation with paraformaldehyde followed by mass spectrometry.

[0831] Methods

[0832] Samples

[0833] Samples of T cells were collected from two healthy HIV negative donors. These samples may be referred to herein as “Donor 1 negative” and “Donor 2 negative” or variants thereof. The T cells from each donor were infected with active HIV and were then induced to latent HIV status using chemokine treatment. These samples may be referred to herein as “Donor 1 active”, “Donor 2 active” and “Donor 1 latent”, “Donor 2 latent” or variants thereof, as appropriate.

[0834] Selection of Oligonucleotides on Cells and Cell Lysates

[0835] Enrichment Scheme 1: Selection on Intact Cells—

[0836] Enrichment of oligonucleotide probes was performed on intact cells using methodology as described herein. After three rounds of positive selection on CD4+ T cells infected with latent HIV, three rounds of positive→negative→positive selection were performed. For negative selection, CD4+ T cells from the same donor infected with active HIV were used. Since T cells are suspension cells, dead cells could interfere with enrichment due to non-specific uptake of oligodeoxynucleotides (ODNs). Therefore an enrichment scheme employing flow cytometry was introduced which allows removal of dead cells. See FIG. 12A, which illustrates the general scheme for positive selection against T cells with latent HIV infection on the upper scheme and negative selection against T cells with active HIV infection on the lower scheme. In the upper scheme, a solution containing T cells with latent HIV infection is contacted with an oligonucleotide library to be enriched, oligonucleotides which to not bind the cells are discarded, and the remaining oligonucleotides are eluted and used for further negative selection or amplification. In the lower scheme, a solution containing T cells with active HIV infection is contacted with the enriched oligonucleotide library, cells bound by oligonucleotide are discarded, and the remaining oligonucleotides in the supernatant are used for further positive selection. 500,000 CD4+ T cells with latent HIV were used for positive selection and same number of cells with active HIV for negative selection. Unbound ODNs were removed by centrifugation in a tabletop centrifuge. After six rounds of enrichment probing was performed under conditions similar to the ones in enrichment.

[0837] Enrichment Scheme 2: Selection on Cells after Jixation with Paraformaldehyde—

[0838] Unbound oligonucleotides (ODNs) and dead cells were removed by a combination of centrifugation and flow cytometry. After three rounds of positive selection on CD4+ T cells infected with latent HIV, three rounds of negative→positive selection were performed. For negative selection, a mixture of CD4+ T cells from the same donor infected with active HIV and uninfected cells were used. Since T cells are suspension cells, dead cells could interfere with enrichment due to non-specific uptake of oligodeoxynucleotides (ODNs). Therefore an enrichment scheme employing flow cytometry was introduced which allows removal of dead cells. See FIG. 12B, which illustrates the general scheme for positive selection against T cells with latent HIV infection on the upper scheme and negative selection against T cells with active HIV infection and no HIV infection on the lower scheme. The general flow is similar to FIG. 12A described above except that the cells used in enrichment and probing were treated with LIVE/DEAD® Fixable Red Dead Cell Stain Kit from ThermoFisher and fixed with paraformaldehyde. 500,000 CD4+ T cells with latent HIV were used for positive selection and a mixture of 500,000 CD4+ T cells from the same donor infected with active HIV and 500,000 uninfected cells were used for negative selection. Unbound ODNs and dead cells were removed by centrifugation in tabletop centrifuge and flow cytometry. After six rounds of enrichment probing was performed under conditions similar to the ones in enrichment.

[0839] Enrichment Scheme 3: Selection on Cells Immobilized on Glass Slides after Fixation with Paraformaldehyde and Embedment in Paraffin—

[0840] Three rounds of positive selection on CD4+ T cells infected with active or latent HIV were performed. Another three rounds of negative→negative→positive selection followed. The first negative selection was performed on uninfected cells while the second was done on cells with latent or active HIV (opposite sample used for positive selection). See FIG. 12C, which illustrates the general scheme for positive selection against T cells with latent HIV infection on the upper scheme and negative selection against T cells with active HIV infection or no HIV infection on the lower scheme. Cells fixed with paraformaldehyde were embedded in paraffin and immobilized on glass slides. Enrichment was performed directly on slides. Our methodology for enrichment using fixed cells on slides is further described in Int'l Patent Application PCT/US 17/23108, filed Mar. 18, 2017; which application is incorporated by reference herein in its entirety.

[0841] Enrichment Scheme 4: Selection on Cell Lysates:

[0842] Enrichment was performed using cell lysates immobilized on nitrocellulose pads on glass slides. See FIG. 12D, which illustrates the general scheme for simultaneous positive selection against T cells with latent HIV infection and negative selection against T cells with active HIV infection or no HIV infection. Experiments were performed using lysates from Jurkat cells and purchased CD4+ T cells. The lysates that were prepared were used in mass spectrometry experiments. As shown in FIG. 12D, nitrocellulose pads were spotted with lysates from T cells with latent HIV infection and T cells with active HIV infection or no HIV infection on a single nitrocellulose pad. After incubation of cell lysates on nitrocellulose pads on glass slides with the oligonucleotide libraries, the pads were individually scraped from the slides. DNA amplification was directly performed from scraped pads. Our methodology for enrichment using cell lysates is further described in Int'l Patent Application PCT/US 17/23108, filed Mar. 18, 2017; which application is incorporated by reference herein in its entirety. See, e.g., Examples 29-31 therein.

[0843] Target ID: Pull Downs Followed by Mass Spectrometry Using Selected Oligonucleotide Probes from the Selection on Cells after Fixation with Paraformaldehyde

[0844] Sample Prep—

[0845] Cells stained with LIVE/DEAD® Fixable Cell Stain (Molecular Probes) and treated with 4% paraformaldehyde were sorted for the “live” cell population. Approximately 100K “live” cells were incubated with a pool of 3 sequences or a pool of 3 control scrambled sequences (100 nM each aptamer) and allowed to bind for 30 min at room temp. Protein-aptamer complexes were then affinity purified with Dynabeads® MyOne™ Streptavidin C1. Protein eluates were separated by SDS-PAGE, silver stained, excised and subjected to in-gel trypsin digestion.

[0846] LC-MS/MS—

[0847] Tryptic peptides were analyzed by nanoflow reverse phase liquid chromatography using a Dionex Ultimate 3000 RSLCnano System (Thermo Scientific) coupled in-line to a Q Exactive HF mass spectrometer (Thermo Scientific). The nano LC system included an Acclaim PepMap 100 C18 5 μm 100A 300 μm×5 mm trap column and an EASY-Spray C18 2 μm 100A 75 μm×250 mm analytical column (Thermo Scientific). For unlabeled peptides, a gradient profile of 2% to 25% B in 65 min then 25% to 60% B in 10 min was used. The LC system was interfaced with the mass spectrometry using an EASY-Spray electrospray ion source (Thermo Scientific) and the samples were analyzed using positive ion spray voltage set to 2 kV, S-lens RF level at 55, and heated capillary at 285° C. The Q Exactive HF was operated in the data-dependent acquisition mode selecting the top 15 most intense peaks for fragmentation. For the MS1 survey scans (m/z 400-1400) were acquired in the Orbitrap analyzer with a resolution of 120,000 at m/z 200, an accumulation target of 3×10\hat{ }6, and maximum fill time of 50 ms. A resolution of 30,000 at m/z 200, an isolation window of 1.5 m/z, and normalized collision energy of 28 was used for MS2 scan settings for non-labeled samples.

[0848] Data Analysis—

[0849] Data files were analyzed with Thermo Scientific Proteome Discoverer (version 2.1.1.21) using the SEQUEST HT search engine against the human SwissProt database (version 2015-11-11) and UniProt HIV reference database UP000002241 (version 2016-06-16). Searches were performed with a fragment ion mass tolerance on 0.02 Da and a parent ion tolerance on 10.0 ppm. For both TMT labeled and non-labeled sample data files, oxidation (15.9949 Da) of methionine and phosphorylation (79.9663 Da) of serine were set as variable modifications, and carboxyamidomethyl (57.021 Da) of cysteine was set as a static modification. For TMT labeled samples, the TMT10Plex (229.1629 Da) of the N-terminus and lysine residues as static modifications were added. Quantitative data analysis was performed with Scaffold Q+(version Scaffold_4.6.1, Proteome Software Inc., Portland, Oreg.) to quantitate Label Based Quantitation (TMT) peptide and protein identifications. Peptide identifications were accepted if they could be established at greater than 99.3% probability by the Scaffold Local FDR algorithm. Protein identifications were accepted if they could be established at greater than 99.0% probability and contained at least 1 identified peptide. Protein probabilities were assigned by the Protein Prophet algorithm (Nesvizhskii, Al et al Anal. Chem. 2003; 75(17):4646-58). Proteins that contained similar peptides and could not be differentiated based on MS/MS analysis alone were grouped to satisfy the principles of parsimony. Proteins sharing significant peptide evidence were grouped into clusters. Normalization was performed iteratively (across samples and spectra) on intensities, as described in Statistical Analysis of Relative Labeled Mass Spectrometry Data from Complex Samples Using ANOVA (Oberg, Ann L. et al., Journal of proteome research 7.1 (2008): 225-233). Medians were used for averaging. Spectra data were log-transformed, pruned of those matched to multiple proteins and those missing a reference value, and weighted by an adaptive intensity weighting algorithm. Of 24926 spectra for Donor 1 or 44550 spectra for Donor 2 in the experiment at the given thresholds, 19980 (80%) or 35927 (81%), respectively, were included in quantitation. Differentially expressed proteins were determined by applying Permutation Test with unadjusted significance level p<0.05 with and without Benjamini-Hochberg correction (BH).

[0850] Results

[0851] Enrichment/Selection of Oligonucleotide Probes on Cells and Cell Lysates

[0852] Enrichment Scheme 1: Intact Cells—

[0853] Removal of unbound ODN library members was performed by centrifugation. After six rounds of enrichment an initial probing experiment with libraries from round 6 was performed. Libraries were probed on the cells that were used to enrich those libraries. Probing was performed in duplicate on cells from Donor 2. In the second probing on cells from Donor 2, 20 oligonucleotide probe sequences with fold changes of 2.0 to 4.0 between T cells with latent HIV and active HIV were identified. In addition, 86 sequences were identified that had fold changes of 2.0 to 4.5 between T cells with active HIV and latent HIV. Sequences are shown in Tables 20-23 below.

[0854] Enrichment Scheme 2: Cells Fixed with Paraformaldehyde—

[0855] Removal of unbound ODN library members and dead cells was performed by centrifugation/flow cytometry. After six rounds of enrichment probing experiments with libraries from round 6 were performed. Libraries were probed on the cells that were used to enrich those libraries. More sequences with fold changes of at least 5 or 10 binding preferred either to latently or actively infected cells could be identified for donor 2 compared to donor 1. See Table 19. Without being bound by theory, enrichment on cells from donor 2 may have had better performance due to a higher cell concentration.

TABLE 19
Enrichment on fixed cells

| | |
|---|---|
| Number of Sequences | Number of Sequences |
| with fold change of | with fold change of |
| at least 5.0 | at least 10 |

| | Latent vs. | Active vs. | Latent vs. | Active vs. |
|---|---|---|---|---|
| Sample | Active | Latent | Active | Latent |
| Donor 1 | 44 | 41 | 8 | 15 |
| Donor 2 | 18263 | 1456 | 923 | 732 |

[0856] The maximum fold changes observed were:
[0857] a. Donor 1/latent vs. active: 189
[0858] b. Donor 1/active vs. latent: 54
[0859] c. Donor 2/latent vs. active: 892
[0860] d. Donor 2/active vs. latent: 713

[0861] The unenriched library comprised F-Trin-B primers with randomly generated variable region inserts as described herein. The oligonucleotides were synthesized with a 5′ region consisting of the sequence (5′-CTAGCATGACTGCAGTACGT (SEQ ID NO. 4)) and a 3′ region consisting of the sequence (5′-CTGTCTCTTATACACATCTGACGCTGCCGACGA (SEQ ID NO. 5)) flanking the variable regions. Variable regions of the oligonucleotide sequences with the highest fold changes from the Donor 1 experiments are shown in Tables 20-21. Variable regions of the oligonucleotide sequences with the highest fold changes from the Donor 2 experiments are shown in Tables 22-23. For Donor 2 sequences, the top 50 sequences with the highest fold changes are shown in the tables for the indicated settings and additional sequences are disclosed in the Sequence Listing hereto as indicated below the tables with ordering continued by fold-change. In Tables 20-23, a fold-change of “Inf” means the sequence was not observed in the underrepresented group. In the “Experiments” column, “Fixed” refers to enrichment with fixed cells collected with flow cytometry and “Intact” refers to enrichment with intact cells (see above for details). As indicated, different sequencing runs were performed.

TABLE 20
Donor 1 up in latent versus active

| | | Fold- | SEQ |
|---|---|---|---|
| Experiments | Variable Region (5′ −> 3′) | change | ID NO. |
| Fixed | CTCAAAATCTCCTTAACTTCCTCTTCCCACGACGA | 7.9 | 2922 |
| Sequencing | CTCAAAATCTCCTTAACTTCCTCTTCACTCGACGA | 6.4 | 2923 |
| run 2 | GCGCACCTAAACTTCCTCTCCTCTCCGGCTTCGGGA | 6.3 | 2924 |
| | CTCAAAATCTCCTTAACTTCCTCTTCACCCGACGA | 5.9 | 2925 |
| Fixed | GACCAAGAGGTACCGCCTCGCAAGCTGCTTTGGCC | Inf | 2926 |
| Sequencing | GTTTGCTTTTTAGAACTCGATAAATTACAGAATAT | Inf | 2927 |
| run 3 | CATACATGGCTTGTCCCGTCATACATGAAGTAGTG | Inf | 2928 |
| | GTATTGTTCGACGGTGGACAGAACATACAGGTAGC | Inf | 2929 |
| | GCAATTCGATAATCCGCCTCTCACCGGTTCGACGGA | Inf | 2930 |
| | GAAAACAAGCATAGGATCGTACGGAAGTGTACCTAA | 189.2 | 2931 |
| | GAACAGGCGAGGGCTGGCCCTACGTTGGGCCGTGC | 91.7 | 2932 |
| | GCGATCGTCTAGATTGGGTGTGGATGTGGCTTAAA | 15.6 | 2933 |
| | TTGGCGTAGGCAGTACCGATCACTTCCTCCAACATGA | 12.7 | 2934 |
| | ACTTGGCACTTATCGACAACATTGGAGACCTGTCTTGA | 12.3 | 2935 |
| | GTAATTTTGACCCCCGTCGACGAGCATGAGGGCGGA | 11.5 | 2936 |
| | GTTGCTGAGCTGACTGATACGTATTCAGCTGATAT | 11.2 | 2937 |
| | CGTGCTCCCCAGCTCTCCCGCTCTGGCCCTGTCGGA | 10.9 | 2938 |
| | TCTACCCAATCCAACCAGCGCCCCCCCTGTCTGTCA | 9.9 | 2939 |
| | ACGTCATGGCCGCCTGACAGTGTTTTCCTCCCTCCGA | 9.4 | 2940 |
| | AGCTAAGGATCTGACCTCGTACTCTACGTAATGGT | 8.5 | 2941 |
| | TTCGGATACCTGGACGAGCTTATACCCCCCCTGTC | 8.3 | 2942 |
| | GCCCCTGCCCTTCCGTCTTCGTACTACTATTGACCA | 8.1 | 2943 |
| | GGTCATTAAGCACGAGTCGATACAGACTACTTCCT | 8.1 | 2944 |
| | TCAGTCCAGCTGGGCGCCTGGGAAGTCTGCCCCCCGA | 7.7 | 2945 |
| | CTGGTGTATCAATAACTTCCTCTCTATAACACAAA | 7.0 | 2946 |
| | AGGGACCGCGGTTTGCTGAACCAAAGACATTTGACA | 6.7 | 2947 |
| | GGCAATACGAGCTCCCCCGCTCCTTAGAAGCTTTCGA | 6.4 | 2948 |
| | GTTAAATTGACGGTCTCCCCCACGCCCTCCTTTAGA | 6.3 | 2949 |
| | TCCCCCGCGTGCACTGTCAGCAAAGTTTCGCTTAGA | 6.1 | 2950 |
| | AGACCCATAAGGTCGAGACCTGAGTCACTAGATTTGA | 6.1 | 2951 |
| | TTGCTTGATTGCCATCCCCCGTTCATCAAGTGCGA | 6.0 | 2952 |
| | GTTGGCGGAAGAGAGATGGCCGAAACCCCCCGTCC | 6.0 | 2953 |
| | CTCGCTGCAACTTCGTGCCGCCGCTCCCTCTCTATTGA | 6.0 | 2954 |
| | GACGCTGATCCCCCCGTAAGTGGAGTTCTTGCCTC | 5.9 | 2955 |
| | GTCCCCCCTGAAGAGATTCCAAGTGGTACGCTTCCA | 5.9 | 2956 |
| | GGTTATGTAGCAAGTTACCCCCCGCTAAAGAGCTCGA | 5.8 | 2957 |
| | GAGAGTACGAACTTACTGGCGGGCATTTTAATTTGA | 5.6 | 2958 |
| | ATGATCGTGTGGATCCCTCCCCGGCCGCTGATCTC | 5.5 | 2959 |
| | ACACCGGTTTAGTACAGGCTGGCCGGGATAACCAA | 5.5 | 2960 |
| | GGTGGTCGAAGGCTTCGTAGATTCTTCCCCCCGCTGA | 5.4 | 2961 |
| | GTTCTAAGTACTATGATTACCCCCCGCATAACTAA | 5.3 | 2962 |
| | ACTGGGGGGGCGCAATTTCGAGGTGGACGTACAACTGA | 5.2 | 2963 |
| | GGGATGGGGGACGTTGCAATTGAGCCCCCCCGCAAA | 5.2 | 2964 |
| | GTGACCCCCCCCTATACCTCGCGTATAACATGTGATGA | 5.0 | 2965 |

TABLE 21
Donor 1 up in active versus latent

| | | Fold- | |
|---|---|---|---|
| Experiments | Variable Region (5′ −> 3′) | change | SEQ ID NO. |
| Fixed | GCACGTGAAGACTAGTCTATGATGAGGGGAGGGGGTGA | 47.3 | 2966 |
| Sequencing | AGTGGGTGGTGGGTTCGGTTTGCTTGGTTCCCTGTTGA | 13.6 | 2967 |
| run 2 | ATATGGGGTTTATGGGGATGGTGTTATGGGTGGAATGT | 10.7 | 2968 |
| | TGCCATTACTAAGGTTCGATCTTTTAGCATTTCCA | 8.3 | 2969 |
| | ATTGAGGTGGTTTTGAGGTGGGCTATCTGAGGGAT | 6.5 | 2970 |
| | CAGATGCTCCATCCGGAGTAAACGCTAATTCAGGA | 5.1 | 2971 |
| Fixed | GAGCTCCTCCGACCGGCACCCGCAGACGTGCCTTAA | 54.2 | 2972 |
| Sequencing | ACAGCAGAGGTGTTCAGCTCTGATTGAAGGCTCAG | 50 | 2973 |
| run 3 | TGAGGGATGGTTCTAGTCTATAACTTTCGATTAAA | 27.6 | 2974 |
| | TTCCCGACGTGGCATACCAAGGTCGGGTCTTAGGT | 25.4 | 2975 |
| | GAGTCTGTGGACCAGTAGGACAAGAATTAGCATGG | 15.5 | 2976 |
| | TGAGGGCCTTTAGCTTTATCTGCCTCGAGCTCCCC | 14.6 | 2977 |
| | CACAGTCGATCTCGGTATACTATGCGCAGGCAATG | 11.6 | 2978 |
| | TGTTTGACACTATTCCCCCGCCTAAACTAGACTGCTGA | 11.2 | 2979 |
| | GCTACGTACTCGTCAGTATGATATGCAATAGTGCC | 10.9 | 2980 |
| | TTTAGGGGTCGCACTACCATCGTGAGGTGGCCCAGTA | 10.3 | 2981 |
| | CACCGGGATGAGCCGGGTAGATTTAACACAGTCGAA | 10.2 | 2982 |
| | GGAAACCGCAGGGGCTTAAGAACAAGTACGCGGTT | 10.1 | 2983 |
| | TTAGTTACGCGTGACTGTCCCGCCGCCACACATTTTGA | 9.9 | 2984 |
| | TTATAGCGTGCTGTCATAGTGCAAGGACGCGACAAGA | 9.9 | 2985 |
| | GAGGAGATCCCTTGTCTGCCAATGATGCTAATCCC | 8.7 | 2986 |
| | GCACTAACGATAGTAGAGCACGTTGAAAGTTA | 8.4 | 2987 |
| | TACGCTCTCCCCCCCAGCCTAGCGAGTACAGGCAAGA | 8.1 | 2988 |
| | GACTACGGGTCACGATACAATCGGGACCGATGTACA | 7.9 | 2989 |
| | CCCTGCCTTCCTTGCGGCCTTGGGGATTGGTTGCT | 7.5 | 2990 |
| | TCAGCACACAATTCGTCAGTGCGAGTATCGAGGTTA | 7.5 | 2991 |
| | ATCGCCTGTCAGCAAGTTTCATGTTGACTGATCGG | 7.3 | 2992 |
| | ACATGCGCCCTGGCTTAGGCTTACCCCCCTCCTGT | 6.2 | 2993 |
| | GTATGATAAGAGTGGTCGTTTCATGACAGTTAATG | 6.1 | 2994 |
| | GAGTGTGAAAACGCATCAACTCCCCCTCCACCTTAA | 5.9 | 2995 |
| | ATGTCGTGCCAGAGGGTATGACACTTACTCTGACG | 5.8 | 2996 |
| | TGCGGTATGAAGGCGCAATTCTATGCCCGTACCGTA | 5.8 | 2997 |
| | TACTTTTGCACTTGAGGTTCCGTCGACTGTCCAATGA | 5.8 | 2998 |
| | ACAAAGCCGAACTGTACATTCAGTACTTGGCTTGCA | 5.6 | 2999 |
| | ATCCCCCCGGAGTCAGAGCGGTCAGCTATTGTTCAA | 5.5 | 3000 |
| | TGCAAAGGCTATGAACGTACGCACTTGGTTGTACT | 5.4 | 3001 |
| | CCATTATCGTCGATGGTCTAAGGCCAACCCCCGGAGA | 5.3 | 3002 |
| | AGTGAGCAAGTCAGTGATTGTAGATTCACTCCTCCC | 5.2 | 3003 |
| | GAGCTGGCTAAGATTGCCGGATGTTACCCTG | 5.2 | 3004 |
| | GGACCCCCCGCCTTCTATGACGCGGTCTGTAGGAA | 5.1 | 3005 |
| | ATGCTAGGTCGGTATGTGATTGCAGTTTGGGAATAGA | 5.1 | 3006 |

TABLE 22
Donor 2 up in latent versus active

| | | Fold | |
|---|---|---|---|
| | Variable Region | Change | SEQ ID NO. |
| Intact | ATTAATGGGTGGGGGGTTTAGCTTGATGTGGGTTGTGA | 4.0 | 3007 |
| | AACCCAGTTCACATACACTCTCACCCTCACTAAACA | 3.5 | 3008 |
| | GTATTTTCTGTTTTGTTCTCTCTTTCGATTATTGT | 3.1 | 3009 |
| | GTGGGGTTTCGCATGTGTTGTGGTTCTTATTAGGT | 2.4 | 3010 |
| | ATGGGGAGGGGGGTAGGCTGTCTTAATTGGTGGTT | 2.3 | 3011 |
| | TCCCTCTTTTTTGCCCTACGATCTTAGTTCCCTTC | 2.3 | 3012 |
| | GTATGGGGGGTTTGTTGGGTTGGTGTTTTTGTTTT | 2.3 | 3013 |
| | TGGGAAGGGGTTTTTCTTGGTTTTGTTTTTATTCC | 2.2 | 3014 |
| | TGTTGGTTTCCTTGGTTCCCTTTTTGTTTCCTGTT | 2.2 | 3015 |
| | ACTTTTCCGGCCGTTTTTCTTTTTTTCCTATTGTCTA | 2.2 | 3016 |
| | TTACCTCTTTGTTTGGGTTTTATCCTTTCTTAGTT | 2.2 | 3017 |
| | GGGGTAACTGGGGGTTATTTGGTTTTTGGGGGGGC | 2.2 | 3018 |
| | TTTAATCTTGCTATGTGGGGTCGCCCTAACTTTAT | 2.1 | 3019 |
| | GTTTTATTTTTGGCTTTTACATGAGCTTTGTTCCGA | 2.1 | 3020 |
| | TAAGCAATCCGCTGCCCTATTTTTTCTCTTGTGAGGA | 2.1 | 3021 |
| | TTCTTTCTTATTTGGGGTTTTTTGTCTCTATTCTC | 2.1 | 3022 |
| | TTCGGGGTTGTAATTCTGTTTTGTTTTTTTCGCTT | 2.1 | 3023 |
| | TCTGACGGTATTTCGGGTTTTTTTGTTTTTCTTGT | 2.0 | 3024 |
| | GAGGGCTACTGAAGTTAATGGCATTCTTCTCTATC | 2.0 | 3025 |
| | GTGGCCGCCCATGCCTTTTCGTTCACGACTCTC | 2.0 | 3026 |
| Fixed | AGTGGGTGGTGGGTTCGGTTTGCTTGGTTCCCTGTTGA | 892.0 | 3027 |
| Sequencing | ATATGGGGTTTATGGGGATGGTGTTATGGGTGGAATGT | 229.6 | 3028 |
| run 2 | CATTGCATAACTAGGCTACCCCGTGGAATGTGACTTGA | 56.0 | 3029 |
| | ATTGAGGTGGTTTTGAGGTGGGCTATCTGAGGGAT | 27.9 | 3030 |
| | AATGCTGACACAACCGGGAGTAAACACGTGAGCAGA | 22.6 | 3031 |
| | CTCTTTAAACGGTACTCTTTTCGGGCGTGTTTAATTGA | 21.8 | 3032 |
| | ATTGTAGGGTAATAGCATGTTTGGGTCATGGCTTG | 21.2 | 3033 |
| | GTATTCTAGCGCAGCTTTGTACAAACTTACCGGTTA | 20.8 | 3034 |
| | GGTACGTTGAGTCATTCATGCTCATCCTATGGGGAGA | 20.6 | 3035 |
| | GGTGGTCATGATAGTAAACTGTATCTGTTTTCGAT | 20.4 | 3036 |
| | TTTATAGAGGACCGGTAGCTGGTTACGACCGTCCAA | 20.2 | 3037 |
| | ACACGAAACAATAGGTCGCGGTCATGAACATGCGG | 18.0 | 3038 |
| | GAGCAGATTCCCGCACCACACGCCCTCCCCCGTTA | 18.0 | 3039 |
| | GCATGACTTCTCAAGCATGACACGGACTGGTTGGAA | 16.4 | 3040 |
| | TCATACGGGTCACGCTCAGTGAGTGACATGCGCATA | 16.4 | 3041 |
| | CCAGACCACAAGGGCACGTTCTCCCCCGCTATACG | 16.4 | 3042 |
| | ACGTACCTAGCATAGGACGGGGCGAACTAGGGGCGA | 16.3 | 3043 |
| | TGCGCAAGTTGGCTTAGGGGATAGGTGTTCCCGACTGA | 16.3 | 3044 |
| | AATCACGATCTCCAGTTGAGACTCCCAAGCCCGCCGA | 15.8 | 3045 |
| | ATAACTCCCTCCATGGGTTCGCGAGCCCGGGTGTTA | 15.7 | 3046 |
| | TTGCGAGGGTAAAGTTGGAGGGCGGTAAAGCATTG | 15.6 | 3047 |
| | TGACGGGCATTGGCCTCGTACGGACAGGCTTTGTTA | 15.4 | 3048 |
| | ATGCGGGCACAGGTACGCTAAAAGTGTGATTACGTGA | 15.4 | 3049 |
| | TATTAAAGACGTCTAGTTGCCGTTTCGATAGAACA | 14.9 | 3050 |
| | TTGCGCTGAGGGCGATCATAATGCATTCGTTTGTAGA | 14.9 | 3051 |
| | CATATTGGCCGTTAGGCGTCTCTTTAACAGCGGAGTGA | 14.7 | 3052 |
| | TAGGGCACAGAATAGCTTCCACGCACAGAGACCGGGA | 14.7 | 3053 |
| | GTATTAGAGGAATGGGGGGCAATTTTGGAACCCTCGA | 14.6 | 3054 |
| | GACCCTCAACAAAGAACAGGTTAGAGGGTACCCACGA | 14.4 | 3055 |
| | TGTGAAGCTAGCGTACTTTCGCAAGGTGTAGTTGT | 14.4 | 3056 |
| | CGTCGACTAACAGCATTCAACGCGATGCTACGCCTA | 14.4 | 3057 |
| | AGCCGATTGCACGTTACATATGGATTATAAGATTC | 14.3 | 3058 |
| | GACTGTTGGCGAACGTATATATATGTTAGGACTGT | 14.3 | 3059 |
| | GATCGATCTAGGATTCTAGCGGGTCTTATGCACAGG | 14.3 | 3060 |
| | TCACCGCGATAGAGGTCGCTAGGTCCATGCCAGGT | 14.3 | 3061 |
| | GAATCGCCCTCTCCGTCGTAGTCGGGCTCGATAAA | 14.3 | 3062 |
| | GCGCGCAAGCGCTTGGTTACGGATATATGAGGGGTGA | 14.3 | 3063 |
| | ATTCGAAACCTCGGTGACGGTAAAGGTGGAGAGAGGA | 14.3 | 3064 |
| | TGTCCGCCAGGCGTGGGGTATTGAAACTGGCGGAATGA | 14.3 | 3065 |
| | AACTTCAGGGGTTACATTAAGTGGGGTACTTGTGA | 14.2 | 3066 |
| | TCCTACTGTCAGGAATTATGGTAGTAGCTTGTTTTGA | 14.2 | 3067 |
| | ATGTTGCACACACGCCTGCCACGCATATCTGTGATA | 14.0 | 3068 |
| | CGTCATGAACATATCACATTAGGTCATAGGCGACTGA | 13.9 | 3069 |
| | GTGTTGGACCATTGGGCTCCAACGACGTTAACGTG | 13.9 | 3070 |
| | GCGATCGTCATGGAGGTGCCACAACCATTGTGCTGTGA | 13.9 | 3071 |
| | ACAACGCTAAATCCATCCGAGTCTGATAAAGCGCC | 13.8 | 3072 |
| | TGAAGGTTCAACTAATGGAGGGGACATCGCGGGATA | 13.7 | 3073 |
| | CTACAGCTTCTCGGTGTGTTTTAGACCCGCCCCCC | 13.6 | 3074 |
| | AACAATCGGTGTTAGTTACCGGTGAGTTTTGTTCGTGA | 13.6 | 3075 |
| | GCTTACACCGCAGAGCTGTAGTCGACGAACCAGAA | 13.5 | 3076 |
| Fixed | ACTAAAAGCAACGAGTCTCGTCACATCGATCATTCGA | 364.9 | 19817 |
| Sequencing | GGAGGTAACCCAGACGGAGCGTGTCCCGGAATCTA | 346.6 | 19818 |
| run 3 | TAGATGCCATGACGGATTCCAAGGAATAAGATCCGA | 339.3 | 19819 |
| | AAGTGACATAGGTATGTACATTACGTAGGGAAACCTGA | 338.7 | 19820 |
| | GGTAATCGAACTAAACTATGCGTACCGGGCTCGCAC | 326.0 | 19821 |
| | TGATCCAAGATAGGCGTGAGTAGTTATGCGGTTATGA | 325.9 | 19822 |
| | GGGAAAGTTCTTGGTCGCCCTATGGCGTGTAGGTCTGA | 298.1 | 19823 |
| | GGGGCTAGCCCTCATTAGTAGAATTGATGTTAATCTGA | 286.5 | 19824 |
| | TTCGGTCGCTGGGGATCCGAGCATAGCTTACGCTTTGA | 282.3 | 19825 |
| | AACACATTAAGCGTGAGCTAGTTATAGGACGAAGT | 279.5 | 19826 |
| | GACAATCTTTTGTGGTCGTTTCCGTACACGTGTTTA | 270.5 | 19827 |
| | GATATCTATAGGCGAATGGGATACCCCCCCGAAACA | 264.9 | 19828 |
| | GACGGTCTATTGTGGAATCAGGGATTTTGCTATTGTGA | 259.6 | 19829 |
| | CGACCCAACCAGGGAGATGACCATACCCAGCCTGCTGA | 255.3 | 19830 |
| | GGAACTGCCACATGTGCCACGGATCTTCAGCCCTCGA | 254.9 | 19831 |
| | TCGCCGGATGTTTTCATAACGCCCCTCCCCCGTAA | 247.8 | 19832 |
| | ACTGGAGCGATCAGAAACCTTTCAGGACCGAATCG | 242.6 | 19833 |
| | AGTCTAAGCCCGCAGATAACCATAGCAACGAAGACA | 239.2 | 19834 |
| | TGACATCGTAGCTACGTTAAATCTCTGCCTGGGAGGA | 238.4 | 19835 |
| | TGTACACTAGAGCTGATGTGCATCTGGTCACTTACGA | 238.0 | 19836 |
| | ACCAGACAGGCTAGAGTCCGGGGGAGGTACATTGGA | 231.9 | 19837 |
| | ACGGACTGCCGTGTGCCTCCCGGCTGATTTATCCGA | 229.6 | 19838 |
| | GGTGGGGCTGTGCACGTAAATTGCCTCTCCGACGAGA | 227.9 | 19839 |
| | CCATTGGTCGGGTTGTATTATTATGCGCATGTAAGTGA | 224.6 | 19840 |
| | GTCGCAAAGCGAATCGTACAAAGACCCCGGAAACG | 211.7 | 19841 |
| | GCCCAACCTGTGTATTGTTCACAGACGTATAGGCAA | 209.5 | 19842 |
| | TTTACCGACGCGTTCAGCCTAAGAGTAGGTTCGTGTGA | 205.5 | 19843 |
| | ATTGGTGCTGCGGAGTTGGGTCCATGCATATTAGA | 204.0 | 19844 |
| | ACAAGATCCGCGAAGGACGTATATTCGGAGCTATT | 199.8 | 19845 |
| | ACCTCTTTGCCGTACATTGATCGCGTACGGCCTTAA | 199.1 | 19846 |
| | AGGGCCTACTCAGCTAAGCCCCCCCTGGTTAGGCT | 195.6 | 19847 |
| | GGTCCCGAGGTTGGAAGTACATGCGACATCATTTTGA | 193.9 | 19848 |
| | GGAAGCATCGGCGTGAAACCGTTAAGCCTTCCAGCA | 193.7 | 19849 |
| | TATGCGCTGCCCTAGTTCCCAGGGGCCACTTAGAC | 192.3 | 19850 |
| | CAGTACGGGAGTCTGTGAAGATGTATTCCGGGACGA | 188.6 | 19851 |
| | GGTAAGATCATGAGATCTCGTTAGGCGACAACGTTA | 188.4 | 19852 |
| | TTCCGATGTGTCTTCGTCTGCTCAAGTTCCACCGAA | 186.9 | 19853 |
| | ACGTCCTTAGAGGTTGTGAGGGGTTGCCACGATAG | 185.2 | 19854 |
| | AGTAAGGTCCTCAACCAGAACCGGTTACTTGTATG | 182.9 | 19855 |
| | CCGCCTCTCCCCTCCTCTCCAACAAATAGTCTGCCGA | 179.8 | 19856 |
| | GATGCGAGGAGTTTACTGTAATGTTGCTGGTGCCGA | 177.6 | 19857 |
| | TGATGAGCCACACGGTGCATGGACGTCCTATGTTATGA | 165.6 | 19858 |
| | ATGCTCGACATCACGCCCGATTACTCGGTCGACTGA | 163.2 | 19859 |
| | AGTGGGAGTGCAATTCAGTCAGACACAACCCGCCC | 162.8 | 19860 |
| | GTGTCCATCTAGCCAAATACGGATTCACTGACATT | 161.7 | 19861 |
| | CCTACAATAGGCGCTCCTAACTTTCAAAGCTGCTTTGA | 158.9 | 19862 |
| | GTCAATTCGACTAGGTGGAGCCAATCGGATCGCGTGA | 157.5 | 19863 |
| | TGCTAGGGGCCTTAACACTAGGTTGTGTCTGTTGGA | 157.0 | 19864 |
| | TTTGGGAAGAAGATTATACGACGGTTTGAATCGCT | 156.8 | 19865 |
| | TGTACTGCATACGCACTGATATTGGGATGCTCCTCGA | 156.8 | 19866 |

[0862] In regards to Table 22, the variable regions continue in SEQ ID NOs 3077-19816 for the “Fixed, Sequencing run 2” experiments and in SEQ ID NOs 19867-21289 for the “Fixed, Sequencing run 3” experiments.

TABLE 23
Donor 2 up in active versus latent

| | | Fold | |
|---|---|---|---|
| | Variable Region | Change | SEQ ID NO. |
| Intact | ACAAAATTCTCACCGTCCTCTAGGTAATCTCACCCA | 4.5 | 21290 |
| | ACCGTTGGAGTTCTTTTTTCGAAATCATTTGTCTTGA | 3.6 | 21291 |
| | ACTTTGTTCGGTCACTATACTTATTACGCTCTCTTTGA | 3.4 | 21292 |
| | TGGACCTTTCAACCGCCTTTATTATCCTTGGACCGTGA | 3.4 | 21293 |
| | GCTCCATGAAGACATTGTGGTGGCCTTTTTTTATTGA | 3.2 | 21294 |
| | TGCGCTGTTCGGGTTCTTACTGTTTGTTGCCTTACTGA | 3.0 | 21295 |
| | TCCGGGTTTTTTCAGCCCCGCAATCCCTCTTATTA | 2.8 | 21296 |
| | AACGGTACTCTCTCGCTTCGGAATTTGGACTTTTGA | 2.7 | 21297 |
| | CCGTTCCTCCTCTTGTTTTTGGGATCCGTTAATGC | 2.6 | 21298 |
| | ATATAGGTTTTGTGACTTCTGCGCTCTTATTGTTC | 2.5 | 21299 |
| | TTTCACTTTACGTGTGCCCGGTATTTGTTCGCCCTTGA | 2.5 | 21300 |
| | TGTTAAGGTTGATCCGTTCTTCCTGCTATTCCTCC | 2.5 | 21301 |
| | ACCCCGCCTTTCGTCTTTCAGTCCGGAATTACACC | 2.5 | 21302 |
| | GTTATCGCCAATCCCCCCGGCCCCCATCTGGAAAT | 2.5 | 21303 |
| | CCTACTCGCGGGTACACACCCAAATCATTTCTCCA | 2.4 | 21304 |
| | TCCTTTTTCCTATCTGGGACTCGCTTAGTTCGTAT | 2.4 | 21305 |
| | ATTGCTAGGGCTATCCATTATGACGCTCTCTTTCTTGA | 2.4 | 21306 |
| | GGCATTCCCTGATTTTTTTGTTCTCTTCCTAGGCGTGA | 2.4 | 21307 |
| | TCTGTGAAAACCTACCTCGCCGTCGATTACTCCAC | 2.4 | 21308 |
| | TCTGGTGCACGCCTCTTAATTTCGTTCTAAGTTTT | 2.3 | 21309 |
| | ATACGCCTCAACTCGAAGCCCGCCCACCCTCCACGA | 2.3 | 21310 |
| | TTAACCATCTAACATAAGCAATATTCCGCCAACCTGA | 2.3 | 21311 |
| | GCCCGCTTGGTGTTATTGGTTGCTTCTAATCCTGGTGA | 2.3 | 21312 |
| | ATCGTGCGTCCTTACGATTAATCTACGCCTCCCCCTGA | 2.3 | 21313 |
| | TCTTTGTTTCGTCGTTGATCTCCTCTCCGTGTAAA | 2.3 | 21314 |
| | GGTTTCACTTGGTCTTTTTTCTGGGATTCGGGTC | 2.3 | 21315 |
| | GTGGGCTCCAAAGTCGTTCCTTTCCTTTTGCTGTGA | 2.3 | 21316 |
| | TAATGATTTCCTCTGATTGCTTTTCCTCCGTGTTGA | 2.3 | 21317 |
| | GTCACCACCTGGATCTAGCCATTCTGTTGTTTGT | 2.3 | 21318 |
| | AGTTCACGGTTGGTCCCTTTTCTCTGGCTACATACA | 2.3 | 21319 |
| | ATTCGTGTCCATCCTTACATCGCCTAACCGCTCCT | 2.3 | 21320 |
| | ATTGCCACCCCAAGGTTTTATCCCCTTTCTGTCCTGA | 2.3 | 21321 |
| | TGGTCCCACTCTAGTTGTTGCGTTTCTTTATTGCCTGA | 2.2 | 21322 |
| | TGTCCGCCTTACGCCACTTATCTTTACGCACTACT | 2.2 | 21323 |
| | TCCCGCTCCATTGGTAGTCAGCTTGACTTCATACCGA | 2.2 | 21324 |
| | AACACACGGGGCCTACTTGATTTTTTCCTTGGACTA | 2.2 | 21325 |
| | TCTCCGTTTGAAATTTTTCTCGTTATACACTCCCC | 2.2 | 21326 |
| | CTCCTCTCTGTCGATTGTTCCTCCGCACTTGATATA | 2.2 | 21327 |
| | TTGCACATCCATCGCCATCCTTGTTGTCTCCTACG | 2.2 | 21328 |
| | ACTGTTCTAGCTCCTTTATGTTCTCCTTCACAT | 2.2 | 21329 |
| | GGGAACTGCTCTCCGCCTGAACCAATTGCTACTCC | 2.2 | 21330 |
| | GTACGCCGCCCCCACCAGTTCTGGAAATGTTTATT | 2.2 | 21331 |
| | TTGCTCTCCCATTTTGTATACGCCTCGTCTCTGTT | 2.1 | 21332 |
| | GTAATATTCTTTCTTTCATCTGGTCCTCTTACTCGTGA | 2.1 | 21333 |
| | CTGCAGGGCTCATTTGGGCTCTTTTCCCGCGTTTT | 2.1 | 21334 |
| | TGTGCTTGTTGTCCCGGATTATCCTGTTGTCTTTA | 2.1 | 21335 |
| | GTCTGTGGCGGTTTTTTATTCTTGCTATAGGTTTCA | 2.1 | 21336 |
| | ACAAGCCCCCGTTCCTTCTTCACCGTTATTTAAGTA | 2.1 | 21337 |
| | AGGGGATTACCGGCCTTCAACTTCACACATATTCAA | 2.1 | 21338 |
| | TTGCCGTAAATTGTTTCCCCCTTCGAGTTGTTCCA | 2.1 | 21339 |
| Fixed | AGGTTTGCACCCGCGATTCGTAGATATCTGGCAAG | 712.9 | 21376 |
| Sequencing | TCGTATCGGGGATACGTGTTATCTTACTTGTTGGTGA | 656.3 | 21377 |
| run 2 | AGTATCGCGAAGTACTATTGATAGGGTCTCCCTCT | 640.6 | 21378 |
| | GAGGTGTACGCAGGAATGTGTAGGTTTAACGAAAT | 606.5 | 21379 |
| | TGTAGTTAAACTAACAACTCGCGCTGTCTTCGCCC | 593.4 | 21380 |
| | CCAGGTCTAAATCTGAGAGAGACTTGGGTAAGGTG | 544.8 | 21381 |
| | CCCCTGGAAAAGTGGAACAGATTCCCGAGGATTCGGA | 535.0 | 21382 |
| | GTTTCACGTTTGCATAACGGGGATTCCCGCACGTA | 520.4 | 21383 |
| | GGTTAGGACCACGCTAGCGGGATACGCAAGAGAAATGA | 507.4 | 21384 |
| | TCAACATCCACTAGGATAGAAGACGTACAGGATTGGA | 489.7 | 21385 |
| | CCCAGGTATGTTCGGAACTGCTGGGTCAAGGCATAA | 468.8 | 21386 |
| | TCGGTCACGTATGGCGCGAGAAAGTAAATCCGGAAGA | 449.4 | 21387 |
| | TTCGCGAATCAGCGATGCTTAAAATACGAGGTGTTA | 447.2 | 21388 |
| | GGTGGGACACGGGGACTGCTCAGGTCCTGCAGTCA | 439.1 | 21389 |
| | CTCAATCCGGGCGCGATGTATGCTACCACTTGAGTA | 437.2 | 21390 |
| | GCGACTTAGGACTGGGCATATCTGGTACCACTGTC | 434.3 | 21391 |
| | GCCGTACGGTCGAGGATAATGGAATTTTTGGGCTA | 431.8 | 21392 |
| | CTGTTCATTCACCACTACGTTCGAGTGAGGTTGGG | 429.8 | 21393 |
| | GAACGAGATATTACAGTCGCACTCCGTCCGCGATTA | 429.7 | 21394 |
| | CCGTAGCCAGACTCCACAAGAATCGGGGTAGTGCA | 428.2 | 21395 |
| | TGGTTAGCGATGACATCTCTCTTGGGGTCGCAGACGA | 422.9 | 21396 |
| | TAGCTAGCCTGAACAAAAACGCACCAAAAAGGTTGGA | 420.8 | 21397 |
| | GGAGTCCCATGGAGGGGGATGACGCCTCGCGGCTA | 419.6 | 21398 |
| | CTGGAGGACCGCGGCAAGGTCTGCTGGTATTATCCGA | 411.6 | 21399 |
| | CCGTGCTAGCAACCTGAGTTGAGGTGTGAGTCTACA | 403.3 | 21400 |
| | TTTGGCCGTGCTGTGGATGTGACAGGAATCACGGCGA | 395.7 | 21401 |
| | TATTCGAGATGGCCCGCATGTGGACGTACTAGATGA | 390.6 | 21402 |
| | CTGGTACGGGGATTGGACTGTTACTTCCCATCGCG | 383.3 | 21403 |
| | ATAGGGGCTCGTGACCAGGCGGTTTTTTCACGGGTTGA | 268.7 | 21404 |
| | CTACCAGTACAAGGGGGGAATCCTGTGATGATGCTA | 266.6 | 21405 |
| | TTCGGAGAGGTATTCTCGAGTGTATGTTCCTTGGG | 262.2 | 21406 |
| | TGTTTGGGTAGTCCGGGAGGTTTTTAGTATACTGG | 259.3 | 21407 |
| | TCGAAGACGAAAGACTTGATAACTGGTTCCAGTGGGA | 253.0 | 21408 |
| | TCTTACCACGCCCCGTTATACAACGGATCAGGCTG | 249.8 | 21409 |
| | CTTGGAAGTATCACAACTCGTATAACTCCTAAGCCGA | 249.6 | 21410 |
| | CATGTCATGTAATCCCCCTATGTATTCAAACGTTTA | 249.0 | 21411 |
| | CCGCTCAACATCACCAGAAATGTTCACAGCAGTCATGA | 248.8 | 21412 |
| | GCGGAGTGATTGGGACGCGTACGCGTAAAAATTGT | 247.2 | 21413 |
| | TGGGGAGCACAGTTCATCTGATCATCAATTTCCTAGA | 243.5 | 21414 |
| | TGCGTGATTGATCGCTCGTCTTGCAGATGTTTTGG | 239.4 | 21415 |
| | ACGGGTTGTTGTGCTAAAAGTTATTAACTTGACTA | 238.2 | 21416 |
| | TCTCGGAATCCGGTGCTTGTGATTATCTCGGGGTG | 230.7 | 21417 |
| | CCTGATCCAAGGCGTGGTGCTTTAATCGCCTAGTG | 228.4 | 21418 |
| | ATTTTCGCAAGCCGCAATGGTAGCCATGCCTTACAGA | 223.9 | 21419 |
| | GACGGCACGTGCCCTGTAACTCCTCTGACCCGTCA | 222.4 | 21420 |
| | TGGAGCTTCCTGTACGCTTTTGTCGGGTGAGAGATTGA | 221.9 | 21421 |
| | GGCGGAGCTGGGGTCCGACGCTCTTTGTTAGGCCTTGA | 221.8 | 21422 |
| | CTTGCGTTTTCACTATACCAACGTAAGCCAACTATTGA | 218.4 | 21423 |
| | GGATCTAAGTCGCTTTCCTACTCCTTGATTCATGA | 217.3 | 21424 |

[0863] In regards to Table 23, the variable regions continue in SEQ ID NOs 21340-21375 for the “Intact” experiments and in SEQ ID NOs 21425-22831 for the “Fixed, Sequencing run 2” experiments.

[0864] Three sequences per library that bound stronger to latent than active CD4+ T cells were identified based on read counts and fold changes. The variable regions of the sequences are noted in Table 24 below. Those sequences were synthesized and used for protein pull downs and target ID. See section below on Target ID.

[0865] Enrichment Scheme 3: Enrichment on Cells Fixed with Paraformaldehyde and Embedded in Paraffin—

[0866] Cells were immobilized on glass slides. Four enrichments total were performed: cells with active and latent HIV from both donors. After six rounds of selection, enrichment was confirmed by sequencing libraries from round 2, 4 and 6. Increases in number of species (unique sequences) were observed with increasing rounds of enrichment. See FIG. 12E.

[0867] Enrichment Scheme 4: Enrichment on Cell Lysates—

[0868] Cell lysates were immobilized on nitrocellulose pads on glass slides. The cell lysates are in 1% RapiGest. After addition of standard blocking reagents this concentration of RapiGest was 0.65% loaded on the pads. Little amplification was observed, suggesting that higher concentrations of lysate are required.

[0869] Target ID

[0870] We performed affinity isolation (pull down) using selected oligonucleotide probes from the selection on cells after fixation with paraformaldehyde followed by mass spectrometry to assess targets of the enriched oligonucleotides. Cells were divided for oligonucleotide probe pull downs as follows:
[0871] a. Pool 1: 3 sequences from enrichment on Donor 1
[0872] b. Pool 2: reverse complement of pool 1 sequences
[0873] c. Pool 3: 3 sequences from enrichment on Donor 2
[0874] d. Pool 4: reverse complement of pool 3 sequences.

[0875] Sequences of the oligonucleotide probes used for affinity pull downs are shown in Table 24. Each sequence with a name comprising “RC” are reverse complement controls to the sequence directly above and serve as negative controls as the reverse complement sequences should not specifically bind targets.

TABLE 24
Oligonucleotide Probes used for Pull-down Experiments

| | | | Variable |
|---|---|---|---|
| | Sequence/ | | region |
| | name/ID | Sequence | SEQ ID |
| Donor 1 | 5831-CD1-R6-S1- | 5′-/5Biosg/CTAGCATGACTGCAGTACGTCTCAAAATC | 2925 |
| library | 5′biotin | TCCTTAACTTCCTCTTCACCCGACGACTGTCTCTTATACA | |
| | (SEQ ID NO. 22832) | CATCTGACGCTGCCGACGA-3′ | |
| | 5831-CD1-6R-S1-RC- | 5′-/Biosg/TCGTCGGCAGCGTCAGATGTGTATAAGAGA | |
| | 5′biotin | CAGTCGTCGGGTGAAGAGGAAGTTAAGGAGATTTTGAGAC | |
| | (SEQ ID NO. 22833) | GTACTGCAGTCATGCTAG-3′ | |
| | 5831-CD1-R6-S2- | 5′-/Biosg/CTAGCATGACTGCAGTACGTTTCGGATACC | 2942 |
| | 5′biotin | TGGACGAGCTTATACCCCCCCTGTCCTGTCTCTTATACAC | |
| | (SEQ ID NO. 22834) | ATCTGACGCTGCCGACGA-3′ | |
| | 5831-CD1-R6-S2-RC- | /5Biosg/TCGTCGGCAGCGTCAGATGTGTATAAGAGACA | |
| | 5′biotin | GGACAGGGGGGGTATAAGCTCGTCCAGGTATCCGAAACGT | |
| | (SEQ ID NO. 22835) | ACTGCAGTCATGCTAG-3′ | |
| | 5831-CD1-R6-S3- | 5′-/5Biosg/CTAGCATGACTGCAGTACGTGAAAACAAG | 2931 |
| | 5′biotin | CATAGGATCGTACGGAAGTGTACCTAACTGTCTCTTATAC | |
| | (SEQ ID NO. 22836) | ACATCTGACGCTGCCGACGA-3′ | |
| | 5831-CD1-R6-S3-RC- | /5Biosg/TCGTCGGCAGCGTCAGATGTGTATAAGAGACA | |
| | 5′biotin | GTTAGGTACACTTCCGTACGATCCTATGCTTGTTTTCACG | |
| | (SEQ ID NO. 22837) | TACTGCAGTCATGCTAG-3′ | |
| Donor 2 | 5831-CD2-R6-S1- | 5′-/5Biosg/CTAGCATGACTGCAGTACGTATTGAGGTG | 2970 |
| library | 5′biotin | GTTTTGAGGTGGGCTATCTGAGGGATCTGTCTCTTATACA | |
| | (SEQ ID NO. 22838) | CATCTGACGCTGCCGACGA-3′ | |
| | 5831-CD2-R6-S1-RC- | 5′-/5Biosg/TCGTCGGCAGCGTCAGATGTGTATAAGAG | |
| | 5′biotin | ACAGATCCCTCAGATAGCCCACCTCAAAACCACCTCAATA | |
| | (SEQ ID NO. 22839) | CGTACTGCAGTCATGCTAG-3′ | |
| | 5831-CD2-R6-S2- | 5′-/5Biosg/CTAGCATGACTGCAGTACGTATATGGGGT | 2968 |
| | 5′biotin | TTATGGGGATGGTGTTATGGGTGGAATGTCTGTCTCTTAT | |
| | (SEQ ID NO. 22840) | ACACATCTGACGCTGCCGACGA-3′ | |
| | 5831-CD2-R6-S2-RC- | 5′-/5Biosg/TCGTCGGCAGCGTCAGATGTGTATAAGAG | |
| | 5′biotin | ACAGACATTCCACCCATAACACCATCCCCATAAACCCCAT | |
| | (SEQ ID NO. 22841) | ATACGTACTGCAGTCATGCTAG-3′ | |
| | 5831-CD2-R6-S3- | 5′-/5Biosg/CTAGCATGACTGCAGTACGTAGTGGGTGG | 2967 |
| | 5′biotin | TGGGTTCGGTTTGCTTGGTTCCCTGTTGACTGTCTCTTAT | |
| | (SEQ ID NO. 22842) | ACACATCTGACGCTGCCGACGA-3′ | |
| | 5831-CD2-R6-S3-RC- | 5′-/5Biosg/TCGTCGGCAGCGTCAGATGTGTATAAGAG | |
| | 5′biotin | ACAGTCAACAGGGAACCAAGCAAACCGAACCCACCACCCA | |
| | (SEQ ID NO. 22843) | CTACGTACTGCAGTCATGCTAG-3′ | |

[0876] Twelve proteins bound to three pooled sequences selected from the enrichment of cells after fixation with paraformaldehyde for Donor 1 but not to reverse complement control sequences. Eighteen proteins bound to three pooled sequences selected from the enrichment of cells after fixation with paraformaldehyde for Donor 2 but not to scrambled control sequences. Due to the low yield of sorted cells all protein IDs are at the detection limit of the instrument and a relative quantitation between samples was not performed. The proteins identified from the Donor 1 experiments included proteins involved in immune regulation and T cell activation, regulation of HIV replication, anti-HIV vaccine applications, proteins that are known to be overexpressed in HIV+ cells, and transcription factors and proteins that interact with the cytoskeleton. The proteins identified from the Donor 2 experiments included proteins known to interact with HIV Viral Protein R (VPR), proteins involved in HIV transmission, proteins that are known to be overexpressed in HIV+ cells, and transcription factors and proteins that interact with the cytoskeleton.

### Conclusions

[0877] Oligonucleotide probe enrichment schemes on intact cells and fixed cells identified oligonucleotide probes that bound preferentially to either CD4+ T cells with active or latent HIV infection. Depending on selection scheme and donor it was possible to identify hundreds of oligonucleotide sequences with fold changes of at least 10-fold binding to one or the other sample. The selection on fixed cells immobilized on glass slides also showed enrichment. Unique targets were identified by oligonucleotide probes pull-downs with sequences selected from the enrichment. Targets may be confirmed with a secondary binding method (ELONA, filter binding assay, EMSA, western blot, flow cytometry, etc.).

### Example 11: Disease Diagnosis

[0878] This example illustrates the use of various HIV related oligonucleotide probes of the present invention to diagnose a proliferative disease. As desired, the oligonucleotides are selected to target cells with latent or active infection, or both.

[0879] A suitable quantity of an oligonucleotide or pool of oligonucleotides that bind HIV infected cells, such as identified herein (see, e.g., Example 10), is synthesized via chemical means known in the art. The oligonucleotides are conjugated to a diagnostic agent suitable for detection, such as a fluorescent or radioactive moiety, using a method known in the art such as conjugation.

[0880] The composition is applied to infected cells isolated from blood samples taken from a test cohort of patients suffering from HIV infection. The composition is likewise applied to infected cells isolated from blood samples taken from a negative control cohort, not suffering from HIV infection.

[0881] The use of appropriate detection techniques (e.g., microbead assay or flow cytometry) indicating binding of one or more HIV related oligonucleotide to infected cells of the test cohort samples indicates the presence of infection, while the same techniques showing lack of binding applied to the control cohort samples indicate the absence of infection.

[0882] The HIV related oligonucleotide probes are then used to assess the presence or level of infected cells in a sample from a patient. The results show that the oligonucleotides of the present invention are useful in detecting virally infected cells.

### Example 12: Theranostics

[0883] This example illustrates the use of various HIV related oligonucleotide probes of the present invention to provide a theranosis for a drug for treating a viral infection. As desired, the oligonucleotides are selected to target cells with latent or active infection, or both.

[0884] A suitable quantity of an oligonucleotide or pool of oligonucleotides that bind HIV infected cells, such as identified herein (see, e.g., Example 10), is synthesized via chemical means known in the art. The oligonucleotides may be conjugated to an agent suitable for detection, such as a fluorescent or radioactive moiety, using a method known in the art such as conjugation. The oligonucleotide or pool of oligonucleotides is stabilized within a suitable composition, such as a buffered solution.

[0885] Treatment Selection.

[0886] The composition is applied to infected cells isolated from blood samples taken from a test cohort of patients suffering from HIV infection that responded to a certain treatment, e.g., an anti-viral agent. The composition is likewise applied to infected cells isolated from blood samples taken from a control cohort consisting of patients suffering from the same infection but that did not respond to the treatment. The use of appropriate detection techniques (e.g., immunoassays, histochemistry or NGS sequencing as described herein) on the test cohort samples indicates that oligonucleotides which bind the samples are useful for identifying patients that will respond to the treatment, while the same techniques applied to the control cohort samples identifies probes useful for identifying patients that will not respond to the treatment.

[0887] Treatment Monitoring.

[0888] In another setting, the composition is applied to infected cells isolated from blood samples taken from a test cohort of patients suffering from HIV infection prior to or during a course of treatment, such as anti-viral therapy. The composition is then applied to infected cells from blood samples taken from the patients over a time course. The use of appropriate detection techniques (e.g., immunoassays, histochemistry or NGS sequencing as described herein) on the test cohort samples indicates whether the detected population of infected cells increases, decreases, or remains steady in concentration over time during the course of treatment. An increase in the population of infected cells post-treatment may indicate that the treatment is ineffective whereas a decrease in the population of infected cells post-treatment may indicate that the treatment has a beneficial effect.

[0889] The results show that the oligonucleotide probes of the present invention are useful in theranosing viral infections.

### Example 13: Therapeutic Oligonucleotide Probes

[0890] This example illustrates the use various HIV related oligonucleotide probes of the present invention to treat a viral infection. As desired, the oligonucleotides are selected to target cells with latent or active infection, or both.

[0891] A suitable quantity of an oligonucleotide or pool of oligonucleotides that bind HIV infected cells, such as identified herein (see, e.g., Example 10), is synthesized via chemical means known in the art. The oligonucleotides are conjugated to a therapeutic agent, including without limitation a toxin small molecule drug and/or radioactive compound, using a conjugation method known in the art. The conjugate is formulated in an aqueous composition.

[0892] The composition is administered intravenously, in one or more doses, to a test cohort of mice carrying model viral infection. A control cohort, not suffering from the infection is administered the identical composition intravenously, according to a corresponding dosage regimen.

[0893] Pathological analysis of viral load or survival indicates effective treatment of the infection in the test cohort over the control cohort.

[0894] The results show that the oligonucleotides of the present invention are useful in treating viral infection.

[0895] Useful oligonucleotides are used to treat viral infection in other organisms, e.g., a human.

### Example 14: Cell Growth Inhibition or Killing

[0896] An HIV related oligonucleotide of the invention can be used for inhibiting the growth of or targeted killing of virally infected cells. This Example describes using such oligonucleotides to treat HIV infection.

[0897] A pharmaceutical composition comprising one or more HIV related oligonucleotide of the invention is administered to an HIV victim in sufficient dosage (e.g., a therapeutically effective amount) to treat the infection in the victim. As desired, the composition is administered in combination with traditional anti-viral therapeutics or vaccines.

[0898] Relatedly, one or more HIV related oligonucleotide is used to target a liposome, nanoparticle or other toxic agent to an infected cell. See, e.g., Liao J et al., Cell-specific aptamers and their conjugation with nanomaterials for targeted drug delivery. Expert Opin Drug Deliv. 2015 March; 12(3):493-506; Zhu H et al., Nucleic acid aptamer-mediated drug delivery for targeted cancer therapy. Chem Med Chem. 2015 January; 10(1):39-45; Khedri M, et al., Cancer immunotherapy via nucleic acid aptamers. Int Immunopharmacol. 2015 December; 29(2):926-36. As desired, a pharmaceutical composition comprising the one or more HIV related oligonucleotide oligonucleotide of the invention on the surface of a liposome is administered to an infected individual in sufficient dosage (e.g., a therapeutically effective amount) to treat the infection in the victim. As desired, the composition is administered in combination with additional anti-viral therapeutics or vaccines.

[0899] Relatedly, the one or more HIV related oligonucleotide is used as the targeting domain of a chimeric, multi-part aptamer construct of the invention. An aptamer region that binds an HIV infected cell is connected to a segment which also leads to cell killing, such as an immunomodulatory domain. One non-limiting example comprises an anti-C1q oligonucleotide such as described in PCT Patent Application PCT/US2016/40157, filed Jun. 29, 2016 and published as WO2017004243A1 on Jan. 5, 2017, which reference is incorporated by reference herein in its entirety. A pharmaceutical composition comprising such a chimeric oligonucleotide is administered to a infected individual in sufficient dosage (e.g., a therapeutically effective amount) to treat the infection in the victim. As desired, the composition is administered in combination with additional anti-viral therapeutics or vaccines.

[0900] The pharmaceutical composition may comprise one or more HIV related oligonucleotide that target latent cells, and one or more HIV related oligonucleotide that target active cells. The oligonucleotides can be configured to induce cell killing, thereby simultaneously killing cells have either latent or active infection. HIV related oligonucleotide that target active cells may be administered in combination with agents that induce latent cells into the active state, thereby killing the infected cells.

### Example 15: Cell Imaging

[0901] This Example describes using one or more HIV related oligonucleotide aptamer of the invention as an imaging agent. See Example 10.

[0902] The one or more oligonucleotide aptamer is combined with imaging agents including without limitation ananomaterial such as a magnetic nanomaterial, quantum dot, gold or radionuclide probe as desired. Sun and Zu. Aptamers and their applications in nanomedicine. Small. 2015 May; 11(20):2352-64; Dougherty C A et al., Applications of aptamers in targeted imaging: state of the art. Curr Top Med Chem. 2015; 15(12): 1138-52. The nanomaterial or other imaging agent is directly conjugated to the aptamer or encapsulated in a liposome or other nanoparticle. The construct can be configured to recognize HIV infected cells in the latent or active state depending on choice of oligonucleotides. See, e.g., Example 10. The aptamer targeted construct is administered to a patient and imaged to visualize the location of desired cells such as HIV infected cells.

### Example 16: HIV Related Oligonucleotide Immunoassay and Isolation

[0903] This Example illustrates immunoassays and isolation methods using one or more HIV related oligonucleotide of the invention. In such settings, a single aptamer to a target of interest or a plurality of aptamers can be chosen as desired. A nucleic acid construct is synthesized comprising an oligonucleotide region corresponding to any one or more of SEQ ID NOs. 2922-21424. The constructs may comprise a biotin modification to facilitate specific recognition by a desired moiety attached to streptavidin. Alternate modifications and sequence variants that retain binding ability (e.g., do not disrupt binding to the target of interest) may be used as desired. Many such available modifications are described herein.

[0904] One or more HIV related oligonucleotide is constructed. The construct is contacted with fluorescently labeled streptavidin such as a streptavidin—Alexa Fluor® 488 conjugate from Thermo Fisher Scientific, Catalog number: S11223. This creates a fluorescently labeled oligonucleotide construct which is used to detect targets in various immunoassay formats. In one scenario, a biological sample known or suspected to contain a HIV infected cells or particles thereof (e.g., exosomes) is contacted with an ELISA plate. The plate is washed and contacted with the fluorescently labeled HIV related oligonucleotide construct. The fluorescent signal is read from the wells in the plate, thereby providing an indication of the presence or amount of target in the biological sample. In another scenario, a biological sample is directly contacted with the fluorescently labeled HIV related oligonucleotide construct. The contacted sample is subjected to flow cytometry to detect fluorescent particles of the size of cells, thereby providing an indication of the presence or amount of cells having surface displayed target in the biological sample. Alternate labels such as disclosed herein or known in the art can be used in such formats.

[0905] Various modifications of the above scenarios are performed. For example, HIV related aptamers can be directly labeled with Alexa Fluor during the oligonucleotide synthesis process.

[0906] An immobilized HIV related oligonucleotide aptamer is constructed. In one scenario, the one or more HIV related oligonucleotide aptamer construct is contacted with streptavidin conjugated beads. The beads are contacted with a biological sample known or suspected to contain HIV infected cells (see, e.g., Example 10). The beads are precipitated (e.g., by centrifugation or magnetism) and washed. Proteins or other entities that precipitate with the beads are analyzed, thereby providing an indication of the presence or amount of target in the biological sample. In another scenario, the one or more HIV related aptamer construct is contacted with streptavidin agarose resin, e.g., Pierce™ Streptavidin Agarose, Thermo Fisher Scientific Catalog number: 20347 or Pierce™ High Capacity Streptavidin Agarose Thermo Fisher Scientific Catalog number: 20357. The resins are placed in a spin column or chromatography column, respectively. The aptamer is contacted with the resin where it is bound by the streptavidin. A biological sample known or suspected to comprise one or more HIV infected cells or particles thereof (e.g., exosomes) is allowed to pass through the resin. Targets (proteins, complexes, cells, etc) in the biological sample are retained by the aptamer within the resin and are then analyzed after elution. In either scenario, if desired, the one or more HIV related oligonucleotide aptamer is contacted with the biological sample in solution and then the sample is contacted with the beads or resin. This step allows the one or more HIV related oligonucleotide aptamer and target to bind freely in solution prior to aptamer immobilization.

[0907] Various modifications of the above scenarios are performed. For example, the one or more HIV related oligonucleotide aptamer is directly conjugated to a bead or other desired surface.

[0908] One of skill will appreciate that the one or more HIV related oligonucleotide aptamer construct can be used in any desired scenario where antibodies are conventionally used. See, e.g., Toh et al., Aptamers as a replacement for antibodies in enzyme-linked immunosorbent assay. Biosens Bioelectron. 2015 Feb. 15; 64:392-403. doi: 10.1016/j.bios.2014.09.026. Epub 2014 Sep. 16; Chen and Yang, Replacing antibodies with aptamers in lateral flow immunoassay. Biosens Bioelectron. 2015 Sep. 15; 71:230-42. doi: 10.1016/j.bios.2015.04.041. Epub 2015 Apr. 14; Guthrie et al, Assays for cytokines using aptamers. Methods. 2006 April; 38(4):324-30; Romig et al., Aptamer affinity chromatography: combinatorial chemistry applied to protein purification. J Chromatogr B Biomed Sci Appl. 1999 Aug. 20; 731(2):275-84.

### Example 17: Target Detection in Bodily Fluids

[0909] This Example describes using one or more HIV related oligonucleotide aptamer of the invention to detect HIV infected cells in bodily fluids. A bodily fluid such as blood or a derivative thereof, including without limitation sera or plasma, is obtained from a subject. An assay such as described in Example 16 is used to detect the oligonucleotide bound to cells in the bodily fluid. As desired, such detection may assist in the diagnosis, prognosis or theranosis of a disease or disorder, e.g., viral infection such as HIV infection. See, e.g., Examples 10-16 herein. As described herein, the choice of the one or more oligonucleotide can be made to preferentially target cells in the active or latent state.

### Example 18: Complement Cascade Initiation

[0910] This Example describes using an anti-C1q oligonucleotide to direct complement mediated cell killing of virally infected cells. The anti-C1q oligonucleotides herein are described in detail in Int'l Patent Application PCT/US16/40157, filed Jun. 29, 2016 and published as WO2017004243A1 on Jan. 5, 2017, which application is incorporated by reference herein in its entirety. See, e.g., Examples 35-39 therein.

[0911] Antibody immunotherapies may direct the killing of target cells through several mechanisms, including without limitation complement-dependent cytotoxicity (CDC), antibody-dependent cellular cytotoxicity (ADCC), apoptosis, and direct growth arrest. See, e.g., Taylor and Lindorfer, The role of complement in mAb-based therapies of cancer. Methods. 2014 Jan. 1; 65(1): 18-27. doi: 10.1016/j.ymeth.2013.07.027. Epub 2013 Jul. 22; Rogers et al., Complement in monoclonal antibody therapy of cancer. Immunol Res. 2014 August; 59(1-3):203-10. doi: 10.1007/s12026-014-8542-z; Zhou et al., The Role of Complement in the Mechanism of Action of Rituximab for B-Cell Lymphoma: Implications for Therapy, The Oncologist September 2008 vol. 13 no. 9 954-966; Di Gaetano et al., Complement activation determines the therapeutic activity of rituximab in vivo. J Immunol. 2003 Aug. 1; 171(3):1581-7.

[0912] The Fc regions of membrane-bound therapeutic antibodies interact with the heterooligomeric C1q complex and activate the classical complement pathway to initiate CDC. A multipartite construct comprising an anti-C1q oligonucleotide is provided in a pharmaceutical composition. The anti-C1q oligonucleotide may have a region corresponding to at least one of SEQ ID NOs. 22843-23002. See Example 35 of PCT/US 16/40157. The pharmaceutical composition is administered to an HIV victim in sufficient dosage to target infected cells in the victim. The construct comprises the anti-C1q oligonucleotide connected to an HIV related oligonucleotide domain, e.g., corresponding to any one of SEQ ID NOs. 2922-21424. See, e.g., FIGS. 8A-C herein and related discussion. As desired, the multipartite construct is used to direct complement mediated cell killing to latent or actively infected cells by choice of the HIV related oligonucleotide. For example, FIG. 8B provides constructs that target latently infected cells.

[0913] Although preferred embodiments of the present invention have been shown and described herein, it will be obvious to those skilled in the art that such embodiments are provided by way of example only. Numerous variations, changes, and substitutions will now occur to those skilled in the art without departing from the invention. It should be understood that various alternatives to the embodiments of the invention described herein may be employed in practicing the invention. It is intended that the following claims define the scope of the invention and that methods and structures within the scope of these claims and their equivalents be covered thereby.

1. An aptamer comprising a variable region, wherein the variable region comprises an oligonucleotide sequence selected from SEQ ID NOs: 2925, 2931, 2942, 2967, 2968, and 2970.

2. The aptamer of claim 1, further comprising a 5′ region with sequence 5′-CTAGCATGACTGCAGTACGT (SEQ ID NO. 3) and a 3′ region with sequence 5′-CTGTCTCTTATACACATCTGACGCTGCCGACGA (SEQ ID NO. 4).

3. (canceled)

4. (canceled)

5. (canceled)

6. The aptamer of claim 1, wherein the oligonucleotide is capable of binding to a cell harboring latent human immunodeficiency virus (HIV).

7. The aptamer of claim 6, wherein the cell harboring latent HIV is a T cell.

8. (canceled)

9. A plurality of aptamers comprising at least 2, 3, 4, 5, 6, 7, 8, 9, 10, 11, 12, 13, 14, 15, 16, 17, 18, 19, 20, 25, 30, 40, 45, 50, 55, or 57 different aptamers sequences according to claim 1.

10. The aptamer of claim 1, wherein the aptamer comprises a DNA, RNA, 2′-O-methyl or phosphorothioate backbone, or any combination thereof.

11. The aptamer of claim 1, wherein the aptamer comprises at least one of DNA, RNA, PNA, LNA, UNA, and any combination thereof.

12. The aptamer of claim 1, wherein the aptamer further comprises at least one functional modification selected from the group consisting of biotinylation, a non-naturally occurring nucleotide, a deletion, an insertion, an addition, and a chemical modification.

13. The aptamer of claim 1, wherein the aptamer further comprises a chemical modification selected from the group of C18, polyethylene glycol (PEG), PEG4, PEG6, PEG8, PEG12, or a combination thereof.

14. (canceled)

15. The aptamer of claim 1, wherein the aptamer is attached to a nanoparticle, liposome, gold, magnetic label, fluorescent label, light emitting particle, or radioactive label.

16. (canceled)

17. (canceled)

18. (canceled)

19. (canceled)

20. (canceled)

21. (canceled)

22. (canceled)

23. (canceled)

24. A method comprising contacting a biological sample with the one or more aptamers according to claim 1.

25. The method of claim 24, further comprising detecting a presence or level of a protein in the biological sample that is bound by at least one aptamer.

26. The method of claim 24, further comprising detecting a presence or level of a cell population in the biological sample that is bound by the at least one aptamer.

27. (canceled)

28. (canceled)

29. (canceled)

30. (canceled)

31. The method of claim 24, wherein the detecting comprises using at least one of sequencing, amplification, hybridization, gel electrophoresis, chromatography, immunoassay, enzyme immunoassay (EIA), enzyme-linked immunosorbent assay (ELISA), enzyme-linked oligonucleotide assay (ELONA), affinity isolation, immunoprecipitation, Western blot, gel electrophoresis, microscopy, flow cytometry and any combination thereof.

32. The method of claim 31, wherein the sequencing comprises at least one of next generation sequencing, dye termination sequencing, pyrosequencing, and any combination thereof.

33. (canceled)

34. The method of claim 31, wherein microscopy comprises transmission electron microscopy (TEM) of immunogold labeled oligonucleotides or confocal microscopy of fluor labeled aptamers.

35. (canceled)

36. The method of claim 24, wherein the biological sample comprises a bodily fluid, tissue sample or cell culture.

37. (canceled)

38. (canceled)

39. (canceled)

40. (canceled)

41. (canceled)

42. (canceled)

43. (canceled)

44. The method of claim 26, wherein the presence or level is used to determine whether the biological sample comprises a cell harboring latent HIV.

45. (canceled)

46. (canceled)

47. (canceled)

48. (canceled)

49. (canceled)

50. (canceled)

51. (canceled)

52. (canceled)

53. (canceled)

54. (canceled)

55. (canceled)

56. (canceled)

57. (canceled)

58. (canceled)

59. (canceled)

60. (canceled)

61. (canceled)

62. (canceled)

63. (canceled)

64. (canceled)

65. (canceled)

66. (canceled)

67. (canceled)

68. (canceled)

69. (canceled)

70. A pharmaceutical composition comprising a therapeutically effective amount of the aptamer according to claim 1, or a salt thereof, and a pharmaceutically acceptable carrier, diluent, or both.

71.-124. (canceled)

The application's sequence listing, which the Patent Office published only in electronic form, follows.

SEQUENCE LISTING (23022 sequences)

SEQ ID NO: 1 - DNA, 32 bp, Artificial Sequence
  Synthetic oligonucleotide
ccccccgaatcacatgacttgggcgggggtcg

SEQ ID NO: 2 - DNA, 32 bp, Artificial Sequence
  Synthetic oligonucleotide
accggatagcggttggaggcgtgctccactcg

SEQ ID NO: 3 - RNA, 70 nt, Artificial Sequence
  Synthetic oligonucleotide
auccagagugacgcagcagucuuuucugauggacacgugguggucuaguaucacuaagccaccgugucca

SEQ ID NO: 4 - DNA, 20 bp, Artificial Sequence
  Synthetic oligonucleotide
ctagcatgactgcagtacgt

SEQ ID NO: 5 - DNA, 33 bp, Artificial Sequence
  Synthetic oligonucleotide
ctgtctcttatacacatctgacgctgccgacga

SEQ ID NO: 6 - DNA, 15 bp, Artificial Sequence
  Synthetic oligonucleotide
tcgtcggcagcgtca

SEQ ID NO: 7 - protein, 8 aa, Artificial Sequence
  Synthetic peptide
DYKDDDDK

SEQ ID NO: 8 - protein, 9 aa, Artificial Sequence
  Synthetic peptide
YPYDVPDYA

SEQ ID NO: 9 - protein, 10 aa, Artificial Sequence
  Synthetic peptide
EQKLISEEDL

SEQ ID NO: 10 - DNA, 35 bp, Artificial Sequence
  Synthetic oligonucleotide
aacccgcgtgattggggtactgcccatgcgacttt

SEQ ID NO: 11 - DNA, 35 bp, Artificial Sequence
  Synthetic oligonucleotide
aactgaaggccaattaaactccactgtgctaatct

SEQ ID NO: 12 - DNA, 38 bp, Artificial Sequence
  Synthetic oligonucleotide
acatgccggcgttgatactctactgtgctccattatga

SEQ ID NO: 13 - DNA, 36 bp, Artificial Sequence
  Synthetic oligonucleotide
agacatgccacgccctttacatactccactgtgcca

SEQ ID NO: 14 - DNA, 34 bp, Artificial Sequence
  Synthetic oligonucleotide
agccacgcagacctatctctactgtgccaatgtt

SEQ ID NO: 15 - DNA, 37 bp, Artificial Sequence
  Synthetic oligonucleotide
aggtacgtaaggctgccattactctctactgtgccga

SEQ ID NO: 16 - DNA, 35 bp, Artificial Sequence
  Synthetic oligonucleotide
agtctagcgatcgacttttctctacggtgcccttc

SEQ ID NO: 17 - DNA, 37 bp, Artificial Sequence
  Synthetic oligonucleotide
agtgtgcgcatgaatccattactccactgtgccttga

SEQ ID NO: 18 - DNA, 37 bp, Artificial Sequence
  Synthetic oligonucleotide
agttgcagacccttgtattctctaccgtgccctatga

SEQ ID NO: 19 - DNA, 34 bp, Artificial Sequence
  Synthetic oligonucleotide
cactgctaactgatattgttgaactccaccgtgc

SEQ ID NO: 20 - DNA, 38 bp, Artificial Sequence
  Synthetic oligonucleotide
catgcgacaagcttccattaaccatccgctatttatga

SEQ ID NO: 21 - DNA, 36 bp, Artificial Sequence
  Synthetic oligonucleotide
catgcggaccacgctttcacaaactcatgattcaaa

SEQ ID NO: 22 - DNA, 35 bp, Artificial Sequence
  Synthetic oligonucleotide
catgcgtacgtcctattctctctactgtgcattaa

SEQ ID NO: 23 - DNA, 35 bp, Artificial Sequence
  Synthetic oligonucleotide
cctgcaatgcggaaacccttctactctactgtgcc

SEQ ID NO: 24 - DNA, 36 bp, Artificial Sequence
  Synthetic oligonucleotide
cgcgagccagggtactgcctgcggtctaaacaatca

SEQ ID NO: 25 - DNA, 36 bp, Artificial Sequence
  Synthetic oligonucleotide
cgtgcgacttgttctctactgtgccaataaaccata

SEQ ID NO: 26 - DNA, 35 bp, Artificial Sequence
  Synthetic oligonucleotide
gatagcgcatattcctctactgtgctacttgttat

SEQ ID NO: 27 - DNA, 36 bp, Artificial Sequence
  Synthetic oligonucleotide
gcaaaccaattagtgtacctctaccgtgcccaatga

SEQ ID NO: 28 - DNA, 38 bp, Artificial Sequence
  Synthetic oligonucleotide
gcaactactctctaccgtgcccagtgatttctccatga

SEQ ID NO: 29 - DNA, 36 bp, Artificial Sequence
  Synthetic oligonucleotide
gcaccacatgtcaatctctactgtgcttatctcata

SEQ ID NO: 30 - DNA, 36 bp, Artificial Sequence
  Synthetic oligonucleotide
gcagcacaaaagttactctcctctaccgtgccccta

SEQ ID NO: 31 - DNA, 36 bp, Artificial Sequence
  Synthetic oligonucleotide
gcagtttgcgtggatactctactgtgctgaccctta

SEQ ID NO: 32 - DNA, 36 bp, Artificial Sequence
  Synthetic oligonucleotide
gcatacatgaactctaccgtgcccgttgacttgaaa

SEQ ID NO: 33 - DNA, 35 bp, Artificial Sequence
  Synthetic oligonucleotide
gcatagcggttcacattattttactctaccgtgcc

SEQ ID NO: 34 - DNA, 34 bp, Artificial Sequence
  Synthetic oligonucleotide
gccacagtatcgttctcgagctggttcccgccat

SEQ ID NO: 35 - DNA, 38 bp, Artificial Sequence
  Synthetic oligonucleotide
gcgaacatcactctaccgtgccatctgaaatgacgtga

SEQ ID NO: 36 - DNA, 38 bp, Artificial Sequence
  Synthetic oligonucleotide
gcgaacttgtaactctactgtgcttatattaaggttga

SEQ ID NO: 37 - DNA, 35 bp, Artificial Sequence
  Synthetic oligonucleotide
gcgaccaatactctactgtgctgatacggatttta

SEQ ID NO: 38 - DNA, 35 bp, Artificial Sequence
  Synthetic oligonucleotide
gcgaccactctataacctcaaccgtgctcactcct

SEQ ID NO: 39 - DNA, 37 bp, Artificial Sequence
  Synthetic oligonucleotide
gcgcaagttgtctctaccgtgccccgaaagttttgga

SEQ ID NO: 40 - DNA, 35 bp, Artificial Sequence
  Synthetic oligonucleotide
gcgcaccacctacattgtctccaccgtgctttatt

SEQ ID NO: 41 - DNA, 36 bp, Artificial Sequence
  Synthetic oligonucleotide
gcgcacccacgtgaactctaccgtgcctatttccta

SEQ ID NO: 42 - DNA, 38 bp, Artificial Sequence
  Synthetic oligonucleotide
gcgcaccgacctctaccgtgccaaaataggttatctga

SEQ ID NO: 43 - DNA, 35 bp, Artificial Sequence
  Synthetic oligonucleotide
gcgccaccacacaaaccttccctatcgagggagat

SEQ ID NO: 44 - DNA, 37 bp, Artificial Sequence
  Synthetic oligonucleotide
gcgcggactatattactctactgtgccctgcttatga

SEQ ID NO: 45 - DNA, 35 bp, Artificial Sequence
  Synthetic oligonucleotide
gcggataggacaataacttactccactgtgccatc

SEQ ID NO: 46 - DNA, 35 bp, Artificial Sequence
  Synthetic oligonucleotide
gcggtgacctctactgtgcgccccaagccttagtt

SEQ ID NO: 47 - DNA, 38 bp, Artificial Sequence
  Synthetic oligonucleotide
gcgtacagaacctctaccgtgcccactcacttccatga

SEQ ID NO: 48 - DNA, 35 bp, Artificial Sequence
  Synthetic oligonucleotide
gcgtcccctcccggatggtcctttctctactgtgc

SEQ ID NO: 49 - DNA, 35 bp, Artificial Sequence
  Synthetic oligonucleotide
gcgtgctaacggtatgcaagacgtatgcgattttc

SEQ ID NO: 50 - DNA, 35 bp, Artificial Sequence
  Synthetic oligonucleotide
gctagaccgatccacctcaaacctctactgtgcct

SEQ ID NO: 51 - DNA, 35 bp, Artificial Sequence
  Synthetic oligonucleotide
gctagcttagctctaccgtgcacattccgctattt

SEQ ID NO: 52 - DNA, 35 bp, Artificial Sequence
  Synthetic oligonucleotide
ggtgcaggcaagatattttactctactgtgcattt

SEQ ID NO: 53 - DNA, 35 bp, Artificial Sequence
  Synthetic oligonucleotide
gtaaatgtacatgcgtatcctcacctctactgtgc

SEQ ID NO: 54 - DNA, 35 bp, Artificial Sequence
  Synthetic oligonucleotide
taacacgtctttcactctactgtgccctttatgcc

SEQ ID NO: 55 - DNA, 38 bp, Artificial Sequence
  Synthetic oligonucleotide
taatggcatgcggacctatcctctaccgtgctccttga

SEQ ID NO: 56 - DNA, 35 bp, Artificial Sequence
  Synthetic oligonucleotide
tatgcgatttctctaccgtgccaatatgccttgtt

SEQ ID NO: 57 - DNA, 36 bp, Artificial Sequence
  Synthetic oligonucleotide
tctgcgattctaccgttactctaccgtgccaccaaa

SEQ ID NO: 58 - DNA, 36 bp, Artificial Sequence
  Synthetic oligonucleotide
tgcgcagtcatttcgccatgttctctaccgtgccaa

SEQ ID NO: 59 - DNA, 38 bp, Artificial Sequence
  Synthetic oligonucleotide
tgtcaggcggtagtactctccaccgtgcctattgttga

SEQ ID NO: 60 - DNA, 35 bp, Artificial Sequence
  Synthetic oligonucleotide
acatgcataccctacgaatcgttccatcaccatac

SEQ ID NO: 61 - DNA, 35 bp, Artificial Sequence
  Synthetic oligonucleotide
agtcagtgcgcccgctatttacgatctcactgttc

SEQ ID NO: 62 - DNA, 35 bp, Artificial Sequence
  Synthetic oligonucleotide
agtgcagtcgcgatgggaacttcttctttgcttta

SEQ ID NO: 63 - DNA, 36 bp, Artificial Sequence
  Synthetic oligonucleotide
atggccatgcgaaccgaaacctagcccattttccta

SEQ ID NO: 64 - DNA, 34 bp, Artificial Sequence
  Synthetic oligonucleotide
attgcggtcatccccttccacgctataccaccat

SEQ ID NO: 65 - DNA, 35 bp, Artificial Sequence
  Synthetic oligonucleotide
cactgcaggtcactggcgccctatttcctcacatt

SEQ ID NO: 66 - DNA, 35 bp, Artificial Sequence
  Synthetic oligonucleotide
catgcccgtaaacgcctaatctaccaccttttgct

SEQ ID NO: 67 - DNA, 35 bp, Artificial Sequence
  Synthetic oligonucleotide
catgccgcctttcgacttccatatcccaacacgcc

SEQ ID NO: 68 - DNA, 35 bp, Artificial Sequence
  Synthetic oligonucleotide
catgccggtcattccatactcaaactcattcactc

SEQ ID NO: 69 - DNA, 35 bp, Artificial Sequence
  Synthetic oligonucleotide
catgcgagctacccttatcatctcatgtttgcttt

SEQ ID NO: 70 - DNA, 35 bp, Artificial Sequence
  Synthetic oligonucleotide
catgcgattgcgccccattccttgccttatctcac

SEQ ID NO: 71 - DNA, 36 bp, Artificial Sequence
  Synthetic oligonucleotide
catgcgcacatcgtactccgtagccctaaattatca

SEQ ID NO: 72 - DNA, 35 bp, Artificial Sequence
  Synthetic oligonucleotide
catgcgccctgtgcgttctctactaccctaatcat

SEQ ID NO: 73 - DNA, 38 bp, Artificial Sequence
  Synthetic oligonucleotide
catgtacgcacacccactgattctttaccacccactga

SEQ ID NO: 74 - DNA, 35 bp, Artificial Sequence
  Synthetic oligonucleotide
gcaggacaccccctcattatttgtttcatcctacg

SEQ ID NO: 75 - DNA, 35 bp, Artificial Sequence
  Synthetic oligonucleotide
gcatcaggcgcactttcatttgctaatcgtttttt

SEQ ID NO: 76 - DNA, 35 bp, Artificial Sequence
  Synthetic oligonucleotide
gccatgcgagagggttattgttgatctcatgggtt

SEQ ID NO: 77 - DNA, 35 bp, Artificial Sequence
  Synthetic oligonucleotide
gcgataaagcccatgtaaccctctgaaaacccgat

SEQ ID NO: 78 - DNA, 35 bp, Artificial Sequence
  Synthetic oligonucleotide
gcgccacgagctacccgacttccgattactttctt

SEQ ID NO: 79 - DNA, 35 bp, Artificial Sequence
  Synthetic oligonucleotide
gcggacatcgggcactttatacaaccacctttttg

SEQ ID NO: 80 - DNA, 36 bp, Artificial Sequence
  Synthetic oligonucleotide
gctgcaggccgtcccaaatattcgctcccacacata

SEQ ID NO: 81 - DNA, 35 bp, Artificial Sequence
  Synthetic oligonucleotide
gctggtcaggcgttccacacttcctacccgctttt

SEQ ID NO: 82 - DNA, 35 bp, Artificial Sequence
  Synthetic oligonucleotide
tatgcgcaggaccacctattacacgaccttatcct

SEQ ID NO: 83 - DNA, 35 bp, Artificial Sequence
  Synthetic oligonucleotide
tcaactggggtcagtgccaacgcttactttcttct

SEQ ID NO: 84 - DNA, 35 bp, Artificial Sequence
  Synthetic oligonucleotide
tcaagcagtcatagccggtttcacgctttacttac

SEQ ID NO: 85 - DNA, 35 bp, Artificial Sequence
  Synthetic oligonucleotide
aaaacacgcaaactacctggaaacttgacttcttt

SEQ ID NO: 86 - DNA, 35 bp, Artificial Sequence
  Synthetic oligonucleotide
aaaacactcacgatacctaccctggtcttcacaac

SEQ ID NO: 87 - DNA, 35 bp, Artificial Sequence
  Synthetic oligonucleotide
aaaacagcaggcattttcctgtactttcgaattca

SEQ ID NO: 88 - DNA, 35 bp, Artificial Sequence
  Synthetic oligonucleotide
aaaaccacagctaccattatcgcattggccctact

SEQ ID NO: 89 - DNA, 35 bp, Artificial Sequence
  Synthetic oligonucleotide
aaaacccaagcaccgaacgaactatccctttttct

SEQ ID NO: 90 - DNA, 35 bp, Artificial Sequence
  Synthetic oligonucleotide
aaaacccaccacgcgtcgtacgcataccacccttt

SEQ ID NO: 91 - DNA, 35 bp, Artificial Sequence
  Synthetic oligonucleotide
aaaaccggtcctgcgccttcttctccgcttttatt

SEQ ID NO: 92 - DNA, 35 bp, Artificial Sequence
  Synthetic oligonucleotide
caggtactgtggcaggcgatccattgctctctttt

SEQ ID NO: 93 - DNA, 35 bp, Artificial Sequence
  Synthetic oligonucleotide
caggtcagcagtccaggcgattactttctcttttc

SEQ ID NO: 94 - DNA, 35 bp, Artificial Sequence
  Synthetic oligonucleotide
cagtaaccgctgtctgtcatttttcaacattctgt

SEQ ID NO: 95 - DNA, 36 bp, Artificial Sequence
  Synthetic oligonucleotide
cagtaactgtagtcgtcgaaccttgcttacaaccca

SEQ ID NO: 96 - DNA, 35 bp, Artificial Sequence
  Synthetic oligonucleotide
cagtaaggaagctcatgcggtacaggtctacctcg

SEQ ID NO: 97 - DNA, 38 bp, Artificial Sequence
  Synthetic oligonucleotide
cagtaagtgctgtcactgcgccacttgtaaatacttga

SEQ ID NO: 98 - DNA, 36 bp, Artificial Sequence
  Synthetic oligonucleotide
cagtaatgcgaagctagtacgttctctcttatttta

SEQ ID NO: 99 - DNA, 35 bp, Artificial Sequence
  Synthetic oligonucleotide
cagtacaaacatcgcgattctttccttgatactgt

SEQ ID NO: 100 - DNA, 35 bp, Artificial Sequence
  Synthetic oligonucleotide
gagggcggctctaatgcatgcgctttcatctttgc

SEQ ID NO: 101 - DNA, 36 bp, Artificial Sequence
  Synthetic oligonucleotide
gagggcgggcagtcatttcgattatatctgcctaca

SEQ ID NO: 102 - DNA, 37 bp, Artificial Sequence
  Synthetic oligonucleotide
gagggcggtccaacgcgcaatgtcttttttcttccga

SEQ ID NO: 103 - DNA, 35 bp, Artificial Sequence
  Synthetic oligonucleotide
gagggcgtacaggagtcttgcggtccacattttat

SEQ ID NO: 104 - DNA, 35 bp, Artificial Sequence
  Synthetic oligonucleotide
gagggctactgaagttaatggcattcttctctatc

SEQ ID NO: 105 - DNA, 35 bp, Artificial Sequence
  Synthetic oligonucleotide
gagggctcatgccagccgcttttcttacctttatc

SEQ ID NO: 106 - DNA, 38 bp, Artificial Sequence
  Synthetic oligonucleotide
gagggctgaacaagtagtgcgtacattttccttcctga

SEQ ID NO: 107 - DNA, 35 bp, Artificial Sequence
  Synthetic oligonucleotide
gagggctgcaggcatccaatttcctccttgtccct

SEQ ID NO: 108 - DNA, 35 bp, Artificial Sequence
  Synthetic oligonucleotide
gaggggccgtccttcgtacggaatgtgcatgcgct

SEQ ID NO: 109 - DNA, 35 bp, Artificial Sequence
  Synthetic oligonucleotide
gaggggcggtcattgccgttagcctcctttcgcct

SEQ ID NO: 110 - DNA, 37 bp, Artificial Sequence
  Synthetic oligonucleotide
gcgaaactcgccatatacttaaacttgcccttttgga

SEQ ID NO: 111 - DNA, 38 bp, Artificial Sequence
  Synthetic oligonucleotide
aactgcacgtaaccttaatcactccaccgtgccattga

SEQ ID NO: 112 - DNA, 36 bp, Artificial Sequence
  Synthetic oligonucleotide
ttcgccgttaagcatcgtgtcatgcgcaactgttaa

SEQ ID NO: 113 - DNA, 35 bp, Artificial Sequence
  Synthetic oligonucleotide
acgcggacctagcatatcgtagtgcgtggcacttt

SEQ ID NO: 114 - DNA, 35 bp, Artificial Sequence
  Synthetic oligonucleotide
tatgcgcgccatcaccggaactaggtttgggcttt

SEQ ID NO: 115 - DNA, 35 bp, Artificial Sequence
  Synthetic oligonucleotide
gagtacggaatcgtgtcatcagctggatacttttt

SEQ ID NO: 116 - DNA, 38 bp, Artificial Sequence
  Synthetic oligonucleotide
atgcactgggctgaccggtattgcgtatttctctttga

SEQ ID NO: 117 - DNA, 35 bp, Artificial Sequence
  Synthetic oligonucleotide
tatgccccgttccattcttcattcactactagccc

SEQ ID NO: 118 - DNA, 36 bp, Artificial Sequence
  Synthetic oligonucleotide
aagcacaggtactagcaggttcgcactccctgacta

SEQ ID NO: 119 - DNA, 35 bp, Artificial Sequence
  Synthetic oligonucleotide
cacgccccaatatgccatactctactgtgcccctt

SEQ ID NO: 120 - DNA, 35 bp, Artificial Sequence
  Synthetic oligonucleotide
aatgcgcgctaaagaaggacttgtcttgccagccc

SEQ ID NO: 121 - DNA, 35 bp, Artificial Sequence
  Synthetic oligonucleotide
gaacggatcgtagtgaaacaggactggagcggccc

SEQ ID NO: 122 - DNA, 35 bp, Artificial Sequence
  Synthetic oligonucleotide
tcgtaggacaaaggcactggttgaatcttttctat

SEQ ID NO: 123 - DNA, 35 bp, Artificial Sequence
  Synthetic oligonucleotide
tgcgcgctaaacactgcaagtctagccccgcattc

SEQ ID NO: 124 - DNA, 35 bp, Artificial Sequence
  Synthetic oligonucleotide
tcacctaccaagtctccaatcattgcaccctctac

SEQ ID NO: 125 - DNA, 36 bp, Artificial Sequence
  Synthetic oligonucleotide
gcctatcaatgtctctctactgtgccggacttttta

SEQ ID NO: 126 - DNA, 36 bp, Artificial Sequence
  Synthetic oligonucleotide
aggactgcccccgcctgactctactgtgccatctca

SEQ ID NO: 127 - DNA, 35 bp, Artificial Sequence
  Synthetic oligonucleotide
ggtagctccaccgtgccatactcgatctttgttac

SEQ ID NO: 128 - DNA, 38 bp, Artificial Sequence
  Synthetic oligonucleotide
ttccgcgacctaactccaccgtgccataatccctttga

SEQ ID NO: 129 - DNA, 36 bp, Artificial Sequence
  Synthetic oligonucleotide
agacttaagcaaggtcgtacgtaggtagtcccacca

SEQ ID NO: 130 - DNA, 36 bp, Artificial Sequence
  Synthetic oligonucleotide
gctaactgcaggccccctatccgacctaaatataca

SEQ ID NO: 131 - DNA, 36 bp, Artificial Sequence
  Synthetic oligonucleotide
atcgtagtacgaatgtcaagcgtacacgctttccta

SEQ ID NO: 132 - DNA, 36 bp, Artificial Sequence
  Synthetic oligonucleotide
gcgttgatctctaccgtgcaccgaacactccccaca

SEQ ID NO: 133 - DNA, 38 bp, Artificial Sequence
  Synthetic oligonucleotide
gccgctatatcaatcctctactgtgcgaattaacctga

SEQ ID NO: 134 - DNA, 35 bp, Artificial Sequence
  Synthetic oligonucleotide
ttgctgttatcgtcctctactgtgccggtattcct

SEQ ID NO: 135 - DNA, 35 bp, Artificial Sequence
  Synthetic oligonucleotide
gtcatgcggaagctttcctgttttggtataatgtc

SEQ ID NO: 136 - DNA, 36 bp, Artificial Sequence
  Synthetic oligonucleotide
gcgaacagatttctctacggtgcttacacatattta

SEQ ID NO: 137 - DNA, 36 bp, Artificial Sequence
  Synthetic oligonucleotide
actggaaggagtcctacctgcctgacgcgtgacgta

SEQ ID NO: 138 - DNA, 38 bp, Artificial Sequence
  Synthetic oligonucleotide
gccaatactccactgtgcttgattttacttttgaatga

SEQ ID NO: 139 - DNA, 35 bp, Artificial Sequence
  Synthetic oligonucleotide
tgacctactaagtcagcgcacatcctgggctttct

SEQ ID NO: 140 - DNA, 35 bp, Artificial Sequence
  Synthetic oligonucleotide
tgtctctactgtgcccaattgttcggaaataactt

SEQ ID NO: 141 - DNA, 35 bp, Artificial Sequence
  Synthetic oligonucleotide
aacctctgctgtgcgttaaactctaccgtgcctac

SEQ ID NO: 142 - DNA, 36 bp, Artificial Sequence
  Synthetic oligonucleotide
tacaacgcgtgcttggggtgacgtggtgcctcttta

SEQ ID NO: 143 - DNA, 36 bp, Artificial Sequence
  Synthetic oligonucleotide
tagtcttgccgtctatctctaccgtgcctggcccta

SEQ ID NO: 144 - DNA, 35 bp, Artificial Sequence
  Synthetic oligonucleotide
gcggaactcgcccccttacatcattttttttggtt

SEQ ID NO: 145 - DNA, 35 bp, Artificial Sequence
  Synthetic oligonucleotide
tgcgtgctaaacggtctagcacatgcgggcctcac

SEQ ID NO: 146 - DNA, 38 bp, Artificial Sequence
  Synthetic oligonucleotide
gctgcagtgcgactctggcctccactgtgctaccttga

SEQ ID NO: 147 - DNA, 35 bp, Artificial Sequence
  Synthetic oligonucleotide
ggccacgactggttccccaattcacaggtatacat

SEQ ID NO: 148 - DNA, 35 bp, Artificial Sequence
  Synthetic oligonucleotide
gcgatagccttaacttgccttctgtgaactcgcct

SEQ ID NO: 149 - DNA, 35 bp, Artificial Sequence
  Synthetic oligonucleotide
tcacctactaggtccatccaatacttattgtccca

SEQ ID NO: 150 - DNA, 35 bp, Artificial Sequence
  Synthetic oligonucleotide
catgcggcaagcttttaactcagctttatctcata

SEQ ID NO: 151 - DNA, 38 bp, Artificial Sequence
  Synthetic oligonucleotide
catgacattttctccactgtgcttgtaattagtattga

SEQ ID NO: 152 - DNA, 36 bp, Artificial Sequence
  Synthetic oligonucleotide
aactccaccgtgcccacttcttgtttcatagtttaa

SEQ ID NO: 153 - DNA, 38 bp, Artificial Sequence
  Synthetic oligonucleotide
ccatgcgattttgtttcccctctactgtgcttatctga

SEQ ID NO: 154 - DNA, 35 bp, Artificial Sequence
  Synthetic oligonucleotide
tgttcacctgtccttcctctctactgtgccgttct

SEQ ID NO: 155 - DNA, 35 bp, Artificial Sequence
  Synthetic oligonucleotide
atgcgcgcgatcgaggtccccgatggcttcgctcc

SEQ ID NO: 156 - DNA, 36 bp, Artificial Sequence
  Synthetic oligonucleotide
tccgcgtgtaaccttggcatgtacctagtgtccaca

SEQ ID NO: 157 - DNA, 36 bp, Artificial Sequence
  Synthetic oligonucleotide
catgccaagctttcatttaggatttcgcccacatca

SEQ ID NO: 158 - DNA, 37 bp, Artificial Sequence
  Synthetic oligonucleotide
gcgtctgcgtcctagttttctctaccgtgcttttcga

SEQ ID NO: 159 - DNA, 36 bp, Artificial Sequence
  Synthetic oligonucleotide
ggctgctagacctccaccgtgccctttctttggtta

SEQ ID NO: 160 - DNA, 35 bp, Artificial Sequence
  Synthetic oligonucleotide
gagtcaggcccaggcttacatatcactagctttta

SEQ ID NO: 161 - DNA, 36 bp, Artificial Sequence
  Synthetic oligonucleotide
aatactctactgtgccccccgttttctcatcgatca

SEQ ID NO: 162 - DNA, 35 bp, Artificial Sequence
  Synthetic oligonucleotide
aggcatgcgcagagttaatttttttctctactgtg

SEQ ID NO: 163 - DNA, 36 bp, Artificial Sequence
  Synthetic oligonucleotide
gacctgcagcgcacgcccgatatctctactgtgcca

SEQ ID NO: 164 - DNA, 36 bp, Artificial Sequence
  Synthetic oligonucleotide
ccggggctaggaaagctaccacgtcatgcggaacta

SEQ ID NO: 165 - DNA, 35 bp, Artificial Sequence
  Synthetic oligonucleotide
catctcaaaactttcctctaccgtgcaaacattta

SEQ ID NO: 166 - DNA, 35 bp, Artificial Sequence
  Synthetic oligonucleotide
gcgatcgaacttgcctcctacaatcatcaactagc

SEQ ID NO: 167 - DNA, 38 bp, Artificial Sequence
  Synthetic oligonucleotide
cagtcatcccgtggactctgtgctcgtatctccattga

SEQ ID NO: 168 - DNA, 36 bp, Artificial Sequence
  Synthetic oligonucleotide
tcgtagtacgcggtgaaccctcaatttacgccccta

SEQ ID NO: 169 - DNA, 37 bp, Artificial Sequence
  Synthetic oligonucleotide
gcgtcgtccaactccactgtgcccattttaggtctga

SEQ ID NO: 170 - DNA, 35 bp, Artificial Sequence
  Synthetic oligonucleotide
gcatatgcggtgtttctactctaccgtgcaaaacc

SEQ ID NO: 171 - DNA, 36 bp, Artificial Sequence
  Synthetic oligonucleotide
gcggcaacacttcctctactgtgcttcctggcttaa

SEQ ID NO: 172 - DNA, 35 bp, Artificial Sequence
  Synthetic oligonucleotide
gattcggtccccttcttctctactgtgccttttct

SEQ ID NO: 173 - DNA, 35 bp, Artificial Sequence
  Synthetic oligonucleotide
ccgcgtgcttggtgcgtgctgcaggaaattggaaa

SEQ ID NO: 174 - DNA, 36 bp, Artificial Sequence
  Synthetic oligonucleotide
gcgtgccaacggactggagctctattgattgttcta

SEQ ID NO: 175 - DNA, 35 bp, Artificial Sequence
  Synthetic oligonucleotide
atgtacgtgcgtaccttttatattctctactgtgc

SEQ ID NO: 176 - DNA, 36 bp, Artificial Sequence
  Synthetic oligonucleotide
agagcctgggcttgctagctggatttggtcacgaaa

SEQ ID NO: 177 - DNA, 35 bp, Artificial Sequence
  Synthetic oligonucleotide
tactgcgcgcctggacccgtgtgctagacatgcgc

SEQ ID NO: 178 - DNA, 36 bp, Artificial Sequence
  Synthetic oligonucleotide
ccgtggtgccctgcgcgctaagaggctcacggagta

SEQ ID NO: 179 - DNA, 35 bp, Artificial Sequence
  Synthetic oligonucleotide
gtaccggacctagggactaacgtactggcacctct

SEQ ID NO: 180 - DNA, 36 bp, Artificial Sequence
  Synthetic oligonucleotide
taccgcgagcttgggaagtgctgctacgtctgccga

SEQ ID NO: 181 - DNA, 35 bp, Artificial Sequence
  Synthetic oligonucleotide
ggtatgcccgcttttactctactgtgcccgacata

SEQ ID NO: 182 - DNA, 36 bp, Artificial Sequence
  Synthetic oligonucleotide
gtgcaacactaagttgaccggattgagtctagcgaa

SEQ ID NO: 183 - DNA, 35 bp, Artificial Sequence
  Synthetic oligonucleotide
gactgcagggtgtcacctctaccgtgccatgaggt

SEQ ID NO: 184 - DNA, 35 bp, Artificial Sequence
  Synthetic oligonucleotide
ttcgtagtaccaatagtcagtaatgccctttcgcc

SEQ ID NO: 185 - DNA, 38 bp, Artificial Sequence
  Synthetic oligonucleotide
atgcactgtatgcgggctatgcgaatacctagttatga

SEQ ID NO: 186 - DNA, 36 bp, Artificial Sequence
  Synthetic oligonucleotide
cccggcgcgctacgggacgattatgagctcttgcaa

SEQ ID NO: 187 - DNA, 35 bp, Artificial Sequence
  Synthetic oligonucleotide
catgcgcacaggctttttaatctccatgaagtttc

SEQ ID NO: 188 - DNA, 38 bp, Artificial Sequence
  Synthetic oligonucleotide
gcgggcttacacgtactggaggggttgcatgccattga

SEQ ID NO: 189 - DNA, 35 bp, Artificial Sequence
  Synthetic oligonucleotide
gtcgtagtactcgcggtcaagagattccttatttc

SEQ ID NO: 190 - DNA, 35 bp, Artificial Sequence
  Synthetic oligonucleotide
cacgcgtgcttggcgacgttcacttgcgggcctat

SEQ ID NO: 191 - DNA, 36 bp, Artificial Sequence
  Synthetic oligonucleotide
gccacctcactccactgtgctatcttatcgccttca

SEQ ID NO: 192 - DNA, 36 bp, Artificial Sequence
  Synthetic oligonucleotide
cgtgtcctttgaccgtactgcgaaacgcctaccaaa

SEQ ID NO: 193 - DNA, 35 bp, Artificial Sequence
  Synthetic oligonucleotide
gaatcgtaacaaactgcaggcctatctctacttgt

SEQ ID NO: 194 - DNA, 37 bp, Artificial Sequence
  Synthetic oligonucleotide
gcaggaaacctctactgtgccttgtagtatactttga

SEQ ID NO: 195 - DNA, 38 bp, Artificial Sequence
  Synthetic oligonucleotide
gcagtccatagcgctcctggtctcctcttttgctttga

SEQ ID NO: 196 - DNA, 35 bp, Artificial Sequence
  Synthetic oligonucleotide
cgtgccactcaaatcctcctctaccgtgctttttt

SEQ ID NO: 197 - DNA, 35 bp, Artificial Sequence
  Synthetic oligonucleotide
tggagcacgccgccaatggacagtccaccttacct

SEQ ID NO: 198 - DNA, 35 bp, Artificial Sequence
  Synthetic oligonucleotide
gatgggcctgcgtgctaaggcgcgataacgggtgt

SEQ ID NO: 199 - DNA, 35 bp, Artificial Sequence
  Synthetic oligonucleotide
cgcgggccaggtctgcatgcatgcgaggtcacacc

SEQ ID NO: 200 - DNA, 37 bp, Artificial Sequence
  Synthetic oligonucleotide
gcgtgcttacgaacaaggtgcgtgcccgattctccga

SEQ ID NO: 201 - DNA, 36 bp, Artificial Sequence
  Synthetic oligonucleotide
tcagcggacctagcgaacgattgcggccaccactta

SEQ ID NO: 202 - DNA, 38 bp, Artificial Sequence
  Synthetic oligonucleotide
gccgcgcgtgccagcataatcgtactatgtctgcgtga

SEQ ID NO: 203 - DNA, 35 bp, Artificial Sequence
  Synthetic oligonucleotide
atcgtagaactagctagtctgcaatttctggttac

SEQ ID NO: 204 - DNA, 35 bp, Artificial Sequence
  Synthetic oligonucleotide
gccgcgtgcctggccaaactgggtcaacttttctc

SEQ ID NO: 205 - DNA, 38 bp, Artificial Sequence
  Synthetic oligonucleotide
tctatcgcgtgccagtgtacgtacggtgtcttatttga

SEQ ID NO: 206 - DNA, 35 bp, Artificial Sequence
  Synthetic oligonucleotide
ttacgttcccggactctactgtgcccctccctata

SEQ ID NO: 207 - DNA, 35 bp, Artificial Sequence
  Synthetic oligonucleotide
ccaaccgcgcgcctggggactacgtgacatctagc

SEQ ID NO: 208 - DNA, 36 bp, Artificial Sequence
  Synthetic oligonucleotide
tcgtagtactgctgctttgtgcgtccatactcgtta

SEQ ID NO: 209 - DNA, 37 bp, Artificial Sequence
  Synthetic oligonucleotide
atcgtagtactgcaactgggattattcacacactaga

SEQ ID NO: 210 - DNA, 36 bp, Artificial Sequence
  Synthetic oligonucleotide
gaattccgcgcgtagtcgagtactagggaaatcgaa

SEQ ID NO: 211 - DNA, 35 bp, Artificial Sequence
  Synthetic oligonucleotide
catgcggaccatgatttttattgagtttttgcttt

SEQ ID NO: 212 - DNA, 35 bp, Artificial Sequence
  Synthetic oligonucleotide
attcgagcggtcttgcgggtatccctccactgtgc

SEQ ID NO: 213 - DNA, 36 bp, Artificial Sequence
  Synthetic oligonucleotide
catgcgcattactctggtcaacttgccgaatcgaaa

SEQ ID NO: 214 - DNA, 37 bp, Artificial Sequence
  Synthetic oligonucleotide
gggcgtatcgtagccacgtacaagggttgcatattga

SEQ ID NO: 215 - DNA, 36 bp, Artificial Sequence
  Synthetic oligonucleotide
gcgagaagctttcaatcctcaaccttacgctttata

SEQ ID NO: 216 - DNA, 35 bp, Artificial Sequence
  Synthetic oligonucleotide
acgcctaagttgcctctaccgtgccgagccctcca

SEQ ID NO: 217 - DNA, 35 bp, Artificial Sequence
  Synthetic oligonucleotide
tgcggagctagcaacgagggtagagtgcgaattcc

SEQ ID NO: 218 - DNA, 35 bp, Artificial Sequence
  Synthetic oligonucleotide
gataagtcacggacggtttctctactgtgcctttt

SEQ ID NO: 219 - DNA, 36 bp, Artificial Sequence
  Synthetic oligonucleotide
gcgtgccaacaacctgcggacaaaagaccccctaaa

SEQ ID NO: 220 - DNA, 38 bp, Artificial Sequence
  Synthetic oligonucleotide
ggtcatgccgctaggggcgaactcctctgagcctgtga

SEQ ID NO: 221 - DNA, 38 bp, Artificial Sequence
  Synthetic oligonucleotide
cctcgcgcgccagggacgttgcaagttaaaccatatga

SEQ ID NO: 222 - DNA, 35 bp, Artificial Sequence
  Synthetic oligonucleotide
gcaggcgggccaggcttaatacacgcttctactta

SEQ ID NO: 223 - DNA, 34 bp, Artificial Sequence
  Synthetic oligonucleotide
atcgtagtaatgcagcaattgcaatactcctatt

SEQ ID NO: 224 - DNA, 36 bp, Artificial Sequence
  Synthetic oligonucleotide
accgaacctagggacgccccaggaatcacaatgtta

SEQ ID NO: 225 - DNA, 35 bp, Artificial Sequence
  Synthetic oligonucleotide
tactgctaactttcactctaccgtgcaaaccacca

SEQ ID NO: 226 - DNA, 35 bp, Artificial Sequence
  Synthetic oligonucleotide
cccggaagtgggttcgagctgcatcgtgtcaggcc

SEQ ID NO: 227 - DNA, 36 bp, Artificial Sequence
  Synthetic oligonucleotide
tagtaacttcatgcccccagtggaactcctctgaca

SEQ ID NO: 228 - DNA, 35 bp, Artificial Sequence
  Synthetic oligonucleotide
gtccacgcgtgcctgaggacacagccaggaaactt

SEQ ID NO: 229 - DNA, 36 bp, Artificial Sequence
  Synthetic oligonucleotide
aatcgctggccagaaagttagcagtcgaggcccaaa

SEQ ID NO: 230 - DNA, 36 bp, Artificial Sequence
  Synthetic oligonucleotide
agggcgtgccacctcgaacacgcaggtaatttttca

SEQ ID NO: 231 - DNA, 35 bp, Artificial Sequence
  Synthetic oligonucleotide
tcacctaccatgtccgagtaacactcgcccctcca

SEQ ID NO: 232 - DNA, 35 bp, Artificial Sequence
  Synthetic oligonucleotide
cgtggccggtggtccgtactgccaaaatatttaca

SEQ ID NO: 233 - DNA, 35 bp, Artificial Sequence
  Synthetic oligonucleotide
cgcgtgccagcggactttcaccatgcgatacgtgg

SEQ ID NO: 234 - DNA, 36 bp, Artificial Sequence
  Synthetic oligonucleotide
gagttaaagctatctctaccgtgccccctaaagtta

SEQ ID NO: 235 - DNA, 36 bp, Artificial Sequence
  Synthetic oligonucleotide
tatcgcgcgccagaagagtaagcaagtcatgaccca

SEQ ID NO: 236 - DNA, 37 bp, Artificial Sequence
  Synthetic oligonucleotide
tgaccaagggttccgctgtggggatacggttaaggga

SEQ ID NO: 237 - DNA, 36 bp, Artificial Sequence
  Synthetic oligonucleotide
agccggagctaggctagtgcgcaccagtcaaaccta

SEQ ID NO: 238 - DNA, 38 bp, Artificial Sequence
  Synthetic oligonucleotide
tcgtagtattgcaagggcaccttactcccaccatttga

SEQ ID NO: 239 - DNA, 35 bp, Artificial Sequence
  Synthetic oligonucleotide
gcgcagcttatcgccatccgcaaatccacacgctt

SEQ ID NO: 240 - DNA, 37 bp, Artificial Sequence
  Synthetic oligonucleotide
cccacgcgtgcctgtggatggcgcactcgggcataga

SEQ ID NO: 241 - DNA, 36 bp, Artificial Sequence
  Synthetic oligonucleotide
caaggagcacgtatgcactgtgcgagttggtccgta

SEQ ID NO: 242 - DNA, 36 bp, Artificial Sequence
  Synthetic oligonucleotide
agttagtctctaccgtgcccattattccgttctgaa

SEQ ID NO: 243 - DNA, 35 bp, Artificial Sequence
  Synthetic oligonucleotide
gcctgtgaaccttaaactctaccgtgcctctttgt

SEQ ID NO: 244 - DNA, 36 bp, Artificial Sequence
  Synthetic oligonucleotide
gctaaccaagtcatgggaccacgctctattgggata

SEQ ID NO: 245 - DNA, 35 bp, Artificial Sequence
  Synthetic oligonucleotide
gcaggcattattagtgtctctaccgtgctctggac

SEQ ID NO: 246 - DNA, 38 bp, Artificial Sequence
  Synthetic oligonucleotide
taccgcgcgcctggtagttgcagtattcctttgtttga

SEQ ID NO: 247 - DNA, 35 bp, Artificial Sequence
  Synthetic oligonucleotide
taacctaccaggccatgcgcaggactgtaatgcca

SEQ ID NO: 248 - DNA, 36 bp, Artificial Sequence
  Synthetic oligonucleotide
gcgccacatcgcaagcttatcgacaccccgctttca

SEQ ID NO: 249 - DNA, 35 bp, Artificial Sequence
  Synthetic oligonucleotide
cccggggctagggatcgggtgcaatcattgaattt

SEQ ID NO: 250 - DNA, 35 bp, Artificial Sequence
  Synthetic oligonucleotide
gcgagcctagcccgtaactggaaggccactactct

SEQ ID NO: 251 - DNA, 37 bp, Artificial Sequence
  Synthetic oligonucleotide
gacgggtgcgggctagcaagctttacctctattatga

SEQ ID NO: 252 - DNA, 35 bp, Artificial Sequence
  Synthetic oligonucleotide
gcgtgccaacgtgactgtgtcgcctttgctctgta

SEQ ID NO: 253 - DNA, 35 bp, Artificial Sequence
  Synthetic oligonucleotide
atcgtaggactgcgaaatcattgcgggtttattgt

SEQ ID NO: 254 - DNA, 35 bp, Artificial Sequence
  Synthetic oligonucleotide
ttacctaccaaggcacgccgttttatataaggtgg

SEQ ID NO: 255 - DNA, 35 bp, Artificial Sequence
  Synthetic oligonucleotide
ccgcgtgcttggattgtgcagtcctccctctgact

SEQ ID NO: 256 - DNA, 36 bp, Artificial Sequence
  Synthetic oligonucleotide
ttacctaccagtgcatggcgataagtctttcctata

SEQ ID NO: 257 - DNA, 35 bp, Artificial Sequence
  Synthetic oligonucleotide
gacgtctgcaggtgagcattggtctacttattggt

SEQ ID NO: 258 - DNA, 38 bp, Artificial Sequence
  Synthetic oligonucleotide
cgcgatcgtagcagtacggaggttcttctagcatatga

SEQ ID NO: 259 - DNA, 35 bp, Artificial Sequence
  Synthetic oligonucleotide
cgcgaatcgtagccgacgtgcttgggcttgcgacc

SEQ ID NO: 260 - DNA, 36 bp, Artificial Sequence
  Synthetic oligonucleotide
aagcacggtacgcacagtccgacttttgccttcaaa

SEQ ID NO: 261 - DNA, 35 bp, Artificial Sequence
  Synthetic oligonucleotide
tccggaactaggagacgtacacgccgcaatgcccc

SEQ ID NO: 262 - DNA, 35 bp, Artificial Sequence
  Synthetic oligonucleotide
ccgcggacctagcgaggacagcgcattgctagcta

SEQ ID NO: 263 - DNA, 35 bp, Artificial Sequence
  Synthetic oligonucleotide
agcccgcgtgcctgggagacgacctccgacttgcg

SEQ ID NO: 264 - DNA, 35 bp, Artificial Sequence
  Synthetic oligonucleotide
gcgtgctaaggtactgtacagtctacgcctatgtt

SEQ ID NO: 265 - DNA, 38 bp, Artificial Sequence
  Synthetic oligonucleotide
taccgcgatactgcacgtgtgcgaccgcttttccttga

SEQ ID NO: 266 - DNA, 36 bp, Artificial Sequence
  Synthetic oligonucleotide
tgacctaccaaggagagtttcatttgatctaaacta

SEQ ID NO: 267 - DNA, 35 bp, Artificial Sequence
  Synthetic oligonucleotide
cttagtgccctaagtctgcgtgactctactgtgcc

SEQ ID NO: 268 - DNA, 36 bp, Artificial Sequence
  Synthetic oligonucleotide
tgcaggcagagcccgttaagctttttatcaactcca

SEQ ID NO: 269 - DNA, 35 bp, Artificial Sequence
  Synthetic oligonucleotide
gaggcgaatcgtagctccacgtggtgccatgcaga

SEQ ID NO: 270 - DNA, 35 bp, Artificial Sequence
  Synthetic oligonucleotide
catccgctagttgcttttaatgaccaccgcttcca

SEQ ID NO: 271 - DNA, 36 bp, Artificial Sequence
  Synthetic oligonucleotide
aagcactgtacaaactggatgcgtacacttcctcca

SEQ ID NO: 272 - DNA, 35 bp, Artificial Sequence
  Synthetic oligonucleotide
gcgtgccaaggtacggaaggtccatgcaacggttt

SEQ ID NO: 273 - DNA, 36 bp, Artificial Sequence
  Synthetic oligonucleotide
cgtgtaccgcttgtaccgtacaaagtcaccttgtta

SEQ ID NO: 274 - DNA, 36 bp, Artificial Sequence
  Synthetic oligonucleotide
catgcgcgctccactggtcttaattttcctccatga

SEQ ID NO: 275 - DNA, 37 bp, Artificial Sequence
  Synthetic oligonucleotide
tctgcgtgctaagagcggccctgtagttgcgccttga

SEQ ID NO: 276 - DNA, 36 bp, Artificial Sequence
  Synthetic oligonucleotide
gcgtgccaacgattctgcgctgggctagtaccatta

SEQ ID NO: 277 - DNA, 35 bp, Artificial Sequence
  Synthetic oligonucleotide
gcgcgctaacggacaaatcccctaacctcgataaa

SEQ ID NO: 278 - DNA, 35 bp, Artificial Sequence
  Synthetic oligonucleotide
attctctaccgtgccacattttatcctctgcaaac

SEQ ID NO: 279 - DNA, 37 bp, Artificial Sequence
  Synthetic oligonucleotide
tgtctggatgccatgcgccacgcttttctcactatga

SEQ ID NO: 280 - DNA, 37 bp, Artificial Sequence
  Synthetic oligonucleotide
atcgtagtgctgcaggatctacctacattattctgga

SEQ ID NO: 281 - DNA, 36 bp, Artificial Sequence
  Synthetic oligonucleotide
gcagtctcatctgtcttctctaccgtgctcgaatca

SEQ ID NO: 282 - DNA, 35 bp, Artificial Sequence
  Synthetic oligonucleotide
gtctccggcgatatctccactgtgcccttctctat

SEQ ID NO: 283 - DNA, 35 bp, Artificial Sequence
  Synthetic oligonucleotide
gcaagtcattccagtcctgactctaccgtgcttac

SEQ ID NO: 284 - DNA, 35 bp, Artificial Sequence
  Synthetic oligonucleotide
gtgatggtcgtgcccgctttatcttacatctgctt

SEQ ID NO: 285 - DNA, 35 bp, Artificial Sequence
  Synthetic oligonucleotide
gcgtcgacgagatttttgacctctaccgtgccgac

SEQ ID NO: 286 - DNA, 35 bp, Artificial Sequence
  Synthetic oligonucleotide
tgcgtcaggcgtccgcttttaccccaccatgcttt

SEQ ID NO: 287 - DNA, 37 bp, Artificial Sequence
  Synthetic oligonucleotide
atgacacgcgcgcctgctagtactgcgctccatgcga

SEQ ID NO: 288 - DNA, 36 bp, Artificial Sequence
  Synthetic oligonucleotide
ggtcaagcattgcgactctaccgtgcctcaaactaa

SEQ ID NO: 289 - DNA, 35 bp, Artificial Sequence
  Synthetic oligonucleotide
cacgtactgtttactctaccgtgcattaaacgttt

SEQ ID NO: 290 - DNA, 35 bp, Artificial Sequence
  Synthetic oligonucleotide
agcaggcccttttcacatactctctactgtgctcc

SEQ ID NO: 291 - DNA, 35 bp, Artificial Sequence
  Synthetic oligonucleotide
taatgcaggagtgtgccaagcttttatttcatgtc

SEQ ID NO: 292 - DNA, 38 bp, Artificial Sequence
  Synthetic oligonucleotide
catgcgaccgctttacctacataggattactcttctga

SEQ ID NO: 293 - DNA, 35 bp, Artificial Sequence
  Synthetic oligonucleotide
ttgcggatctagcaacgaatggaaggaacacgtac

SEQ ID NO: 294 - DNA, 35 bp, Artificial Sequence
  Synthetic oligonucleotide
atcgtagtacccgcgggaaaaaaccacttatcatc

SEQ ID NO: 295 - DNA, 35 bp, Artificial Sequence
  Synthetic oligonucleotide
tcgctgcaccgtgtccatgcggctacaccaattcg

SEQ ID NO: 296 - DNA, 35 bp, Artificial Sequence
  Synthetic oligonucleotide
gcagaataccttactctaccgtgccattaatacat

SEQ ID NO: 297 - DNA, 38 bp, Artificial Sequence
  Synthetic oligonucleotide
gcgccgaatagcctctactgtgcgttaccctggattga

SEQ ID NO: 298 - DNA, 35 bp, Artificial Sequence
  Synthetic oligonucleotide
gcaggccgtatcactctaccgtgcaaaaagtatac

SEQ ID NO: 299 - DNA, 37 bp, Artificial Sequence
  Synthetic oligonucleotide
tactgaggcgacaattctctaccgtgcccccatttga

SEQ ID NO: 300 - DNA, 37 bp, Artificial Sequence
  Synthetic oligonucleotide
gccactagtatcctccactgtgcaaaattacaataga

SEQ ID NO: 301 - DNA, 38 bp, Artificial Sequence
  Synthetic oligonucleotide
ggtattgccgtgtagttcgttctctactgtgcctttga

SEQ ID NO: 302 - DNA, 35 bp, Artificial Sequence
  Synthetic oligonucleotide
cttgcgagattagctttatcacctgttttccgctt

SEQ ID NO: 303 - DNA, 35 bp, Artificial Sequence
  Synthetic oligonucleotide
gcacctctactgtgcccacaacgaattggactcac

SEQ ID NO: 304 - DNA, 35 bp, Artificial Sequence
  Synthetic oligonucleotide
ctccgcggtcatccactgctccattcaactcgcct

SEQ ID NO: 305 - DNA, 35 bp, Artificial Sequence
  Synthetic oligonucleotide
aatctccaccgtgcactatcttgtctcaaagtttc

SEQ ID NO: 306 - DNA, 36 bp, Artificial Sequence
  Synthetic oligonucleotide
gctagctgaattcaccatatctctactgtgcactaa

SEQ ID NO: 307 - DNA, 37 bp, Artificial Sequence
  Synthetic oligonucleotide
ctgcgtgctaagacgtacggtgtcaacatctctccga

SEQ ID NO: 308 - DNA, 35 bp, Artificial Sequence
  Synthetic oligonucleotide
gcgacgggacttagcttatattagatttcgcttct

SEQ ID NO: 309 - DNA, 36 bp, Artificial Sequence
  Synthetic oligonucleotide
catgcggaagcttactcatttttattcgattaccaa

SEQ ID NO: 310 - DNA, 35 bp, Artificial Sequence
  Synthetic oligonucleotide
taacctaccaagcaatcaccgttttggaaatcatt

SEQ ID NO: 311 - DNA, 36 bp, Artificial Sequence
  Synthetic oligonucleotide
gcccagaaaaactctactgtgcgatgacctgttaaa

SEQ ID NO: 312 - DNA, 36 bp, Artificial Sequence
  Synthetic oligonucleotide
tccgcgtgcctggaaaggtactgtccacttgaacaa

SEQ ID NO: 313 - DNA, 38 bp, Artificial Sequence
  Synthetic oligonucleotide
gagtttgcaggcttggggactctactgtgcaattttga

SEQ ID NO: 314 - DNA, 36 bp, Artificial Sequence
  Synthetic oligonucleotide
ttcgcctccaccgtgcatttctaactttatttctta

SEQ ID NO: 315 - DNA, 35 bp, Artificial Sequence
  Synthetic oligonucleotide
ccctcggactgagcactgcatacaagaagccttgc

SEQ ID NO: 316 - DNA, 37 bp, Artificial Sequence
  Synthetic oligonucleotide
cccgtgcctccccttatctctaccgtgcctcctatga

SEQ ID NO: 317 - DNA, 36 bp, Artificial Sequence
  Synthetic oligonucleotide
actcagtcatcgtacgctttccgatatcgctttata

SEQ ID NO: 318 - DNA, 35 bp, Artificial Sequence
  Synthetic oligonucleotide
tacgcgtgccaggaactgtaccagtcttatgccgc

SEQ ID NO: 319 - DNA, 36 bp, Artificial Sequence
  Synthetic oligonucleotide
gcggatttggtctctaccgtgcctactactagttaa

SEQ ID NO: 320 - DNA, 38 bp, Artificial Sequence
  Synthetic oligonucleotide
ggcacggaatgcatcgtgtcatggcgtctttcccctga

SEQ ID NO: 321 - DNA, 35 bp, Artificial Sequence
  Synthetic oligonucleotide
gtgcaggccacccagatctctactgtgcctcttac

SEQ ID NO: 322 - DNA, 35 bp, Artificial Sequence
  Synthetic oligonucleotide
atcgtaggactgcacatcgtagtttagttactcac

SEQ ID NO: 323 - DNA, 35 bp, Artificial Sequence
  Synthetic oligonucleotide
tcacctacaaatgtcaggcatatactactctatta

SEQ ID NO: 324 - DNA, 36 bp, Artificial Sequence
  Synthetic oligonucleotide
gtacaagcagtttggcgtatatctctactgtgctga

SEQ ID NO: 325 - DNA, 35 bp, Artificial Sequence
  Synthetic oligonucleotide
gataacgtttgattactccactgtgccataccctt

SEQ ID NO: 326 - DNA, 37 bp, Artificial Sequence
  Synthetic oligonucleotide
tgagcgatcgtagccaacgtactgcctttcctattga

SEQ ID NO: 327 - DNA, 35 bp, Artificial Sequence
  Synthetic oligonucleotide
gcgtcgaccacgttaatatttaccctctactgtgc

SEQ ID NO: 328 - DNA, 35 bp, Artificial Sequence
  Synthetic oligonucleotide
gcctggtcaactcgccgcaatacttttacccatcc

SEQ ID NO: 329 - DNA, 37 bp, Artificial Sequence
  Synthetic oligonucleotide
gtcaccctaaccgtattctccaccgtgccttacttga

SEQ ID NO: 330 - DNA, 35 bp, Artificial Sequence
  Synthetic oligonucleotide
gatagaattgagctctactgtgcctatctggttat

SEQ ID NO: 331 - DNA, 35 bp, Artificial Sequence
  Synthetic oligonucleotide
gtccaaattagctctctactgtgcctatccgttaa

SEQ ID NO: 332 - DNA, 37 bp, Artificial Sequence
  Synthetic oligonucleotide
gcgcacttgttcttcttggtcgcggcgtgccacgcga

SEQ ID NO: 333 - DNA, 36 bp, Artificial Sequence
  Synthetic oligonucleotide
gcggtcagagctaattctgtcaactcgccctttcta

SEQ ID NO: 334 - DNA, 36 bp, Artificial Sequence
  Synthetic oligonucleotide
gagcggaactagcgatgcgtacaaggttaatttcta

SEQ ID NO: 335 - DNA, 35 bp, Artificial Sequence
  Synthetic oligonucleotide
aacactctactgtgcctccacgatattttcatact

SEQ ID NO: 336 - DNA, 35 bp, Artificial Sequence
  Synthetic oligonucleotide
gtagtgatgccacctcaactgtgcccttgttttct

SEQ ID NO: 337 - DNA, 36 bp, Artificial Sequence
  Synthetic oligonucleotide
ttcctgcagttctattctctactgtgccctttgtta

SEQ ID NO: 338 - DNA, 37 bp, Artificial Sequence
  Synthetic oligonucleotide
gactgctctcatagtatgaactccactgtgcccttga

SEQ ID NO: 339 - DNA, 38 bp, Artificial Sequence
  Synthetic oligonucleotide
accatgcgcgcaaccttctctaccgtgcatctttttga

SEQ ID NO: 340 - DNA, 36 bp, Artificial Sequence
  Synthetic oligonucleotide
gcgttatacctccactgtgctcaattttcatctaaa

SEQ ID NO: 341 - DNA, 38 bp, Artificial Sequence
  Synthetic oligonucleotide
acgcgtgcctggtttactgcagacgagccccttcatga

SEQ ID NO: 342 - DNA, 38 bp, Artificial Sequence
  Synthetic oligonucleotide
gcacacacactttactctaccgtgccattttgaagtga

SEQ ID NO: 343 - DNA, 38 bp, Artificial Sequence
  Synthetic oligonucleotide
atctgcgggcatccatagataatactctactgtgctga

SEQ ID NO: 344 - DNA, 35 bp, Artificial Sequence
  Synthetic oligonucleotide
aaatcattcctgtggtctctctaccgtgccaatat

SEQ ID NO: 345 - DNA, 36 bp, Artificial Sequence
  Synthetic oligonucleotide
gccataacctatctctactgtgctaaaccggttaca

SEQ ID NO: 346 - DNA, 38 bp, Artificial Sequence
  Synthetic oligonucleotide
gcgactctacggaaatttgggatctctaccgtgcctga

SEQ ID NO: 347 - DNA, 35 bp, Artificial Sequence
  Synthetic oligonucleotide
acctctactgtgccgattccattgttcttccactc

SEQ ID NO: 348 - DNA, 35 bp, Artificial Sequence
  Synthetic oligonucleotide
gcgaccaagccattccaaactagccctgatttcaa

SEQ ID NO: 349 - DNA, 36 bp, Artificial Sequence
  Synthetic oligonucleotide
ctgtacggctgtctgggcctagtattcccgctttaa

SEQ ID NO: 350 - DNA, 36 bp, Artificial Sequence
  Synthetic oligonucleotide
gggaactgcaggttaaactctactgtgctatgttta

SEQ ID NO: 351 - DNA, 36 bp, Artificial Sequence
  Synthetic oligonucleotide
gcgtgggttcctctaccgtgccgaggttgttcctaa

SEQ ID NO: 352 - DNA, 38 bp, Artificial Sequence
  Synthetic oligonucleotide
tcgcggtcagcaattctccaccgtgcgattacctttga

SEQ ID NO: 353 - DNA, 36 bp, Artificial Sequence
  Synthetic oligonucleotide
tacacgtcaccttactctactgtgccgtaatcctca

SEQ ID NO: 354 - DNA, 38 bp, Artificial Sequence
  Synthetic oligonucleotide
atgcactgtacgcaggtcacgcgttttaccactactga

SEQ ID NO: 355 - DNA, 38 bp, Artificial Sequence
  Synthetic oligonucleotide
gttgcgtgctaacacacgtgactgcctatttcctatga

SEQ ID NO: 356 - DNA, 38 bp, Artificial Sequence
  Synthetic oligonucleotide
gctactgcgataactctaccgtgccactcccttgttga

SEQ ID NO: 357 - DNA, 36 bp, Artificial Sequence
  Synthetic oligonucleotide
tatccaaccactagtaagcctccaccgtgccattta

SEQ ID NO: 358 - DNA, 37 bp, Artificial Sequence
  Synthetic oligonucleotide
gctagttaccagtaacctctaccgtgcctcttctgga

SEQ ID NO: 359 - DNA, 36 bp, Artificial Sequence
  Synthetic oligonucleotide
cggcgaactcctctgtagcagtcgtgcggttcataa

SEQ ID NO: 360 - DNA, 35 bp, Artificial Sequence
  Synthetic oligonucleotide
aactgcgtgcctagtacggacttgcacccttgtgg

SEQ ID NO: 361 - DNA, 35 bp, Artificial Sequence
  Synthetic oligonucleotide
gcaggatccgttctttcaactcgcctatttctgga

SEQ ID NO: 362 - DNA, 35 bp, Artificial Sequence
  Synthetic oligonucleotide
actgcgaagccttgcatccaattactctactgtgc

SEQ ID NO: 363 - DNA, 35 bp, Artificial Sequence
  Synthetic oligonucleotide
gcgataatcttgtcattactctaccgtgccgttta

SEQ ID NO: 364 - DNA, 36 bp, Artificial Sequence
  Synthetic oligonucleotide
atgccggcctattactacctaactctactgtgctta

SEQ ID NO: 365 - DNA, 37 bp, Artificial Sequence
  Synthetic oligonucleotide
gcgatcaagcgtatttcttcttacctctactgtgcga

SEQ ID NO: 366 - DNA, 38 bp, Artificial Sequence
  Synthetic oligonucleotide
gatgacacgccctttccactccactgtgcctgttttga

SEQ ID NO: 367 - DNA, 36 bp, Artificial Sequence
  Synthetic oligonucleotide
tacatactccactgtgccacctttcccgactttcca

SEQ ID NO: 368 - DNA, 35 bp, Artificial Sequence
  Synthetic oligonucleotide
catgcaagattttgcgtaacttaattaattgcttt

SEQ ID NO: 369 - DNA, 35 bp, Artificial Sequence
  Synthetic oligonucleotide
gcactatatccgtacctaaacctccactgtgcttt

SEQ ID NO: 370 - DNA, 35 bp, Artificial Sequence
  Synthetic oligonucleotide
gcgctataactccgatgtattctccaccgtgccca

SEQ ID NO: 371 - DNA, 36 bp, Artificial Sequence
  Synthetic oligonucleotide
atcgtagtgctgcaggaaacgagattgatgcaccca

SEQ ID NO: 372 - DNA, 35 bp, Artificial Sequence
  Synthetic oligonucleotide
tgcgagtgggatttcgtccgacacctcaccatgca

SEQ ID NO: 373 - DNA, 35 bp, Artificial Sequence
  Synthetic oligonucleotide
agggtcatctagaacggttgacacgaaccgttgct

SEQ ID NO: 374 - DNA, 35 bp, Artificial Sequence
  Synthetic oligonucleotide
gctaggaaaggacccaaatctctactgtgcctacc

SEQ ID NO: 375 - DNA, 35 bp, Artificial Sequence
  Synthetic oligonucleotide
gcgaggaatacctatctctactgtgccaccaaacg

SEQ ID NO: 376 - DNA, 36 bp, Artificial Sequence
  Synthetic oligonucleotide
gccgtttactctaccgtgccgtatcgatttccatta

SEQ ID NO: 377 - DNA, 35 bp, Artificial Sequence
  Synthetic oligonucleotide
aggtcgtgcgtcccgttcaactagccctgttctca

SEQ ID NO: 378 - DNA, 35 bp, Artificial Sequence
  Synthetic oligonucleotide
cattgcgttctggctttcgttcattttcgctttac

SEQ ID NO: 379 - DNA, 35 bp, Artificial Sequence
  Synthetic oligonucleotide
gcactcatcgcggattatctccaccgtgccgacct

SEQ ID NO: 380 - DNA, 35 bp, Artificial Sequence
  Synthetic oligonucleotide
catgccagctttaactttgagatctgttagttttc

SEQ ID NO: 381 - DNA, 36 bp, Artificial Sequence
  Synthetic oligonucleotide
gccaggatctcaactgtgccattgcctttttctgaa

SEQ ID NO: 382 - DNA, 38 bp, Artificial Sequence
  Synthetic oligonucleotide
ttacctccaccgtgccaatcactgtttgatcgccttga

SEQ ID NO: 383 - DNA, 36 bp, Artificial Sequence
  Synthetic oligonucleotide
taacctaccaagtccaatttggagtctctacgatta

SEQ ID NO: 384 - DNA, 35 bp, Artificial Sequence
  Synthetic oligonucleotide
gcctcaacttgagtttctatcattctccactgtgc

SEQ ID NO: 385 - DNA, 37 bp, Artificial Sequence
  Synthetic oligonucleotide
catagctgcatactctaccgtgcactcattccctaga

SEQ ID NO: 386 - DNA, 37 bp, Artificial Sequence
  Synthetic oligonucleotide
gacatcaactgcgaactcccctgagtgtgatatcgga

SEQ ID NO: 387 - DNA, 35 bp, Artificial Sequence
  Synthetic oligonucleotide
tatctccaccgtgcccgttaataatctgatctgaa

SEQ ID NO: 388 - DNA, 36 bp, Artificial Sequence
  Synthetic oligonucleotide
tgcgtgccaaacggactcaaggtaccatgcatcaca

SEQ ID NO: 389 - DNA, 36 bp, Artificial Sequence
  Synthetic oligonucleotide
acatagactgccgagcgttcttctctaccgtgccca

SEQ ID NO: 390 - DNA, 36 bp, Artificial Sequence
  Synthetic oligonucleotide
atgaccgaggtacccgacggcctcataggatccata

SEQ ID NO: 391 - DNA, 35 bp, Artificial Sequence
  Synthetic oligonucleotide
gcggttatggggttctcaactgtgccaatctccat

SEQ ID NO: 392 - DNA, 35 bp, Artificial Sequence
  Synthetic oligonucleotide
gggtcatgcgatttctttgttcactcaactcgccc

SEQ ID NO: 393 - DNA, 37 bp, Artificial Sequence
  Synthetic oligonucleotide
gctgttgcgtccatatctccactgtgcttttggttga

SEQ ID NO: 394 - DNA, 35 bp, Artificial Sequence
  Synthetic oligonucleotide
atgcgtgccaatacgacgtcaggccatgaagccat

SEQ ID NO: 395 - DNA, 36 bp, Artificial Sequence
  Synthetic oligonucleotide
atgaactggtggacctttatcctctactgtgcaaaa

SEQ ID NO: 396 - DNA, 35 bp, Artificial Sequence
  Synthetic oligonucleotide
ccgcgtgcctggaccttgcacgacatgcggcaata

SEQ ID NO: 397 - DNA, 38 bp, Artificial Sequence
  Synthetic oligonucleotide
tctgcgggctagtatctaatgatctctaccgtgcttga

SEQ ID NO: 398 - DNA, 34 bp, Artificial Sequence
  Synthetic oligonucleotide
catgcggaggcttttaacaccatgcattctcacc

SEQ ID NO: 399 - DNA, 37 bp, Artificial Sequence
  Synthetic oligonucleotide
ttacgtatctgagcgctagtaccagtacctcgagtga

SEQ ID NO: 400 - DNA, 35 bp, Artificial Sequence
  Synthetic oligonucleotide
agtcaggcccgcttttatttttgtggttatttttg

SEQ ID NO: 401 - DNA, 38 bp, Artificial Sequence
  Synthetic oligonucleotide
cttgccctccgacatgaactctactgtgcaacctatga

SEQ ID NO: 402 - DNA, 32 bp, Artificial Sequence
  Synthetic oligonucleotide
atcgcgtgccagaacgtaactcgcccatcgac

SEQ ID NO: 403 - DNA, 35 bp, Artificial Sequence
  Synthetic oligonucleotide
tgacgcgtgcttggcaacgtggcaggacaattatt

SEQ ID NO: 404 - DNA, 36 bp, Artificial Sequence
  Synthetic oligonucleotide
accgcgtgattggaagatactgcgtcttcgatttaa

SEQ ID NO: 405 - DNA, 35 bp, Artificial Sequence
  Synthetic oligonucleotide
gtgtgctgaccttagcaaccgaactgaggccctac

SEQ ID NO: 406 - DNA, 36 bp, Artificial Sequence
  Synthetic oligonucleotide
gcgcgccaaggtactgcggatagcgcattggacaca

SEQ ID NO: 407 - DNA, 35 bp, Artificial Sequence
  Synthetic oligonucleotide
taccgacgcgctattttctactctactgtgctcat

SEQ ID NO: 408 - DNA, 35 bp, Artificial Sequence
  Synthetic oligonucleotide
aaccgaacgtccgataaactcgccctactaatact

SEQ ID NO: 409 - DNA, 35 bp, Artificial Sequence
  Synthetic oligonucleotide
accaggtccactttcggtgatagaccctgcacaca

SEQ ID NO: 410 - DNA, 35 bp, Artificial Sequence
  Synthetic oligonucleotide
taaattgcccgtttgttctctactgtgccactccg

SEQ ID NO: 411 - DNA, 38 bp, Artificial Sequence
  Synthetic oligonucleotide
gccaccttgactctgatccaactctactgtgccattga

SEQ ID NO: 412 - DNA, 38 bp, Artificial Sequence
  Synthetic oligonucleotide
cgtgccaccgctggcttcctacttcgctttaactatga

SEQ ID NO: 413 - DNA, 35 bp, Artificial Sequence
  Synthetic oligonucleotide
tgttctctactgtgcccgataacacgcttttgttc

SEQ ID NO: 414 - DNA, 36 bp, Artificial Sequence
  Synthetic oligonucleotide
ctggtgctgcaccgtgtcacctatctttacgcatta

SEQ ID NO: 415 - DNA, 36 bp, Artificial Sequence
  Synthetic oligonucleotide
atcgtagtacgaagctagccataacctgttatctca

SEQ ID NO: 416 - DNA, 38 bp, Artificial Sequence
  Synthetic oligonucleotide
gcgtgttttatctctactgtgcgaacgtttggaattga

SEQ ID NO: 417 - DNA, 38 bp, Artificial Sequence
  Synthetic oligonucleotide
agctaggggtatctctactgtgcgattcttccgggtga

SEQ ID NO: 418 - DNA, 36 bp, Artificial Sequence
  Synthetic oligonucleotide
cgtgcccgctttattctccctggcttattggtccca

SEQ ID NO: 419 - DNA, 38 bp, Artificial Sequence
  Synthetic oligonucleotide
gatgcgccgctttacactcttgttcttacccgctttga

SEQ ID NO: 420 - DNA, 35 bp, Artificial Sequence
  Synthetic oligonucleotide
ggggcatgtaccaaccgttatttactctactgtgc

SEQ ID NO: 421 - DNA, 35 bp, Artificial Sequence
  Synthetic oligonucleotide
gcatcgtgtccatgcccaaatggttcgtcttttta

SEQ ID NO: 422 - DNA, 38 bp, Artificial Sequence
  Synthetic oligonucleotide
atgcactggacgcgcatgtcgtttcatttctccattga

SEQ ID NO: 423 - DNA, 34 bp, Artificial Sequence
  Synthetic oligonucleotide
aagcacgggctgcattcgattcaggtaaacaatt

SEQ ID NO: 424 - DNA, 37 bp, Artificial Sequence
  Synthetic oligonucleotide
acacccgcatgaggtatcctgtggatcgtgggacgga

SEQ ID NO: 425 - DNA, 35 bp, Artificial Sequence
  Synthetic oligonucleotide
gccagctttcgttcatataccactatcgctttgta

SEQ ID NO: 426 - DNA, 38 bp, Artificial Sequence
  Synthetic oligonucleotide
acagtcataacagactccgctgcgtgctaagcggatga

SEQ ID NO: 427 - DNA, 36 bp, Artificial Sequence
  Synthetic oligonucleotide
gcgcgctaacgggtatctgcaggtcctactagttta

SEQ ID NO: 428 - DNA, 35 bp, Artificial Sequence
  Synthetic oligonucleotide
atgcacctgtctgtcagtccccgctaggccatatt

SEQ ID NO: 429 - DNA, 38 bp, Artificial Sequence
  Synthetic oligonucleotide
ccatgcgcccggttgagatttaacggatctcgctttga

SEQ ID NO: 430 - DNA, 35 bp, Artificial Sequence
  Synthetic oligonucleotide
gcacacctcgctttaacacttgtaactacgcttca

SEQ ID NO: 431 - DNA, 35 bp, Artificial Sequence
  Synthetic oligonucleotide
tcacctactaaggactgatagctgcctacattgtt

SEQ ID NO: 432 - DNA, 36 bp, Artificial Sequence
  Synthetic oligonucleotide
ccacgagtctaggggcgtaacgcagtaaggcataca

SEQ ID NO: 433 - DNA, 38 bp, Artificial Sequence
  Synthetic oligonucleotide
acatgcgtgctaaggtactactggtgtcgaacctttga

SEQ ID NO: 434 - DNA, 35 bp, Artificial Sequence
  Synthetic oligonucleotide
atcgtagtacatacagtgcgtttcgtaaattgcct

SEQ ID NO: 435 - DNA, 35 bp, Artificial Sequence
  Synthetic oligonucleotide
gcgccccgactgccactagcttttaattctcgctt

SEQ ID NO: 436 - DNA, 36 bp, Artificial Sequence
  Synthetic oligonucleotide
tgctagctggcccatactcaactgtgcgttactcaa

SEQ ID NO: 437 - DNA, 35 bp, Artificial Sequence
  Synthetic oligonucleotide
actctgcatccttcaactctactgtgcggttattt

SEQ ID NO: 438 - DNA, 38 bp, Artificial Sequence
  Synthetic oligonucleotide
gctaactgcagggcacacaatctcttaaggcttaatga

SEQ ID NO: 439 - DNA, 35 bp, Artificial Sequence
  Synthetic oligonucleotide
gcgtgggcctggtctttactactaaacaaattggt

SEQ ID NO: 440 - DNA, 35 bp, Artificial Sequence
  Synthetic oligonucleotide
gatcgtaacgcactgagggtcaggcattacccgcc

SEQ ID NO: 441 - DNA, 37 bp, Artificial Sequence
  Synthetic oligonucleotide
gcccggggctaggggaaagaacctgccggtcatggga

SEQ ID NO: 442 - DNA, 35 bp, Artificial Sequence
  Synthetic oligonucleotide
gcgacctagggtaacgatcgtagttcacccataat

SEQ ID NO: 443 - DNA, 36 bp, Artificial Sequence
  Synthetic oligonucleotide
ttacctaccacagtctccgcctcgttatccttatca

SEQ ID NO: 444 - DNA, 36 bp, Artificial Sequence
  Synthetic oligonucleotide
gccgcgtgcctggccgtggtgcatcactaagttgaa

SEQ ID NO: 445 - DNA, 35 bp, Artificial Sequence
  Synthetic oligonucleotide
ggcgcgcgctagccatacgaactgcttgaacattt

SEQ ID NO: 446 - DNA, 37 bp, Artificial Sequence
  Synthetic oligonucleotide
tgcgaatcgtagccatcgtccactgctgatttgcgga

SEQ ID NO: 447 - DNA, 36 bp, Artificial Sequence
  Synthetic oligonucleotide
gcgaccgattcttctctcaaacgcttacttctatga

SEQ ID NO: 448 - DNA, 35 bp, Artificial Sequence
  Synthetic oligonucleotide
gccaaatgatctccactgtgcgaaatgggcttttt

SEQ ID NO: 449 - DNA, 38 bp, Artificial Sequence
  Synthetic oligonucleotide
tgagcacacaatggacgtgacaccaatctttcttatga

SEQ ID NO: 450 - DNA, 36 bp, Artificial Sequence
  Synthetic oligonucleotide
tcatcacgcgctagtgaacgtgttgtagcaccccta

SEQ ID NO: 451 - DNA, 36 bp, Artificial Sequence
  Synthetic oligonucleotide
tcatgtgcgtgccaactgacgaggtgcaggctagcc

SEQ ID NO: 452 - DNA, 38 bp, Artificial Sequence
  Synthetic oligonucleotide
atcgtagctgctgcagtcccctgtcttaatatccctga

SEQ ID NO: 453 - DNA, 36 bp, Artificial Sequence
  Synthetic oligonucleotide
cgtatcgtagacgttacggaaggagataatgcgcaa

SEQ ID NO: 454 - DNA, 36 bp, Artificial Sequence
  Synthetic oligonucleotide
cttgccagctttccttgtcttcgctttcattacata

SEQ ID NO: 455 - DNA, 38 bp, Artificial Sequence
  Synthetic oligonucleotide
gctgtcattgaatctctactgtgcgatccactttttga

SEQ ID NO: 456 - DNA, 38 bp, Artificial Sequence
  Synthetic oligonucleotide
catgcgccagcttcttctgattttatctatctctatga

SEQ ID NO: 457 - DNA, 36 bp, Artificial Sequence
  Synthetic oligonucleotide
ccatgcccgcttaagcttcttttctatgtttctacg

SEQ ID NO: 458 - DNA, 35 bp, Artificial Sequence
  Synthetic oligonucleotide
tagcaggagtaccctccaccgtgcacattgtttcc

SEQ ID NO: 459 - DNA, 37 bp, Artificial Sequence
  Synthetic oligonucleotide
catgcccgctttgtttctccgctttttggtattccga

SEQ ID NO: 460 - DNA, 36 bp, Artificial Sequence
  Synthetic oligonucleotide
atgcacgtcgaaaggcatgcggtacaactcctatga

SEQ ID NO: 461 - DNA, 35 bp, Artificial Sequence
  Synthetic oligonucleotide
agacagcaggcatagcggggaacctctaccgtgcc

SEQ ID NO: 462 - DNA, 35 bp, Artificial Sequence
  Synthetic oligonucleotide
aagtaacgcgggttacaactttttctccaccgtgc

SEQ ID NO: 463 - DNA, 36 bp, Artificial Sequence
  Synthetic oligonucleotide
acagtctcatgcccgcttttaatcataccgcttaca

SEQ ID NO: 464 - DNA, 38 bp, Artificial Sequence
  Synthetic oligonucleotide
gcgcccgaccattccctaagcttttgaccccactatga

SEQ ID NO: 465 - DNA, 37 bp, Artificial Sequence
  Synthetic oligonucleotide
gcgacgactatcgcttgttcttgaatacctcgcttta

SEQ ID NO: 466 - DNA, 34 bp, Artificial Sequence
  Synthetic oligonucleotide
aaactctactgtgcctcagtttcaaaccggttct

SEQ ID NO: 467 - DNA, 35 bp, Artificial Sequence
  Synthetic oligonucleotide
gtcgtagtactgcgaaatgggccatgcgcaaactt

SEQ ID NO: 468 - DNA, 35 bp, Artificial Sequence
  Synthetic oligonucleotide
cgtgcggatttctccaccgtgcttttgacctctga

SEQ ID NO: 469 - DNA, 38 bp, Artificial Sequence
  Synthetic oligonucleotide
gactgcgacctacacttatttgctctactgtgccttga

SEQ ID NO: 470 - DNA, 35 bp, Artificial Sequence
  Synthetic oligonucleotide
catgcggcttctaccaggtcaaactagccccaatt

SEQ ID NO: 471 - DNA, 36 bp, Artificial Sequence
  Synthetic oligonucleotide
aaccggagctaggtacgtgtctgtcaggcatgaaga

SEQ ID NO: 472 - DNA, 36 bp, Artificial Sequence
  Synthetic oligonucleotide
atgagtccgcgtgcctggacctttacccccgacgaa

SEQ ID NO: 473 - DNA, 38 bp, Artificial Sequence
  Synthetic oligonucleotide
catgccgtacgcttattggatacaccatcgctttttga

SEQ ID NO: 474 - DNA, 37 bp, Artificial Sequence
  Synthetic oligonucleotide
gcgttggtgttcctctctactgtgcctgattttttga

SEQ ID NO: 475 - DNA, 37 bp, Artificial Sequence
  Synthetic oligonucleotide
atcgtagtactgcacgggtgccacgtgtcttcccaga

SEQ ID NO: 476 - DNA, 35 bp, Artificial Sequence
  Synthetic oligonucleotide
aggcacgtacaggcatcgaccgctttcttctttcc

SEQ ID NO: 477 - DNA, 36 bp, Artificial Sequence
  Synthetic oligonucleotide
gccatgcgggataatattaaatcctctaccgtgcca

SEQ ID NO: 478 - DNA, 37 bp, Artificial Sequence
  Synthetic oligonucleotide
tctgccatgcggctcattccgaaactctactgtgcga

SEQ ID NO: 479 - DNA, 35 bp, Artificial Sequence
  Synthetic oligonucleotide
ttttgcgattcctctactgtgccttctggttttgt

SEQ ID NO: 480 - DNA, 35 bp, Artificial Sequence
  Synthetic oligonucleotide
ctgcagcaatcatgcaggctttcatcgctttcatc

SEQ ID NO: 481 - DNA, 35 bp, Artificial Sequence
  Synthetic oligonucleotide
tcacctaccaagatctctcgcgccctatagtttct

SEQ ID NO: 482 - DNA, 35 bp, Artificial Sequence
  Synthetic oligonucleotide
caccgcgtgccaggggatcggaatgatatcaactg

SEQ ID NO: 483 - DNA, 36 bp, Artificial Sequence
  Synthetic oligonucleotide
taaactaccaagggcatgccaccatctactacatga

SEQ ID NO: 484 - DNA, 35 bp, Artificial Sequence
  Synthetic oligonucleotide
atcgtagtactgaaaagcgggatccagttctaatt

SEQ ID NO: 485 - DNA, 35 bp, Artificial Sequence
  Synthetic oligonucleotide
gaaggcaagcacccccctgctcaactagccaacaa

SEQ ID NO: 486 - DNA, 38 bp, Artificial Sequence
  Synthetic oligonucleotide
ctgccctcgttctccaccgtgcccactttgtaaactga

SEQ ID NO: 487 - DNA, 36 bp, Artificial Sequence
  Synthetic oligonucleotide
gatgcaagggcccgttagtactggggtctaattaaa

SEQ ID NO: 488 - DNA, 38 bp, Artificial Sequence
  Synthetic oligonucleotide
catgcgatggtcttgcacttggttagtaatctccttga

SEQ ID NO: 489 - DNA, 35 bp, Artificial Sequence
  Synthetic oligonucleotide
gtgcgcgctaacacggagagtctcaacttaacctg

SEQ ID NO: 490 - DNA, 36 bp, Artificial Sequence
  Synthetic oligonucleotide
aacaaattgccgtggggacgtggtcatgcggattta

SEQ ID NO: 491 - DNA, 36 bp, Artificial Sequence
  Synthetic oligonucleotide
gcgtggcacgaagctttctatttttacttgattcca

SEQ ID NO: 492 - DNA, 35 bp, Artificial Sequence
  Synthetic oligonucleotide
caatgccagcttacgtttatatcccaattcgcttt

SEQ ID NO: 493 - DNA, 35 bp, Artificial Sequence
  Synthetic oligonucleotide
aacggtcatgccagcttttggtacttagttctcct

SEQ ID NO: 494 - DNA, 37 bp, Artificial Sequence
  Synthetic oligonucleotide
gaacgcaggcatccgcattagctttttccttctatga

SEQ ID NO: 495 - DNA, 36 bp, Artificial Sequence
  Synthetic oligonucleotide
gcgccccgtacagcatcgtgtcatggacctacccta

SEQ ID NO: 496 - DNA, 37 bp, Artificial Sequence
  Synthetic oligonucleotide
tcgtagtaactgcaggatccactccactctcatttga

SEQ ID NO: 497 - DNA, 35 bp, Artificial Sequence
  Synthetic oligonucleotide
atgcactgtacgagcgggatcgctagtttacaaca

SEQ ID NO: 498 - DNA, 35 bp, Artificial Sequence
  Synthetic oligonucleotide
gcgcgctaacgtcactgcacatccagggccctatc

SEQ ID NO: 499 - DNA, 38 bp, Artificial Sequence
  Synthetic oligonucleotide
acccgatcgtagggaacgtaccgataacaaaattatga

SEQ ID NO: 500 - DNA, 36 bp, Artificial Sequence
  Synthetic oligonucleotide
actggtaggcatcgacctcaagctttctcaacatca

SEQ ID NO: 501 - DNA, 35 bp, Artificial Sequence
  Synthetic oligonucleotide
acacctaccaggtcacgcgttcgaacttcacttaa

SEQ ID NO: 502 - DNA, 35 bp, Artificial Sequence
  Synthetic oligonucleotide
accgcgcgctagggacgggatgcttcggcctgtta

SEQ ID NO: 503 - DNA, 35 bp, Artificial Sequence
  Synthetic oligonucleotide
taagcaactagggtgctgtcatcgcgatctctttt

SEQ ID NO: 504 - DNA, 35 bp, Artificial Sequence
  Synthetic oligonucleotide
atcccgggactagggcgacgtgatgcatctctcat

SEQ ID NO: 505 - DNA, 35 bp, Artificial Sequence
  Synthetic oligonucleotide
gacaaggtctgcccgcttcccacactacgcttaca

SEQ ID NO: 506 - DNA, 36 bp, Artificial Sequence
  Synthetic oligonucleotide
gcgcccgcttctcataactatggctttattctcaca

SEQ ID NO: 507 - DNA, 36 bp, Artificial Sequence
  Synthetic oligonucleotide
tgctccgggcctaggagattctacgtacgcaatgca

SEQ ID NO: 508 - DNA, 36 bp, Artificial Sequence
  Synthetic oligonucleotide
gccagactcgccccctatttttttggaactcgccta

SEQ ID NO: 509 - DNA, 38 bp, Artificial Sequence
  Synthetic oligonucleotide
gcatccgttaaactcgcctctcaaatcgaatcccatga

SEQ ID NO: 510 - DNA, 35 bp, Artificial Sequence
  Synthetic oligonucleotide
ctcgcagcatgcgaaggctttactcacaactatcg

SEQ ID NO: 511 - DNA, 37 bp, Artificial Sequence
  Synthetic oligonucleotide
ccgtgcgaacgttatgcgaccatgcgctctctcttga

SEQ ID NO: 512 - DNA, 38 bp, Artificial Sequence
  Synthetic oligonucleotide
gtctagccgcttttgttatgatattcttctctttatga

SEQ ID NO: 513 - DNA, 36 bp, Artificial Sequence
  Synthetic oligonucleotide
gcgtgccaacgtaccttccttatctggtgaactaca

SEQ ID NO: 514 - DNA, 35 bp, Artificial Sequence
  Synthetic oligonucleotide
gtgcgcgctaacactcctctcggtcatttgctgga

SEQ ID NO: 515 - DNA, 35 bp, Artificial Sequence
  Synthetic oligonucleotide
agcgcgtgattgcacgtgactgcacttctaatctt

SEQ ID NO: 516 - DNA, 35 bp, Artificial Sequence
  Synthetic oligonucleotide
tccgaacctaggaagccggatggaacatgcgccca

SEQ ID NO: 517 - DNA, 35 bp, Artificial Sequence
  Synthetic oligonucleotide
catcgcaagctttaatacaaaccctatccattgct

SEQ ID NO: 518 - DNA, 36 bp, Artificial Sequence
  Synthetic oligonucleotide
actgcgtgccgagtacaggactacagttaatggcaa

SEQ ID NO: 519 - DNA, 35 bp, Artificial Sequence
  Synthetic oligonucleotide
ccatgcgtgcctatggacgtccccaaacattgtct

SEQ ID NO: 520 - DNA, 35 bp, Artificial Sequence
  Synthetic oligonucleotide
tatcgcgggcaggcgattcgcttgtatttaatccg

SEQ ID NO: 521 - DNA, 36 bp, Artificial Sequence
  Synthetic oligonucleotide
actgcaccgtgtcatggcgagagctcacctaattca

SEQ ID NO: 522 - DNA, 35 bp, Artificial Sequence
  Synthetic oligonucleotide
gacatgcaaaggcccttaattgactccactgtgcc

SEQ ID NO: 523 - DNA, 35 bp, Artificial Sequence
  Synthetic oligonucleotide
catttgcgtgcctaaatgcggcgcgggctggcgac

SEQ ID NO: 524 - DNA, 35 bp, Artificial Sequence
  Synthetic oligonucleotide
gctggccaatgtatctcaaccgtgccgaaattatt

SEQ ID NO: 525 - DNA, 35 bp, Artificial Sequence
  Synthetic oligonucleotide
tgctaggactagccggttttctattactctatttt

SEQ ID NO: 526 - DNA, 36 bp, Artificial Sequence
  Synthetic oligonucleotide
tccggagctaggaactacggcgatctctgcgcctaa

SEQ ID NO: 527 - DNA, 35 bp, Artificial Sequence
  Synthetic oligonucleotide
gcctagtggacaccccgattcgaccttttttgctt

SEQ ID NO: 528 - DNA, 36 bp, Artificial Sequence
  Synthetic oligonucleotide
agtggaccaacggatcgcgtgccaggccgatgggca

SEQ ID NO: 529 - DNA, 36 bp, Artificial Sequence
  Synthetic oligonucleotide
gataaccagtgtcatgcaaacactatacattcctta

SEQ ID NO: 530 - DNA, 35 bp, Artificial Sequence
  Synthetic oligonucleotide
actgcacaacattgattctgacaggttgacaccaa

SEQ ID NO: 531 - DNA, 38 bp, Artificial Sequence
  Synthetic oligonucleotide
agtgcgcaatagtgcgacaagcttctatccatttttga

SEQ ID NO: 532 - DNA, 36 bp, Artificial Sequence
  Synthetic oligonucleotide
gctgacgttcgtagtccatgtacgggctgtcatcaa

SEQ ID NO: 533 - DNA, 36 bp, Artificial Sequence
  Synthetic oligonucleotide
tcgtgcagtatcgcggtcatgtcacactcccgtaca

SEQ ID NO: 534 - DNA, 36 bp, Artificial Sequence
  Synthetic oligonucleotide
agcacgatcgtagtgcgaatcgaacggggtctgcga

SEQ ID NO: 535 - DNA, 36 bp, Artificial Sequence
  Synthetic oligonucleotide
gcgcgctaacgactgtaggaatccaattctgaccga

SEQ ID NO: 536 - DNA, 38 bp, Artificial Sequence
  Synthetic oligonucleotide
agtgactgcgggcactgcgatcgcttttgattatttga

SEQ ID NO: 537 - DNA, 36 bp, Artificial Sequence
  Synthetic oligonucleotide
agccacccatcctcaaccgtgccataatcgcctcta

SEQ ID NO: 538 - DNA, 35 bp, Artificial Sequence
  Synthetic oligonucleotide
gcctctaccgtgcctgtgacccaccagttttttat

SEQ ID NO: 539 - DNA, 35 bp, Artificial Sequence
  Synthetic oligonucleotide
tcgtagtacgcaggtggtcaagcacgatttcttta

SEQ ID NO: 540 - DNA, 38 bp, Artificial Sequence
  Synthetic oligonucleotide
tcagtacgcactagtacattgccaagctttccacatga

SEQ ID NO: 541 - DNA, 35 bp, Artificial Sequence
  Synthetic oligonucleotide
aagcggaactagccaaggcaagggaaatgccctca

SEQ ID NO: 542 - DNA, 35 bp, Artificial Sequence
  Synthetic oligonucleotide
ggaccgaatctaggctgtactgtgcacgcatcgcc

SEQ ID NO: 543 - DNA, 35 bp, Artificial Sequence
  Synthetic oligonucleotide
ttacctacctggtcaggcataacatttagttcctc

SEQ ID NO: 544 - DNA, 38 bp, Artificial Sequence
  Synthetic oligonucleotide
aagaccgcgtgccaggtcaacgtacgcacatgcaatga

SEQ ID NO: 545 - DNA, 38 bp, Artificial Sequence
  Synthetic oligonucleotide
atcgtagtactgtagggcctctgtttcactcaatatga

SEQ ID NO: 546 - DNA, 35 bp, Artificial Sequence
  Synthetic oligonucleotide
aggacaggcgggttttgctgacgttgtctatactg

SEQ ID NO: 547 - DNA, 35 bp, Artificial Sequence
  Synthetic oligonucleotide
tactccactgtgcatccgatcttcttccccaactc

SEQ ID NO: 548 - DNA, 37 bp, Artificial Sequence
  Synthetic oligonucleotide
tctccactgtgcccgtaacttttcttttactgtccga

SEQ ID NO: 549 - DNA, 36 bp, Artificial Sequence
  Synthetic oligonucleotide
ccgggcctaggaggactgcatgacccctttaaccaa

SEQ ID NO: 550 - DNA, 35 bp, Artificial Sequence
  Synthetic oligonucleotide
ccgggcctaggacggttccacagtcagcgaatcct

SEQ ID NO: 551 - DNA, 35 bp, Artificial Sequence
  Synthetic oligonucleotide
aacgcgcgcttgggatgtatgcatcatctagattt

SEQ ID NO: 552 - DNA, 35 bp, Artificial Sequence
  Synthetic oligonucleotide
cacgacgcaccttaccgctttctatttttccgctt

SEQ ID NO: 553 - DNA, 35 bp, Artificial Sequence
  Synthetic oligonucleotide
gcacttggccgctttaactactacgctttgtcctc

SEQ ID NO: 554 - DNA, 37 bp, Artificial Sequence
  Synthetic oligonucleotide
cgtgtacgccagtgccgtgcagtcaggcgatctatga

SEQ ID NO: 555 - DNA, 36 bp, Artificial Sequence
  Synthetic oligonucleotide
cttaggcaatgacgtgcccttatgcgacttcgccca

SEQ ID NO: 556 - DNA, 38 bp, Artificial Sequence
  Synthetic oligonucleotide
gcaccgtttccaccgcgcgtggatcttcccaactttga

SEQ ID NO: 557 - DNA, 35 bp, Artificial Sequence
  Synthetic oligonucleotide
gcggacctagcttacggactgtaattaacgttttt

SEQ ID NO: 558 - DNA, 38 bp, Artificial Sequence
  Synthetic oligonucleotide
atgcgcatcccctctaccgtgcaattttccatccctga

SEQ ID NO: 559 - DNA, 36 bp, Artificial Sequence
  Synthetic oligonucleotide
gacgcgcgccagacagggaactgcacaggcatgcca

SEQ ID NO: 560 - DNA, 35 bp, Artificial Sequence
  Synthetic oligonucleotide
ccgagactaggacccctgtgttcatgcgctatttc

SEQ ID NO: 561 - DNA, 35 bp, Artificial Sequence
  Synthetic oligonucleotide
gctaactgcaggcacagcctaagaaacctcatgta

SEQ ID NO: 562 - DNA, 38 bp, Artificial Sequence
  Synthetic oligonucleotide
tgcagtctagcccgcttaatgtattccttgattcttga

SEQ ID NO: 563 - DNA, 35 bp, Artificial Sequence
  Synthetic oligonucleotide
gcgtgctagcgtactgcatggatactttggtagct

SEQ ID NO: 564 - DNA, 38 bp, Artificial Sequence
  Synthetic oligonucleotide
tcgtagtacagcagaccctccctacctacaattggtga

SEQ ID NO: 565 - DNA, 35 bp, Artificial Sequence
  Synthetic oligonucleotide
gccgctgactgagttctctctactgtgcgtatttt

SEQ ID NO: 566 - DNA, 36 bp, Artificial Sequence
  Synthetic oligonucleotide
gccagcagccctgaactcctctgaagcatcgccgca

SEQ ID NO: 567 - DNA, 35 bp, Artificial Sequence
  Synthetic oligonucleotide
taggtctgcacatgcgctaggcttttcttaccctg

SEQ ID NO: 568 - DNA, 38 bp, Artificial Sequence
  Synthetic oligonucleotide
gcgacgccccacgctttgacctaaacccatcaatatga

SEQ ID NO: 569 - DNA, 38 bp, Artificial Sequence
  Synthetic oligonucleotide
cgctacagacatgcgcatcttgacttatattcaattga

SEQ ID NO: 570 - DNA, 35 bp, Artificial Sequence
  Synthetic oligonucleotide
atgcactactgcgagcgagcacaggtttcctcctt

SEQ ID NO: 571 - DNA, 38 bp, Artificial Sequence
  Synthetic oligonucleotide
aacgcgtgccagagaagaaccgcggtctcgccccatga

SEQ ID NO: 572 - DNA, 35 bp, Artificial Sequence
  Synthetic oligonucleotide
cattgcgaactagctttcttctccttctagctttt

SEQ ID NO: 573 - DNA, 35 bp, Artificial Sequence
  Synthetic oligonucleotide
catgccctagaacattgctttaacactttcgcttt

SEQ ID NO: 574 - DNA, 38 bp, Artificial Sequence
  Synthetic oligonucleotide
tcatgcgatcaatcgctctgcgtgcctagatcgattga

SEQ ID NO: 575 - DNA, 34 bp, Artificial Sequence
  Synthetic oligonucleotide
gcgaccgtggcttcctacctccaagctttccgac

SEQ ID NO: 576 - DNA, 36 bp, Artificial Sequence
  Synthetic oligonucleotide
gcgtgctaacgtactagaccaaagcgagtaacatca

SEQ ID NO: 577 - DNA, 37 bp, Artificial Sequence
  Synthetic oligonucleotide
tcacgcgcgcttgggattacgtacaatcatcaatgga

SEQ ID NO: 578 - DNA, 36 bp, Artificial Sequence
  Synthetic oligonucleotide
gcactacaccctattcccgcgtaggtccccgagcct

SEQ ID NO: 579 - DNA, 36 bp, Artificial Sequence
  Synthetic oligonucleotide
taactccactgtgcgatcattgtttttcttttttga

SEQ ID NO: 580 - DNA, 35 bp, Artificial Sequence
  Synthetic oligonucleotide
atcgtagtactggtactcctgccctatttcgataa

SEQ ID NO: 581 - DNA, 35 bp, Artificial Sequence
  Synthetic oligonucleotide
acactctgcagcctagaactctaccgtgctaattt

SEQ ID NO: 582 - DNA, 35 bp, Artificial Sequence
  Synthetic oligonucleotide
gtgcgcgcgctagcatgcgtaatcatgtcatttaa

SEQ ID NO: 583 - DNA, 35 bp, Artificial Sequence
  Synthetic oligonucleotide
tcaatctcaactgtgcttccctggtttttagtttc

SEQ ID NO: 584 - DNA, 38 bp, Artificial Sequence
  Synthetic oligonucleotide
gtcctgcgtgctaaggaccctaagcttcatgcgtatga

SEQ ID NO: 585 - DNA, 36 bp, Artificial Sequence
  Synthetic oligonucleotide
tcgccgcccaaggatccctctactgtgccactttaa

SEQ ID NO: 586 - DNA, 35 bp, Artificial Sequence
  Synthetic oligonucleotide
gcgtgcctacgtaacgttcatgcggatggaccgat

SEQ ID NO: 587 - DNA, 35 bp, Artificial Sequence
  Synthetic oligonucleotide
cgtgccttggccggaccagtccttttgatcactac

SEQ ID NO: 588 - DNA, 35 bp, Artificial Sequence
  Synthetic oligonucleotide
caggcatgacgatttggcttaacttcccttgctta

SEQ ID NO: 589 - DNA, 35 bp, Artificial Sequence
  Synthetic oligonucleotide
tatgcgtatccaatcgcttttcaattcctatgctt

SEQ ID NO: 590 - DNA, 35 bp, Artificial Sequence
  Synthetic oligonucleotide
ccgcgtgccaggcgtaatgtaggcaggccctttat

SEQ ID NO: 591 - DNA, 35 bp, Artificial Sequence
  Synthetic oligonucleotide
gctaacagcagtcattgaatcctgtacgctccaaa

SEQ ID NO: 592 - DNA, 35 bp, Artificial Sequence
  Synthetic oligonucleotide
atcgcctgcgccaggactggggtgcagatcatgcg

SEQ ID NO: 593 - DNA, 37 bp, Artificial Sequence
  Synthetic oligonucleotide
ctgagcagtcaccattctttatctctactgtgctcga

SEQ ID NO: 594 - DNA, 35 bp, Artificial Sequence
  Synthetic oligonucleotide
acccacatcctgcgtgctaaggacggtggggccgg

SEQ ID NO: 595 - DNA, 36 bp, Artificial Sequence
  Synthetic oligonucleotide
ccggacctaggaatcgactcaggcgtggtagaacaa

SEQ ID NO: 596 - DNA, 35 bp, Artificial Sequence
  Synthetic oligonucleotide
tcatggccactaaactcgccccataaaaccttgtc

SEQ ID NO: 597 - DNA, 35 bp, Artificial Sequence
  Synthetic oligonucleotide
gactctactgtgcccgtttgttgttcttcccgaac

SEQ ID NO: 598 - DNA, 36 bp, Artificial Sequence
  Synthetic oligonucleotide
ggagccgggcctgccacgtagctcggaaaatgcgga

SEQ ID NO: 599 - DNA, 37 bp, Artificial Sequence
  Synthetic oligonucleotide
gatttcactagctctctactgtgcccatttctgttga

SEQ ID NO: 600 - DNA, 35 bp, Artificial Sequence
  Synthetic oligonucleotide
agcggatctagccagtatgcactcatgtcactttt

SEQ ID NO: 601 - DNA, 35 bp, Artificial Sequence
  Synthetic oligonucleotide
actgcacgtgcgcgcttaagttttcgcttctcttt

SEQ ID NO: 602 - DNA, 38 bp, Artificial Sequence
  Synthetic oligonucleotide
gtcgaggggaactcctctgaggctcaacacatatctga

SEQ ID NO: 603 - DNA, 35 bp, Artificial Sequence
  Synthetic oligonucleotide
gcgatccggttaaactacacactctactgtgcgaa

SEQ ID NO: 604 - DNA, 35 bp, Artificial Sequence
  Synthetic oligonucleotide
gctaaccaaggaatgcgctgccttagacagaattg

SEQ ID NO: 605 - DNA, 35 bp, Artificial Sequence
  Synthetic oligonucleotide
tcacctaccagggcgtggtaggtttttctctctac

SEQ ID NO: 606 - DNA, 37 bp, Artificial Sequence
  Synthetic oligonucleotide
cctcgcgtgccagggacctagtgcaatctatccgaga

SEQ ID NO: 607 - DNA, 38 bp, Artificial Sequence
  Synthetic oligonucleotide
ccgagcgaacgtacggaaagtgcgtactttatctttga

SEQ ID NO: 608 - DNA, 36 bp, Artificial Sequence
  Synthetic oligonucleotide
agtacgtgaccactactttccctcctttgtacttga

SEQ ID NO: 609 - DNA, 38 bp, Artificial Sequence
  Synthetic oligonucleotide
tcatgcggttgattggtctactcatgtttcttaattga

SEQ ID NO: 610 - DNA, 36 bp, Artificial Sequence
  Synthetic oligonucleotide
gcacaatcccacgcttcctattataccacgattcta

SEQ ID NO: 611 - DNA, 35 bp, Artificial Sequence
  Synthetic oligonucleotide
acaacccggcgcgccacggggtgatcgacaactgt

SEQ ID NO: 612 - DNA, 35 bp, Artificial Sequence
  Synthetic oligonucleotide
gatcgtccgcgtgcctggcaacgatacccgacaag

SEQ ID NO: 613 - DNA, 35 bp, Artificial Sequence
  Synthetic oligonucleotide
gcgtgtctctctactgtgcgcctcattcttatata

SEQ ID NO: 614 - DNA, 35 bp, Artificial Sequence
  Synthetic oligonucleotide
tcgtagtacacgcagtcgacaaacaagctagtatt

SEQ ID NO: 615 - DNA, 36 bp, Artificial Sequence
  Synthetic oligonucleotide
ttacctaccaacgtaatgcgctacaaccagagagta

SEQ ID NO: 616 - DNA, 35 bp, Artificial Sequence
  Synthetic oligonucleotide
ttagcgaaactagcgtacgacaaggtccaatgtaa

SEQ ID NO: 617 - DNA, 36 bp, Artificial Sequence
  Synthetic oligonucleotide
tgggcggatctagcaaaaacggacgcctcctgcgaa

SEQ ID NO: 618 - DNA, 35 bp, Artificial Sequence
  Synthetic oligonucleotide
aagcacgggacgcatgtcgtggctacctgaattct

SEQ ID NO: 619 - DNA, 38 bp, Artificial Sequence
  Synthetic oligonucleotide
gtgtgcaggcatgacgataagctttctaactcctatga

SEQ ID NO: 620 - DNA, 35 bp, Artificial Sequence
  Synthetic oligonucleotide
tctgcgcgcctagaagtacgcaatcaccacgcgac

SEQ ID NO: 621 - DNA, 38 bp, Artificial Sequence
  Synthetic oligonucleotide
atgtcgctgcaggtgcgtgcaagctttaatctccttga

SEQ ID NO: 622 - DNA, 37 bp, Artificial Sequence
  Synthetic oligonucleotide
tccgggcctaggaacggtcactagggaatgcccctga

SEQ ID NO: 623 - DNA, 36 bp, Artificial Sequence
  Synthetic oligonucleotide
acgtagtgcacatcctagactccactgtgcctctta

SEQ ID NO: 624 - DNA, 35 bp, Artificial Sequence
  Synthetic oligonucleotide
tcatgcataggcttatatgacaccatcgcttcttt

SEQ ID NO: 625 - DNA, 36 bp, Artificial Sequence
  Synthetic oligonucleotide
actgccggctgcaagcttttaggtacacttgattca

SEQ ID NO: 626 - DNA, 38 bp, Artificial Sequence
  Synthetic oligonucleotide
cacgcgccgctttttcgcctatacgctttttattttga

SEQ ID NO: 627 - DNA, 37 bp, Artificial Sequence
  Synthetic oligonucleotide
tctgactgcacgcatgggaccgcttaccactaaccga

SEQ ID NO: 628 - DNA, 36 bp, Artificial Sequence
  Synthetic oligonucleotide
tgcgggactagcataagttccacatgcgaagacaaa

SEQ ID NO: 629 - DNA, 35 bp, Artificial Sequence
  Synthetic oligonucleotide
gcgtgcctacgtacaggcggatatgcgcgtttccc

SEQ ID NO: 630 - DNA, 38 bp, Artificial Sequence
  Synthetic oligonucleotide
gcagtcgcgtatcgattcgctttcttatctggttatga

SEQ ID NO: 631 - DNA, 38 bp, Artificial Sequence
  Synthetic oligonucleotide
cgcaggcatgcaggcttttagtttaattactcctttga

SEQ ID NO: 632 - DNA, 36 bp, Artificial Sequence
  Synthetic oligonucleotide
gacactccagcactaaagctagtgtggtatcactta

SEQ ID NO: 633 - DNA, 38 bp, Artificial Sequence
  Synthetic oligonucleotide
cactgcgcttctagtactacctccactgtgctttttga

SEQ ID NO: 634 - DNA, 35 bp, Artificial Sequence
  Synthetic oligonucleotide
acacatgccgcttaatattgattcgcttttatcat

SEQ ID NO: 635 - DNA, 35 bp, Artificial Sequence
  Synthetic oligonucleotide
gagtagccaaacgcgtgcttggtggcgatcacgta

SEQ ID NO: 636 - DNA, 35 bp, Artificial Sequence
  Synthetic oligonucleotide
tactaaggaaagcggtaaaacgtacactgaaatct

SEQ ID NO: 637 - DNA, 35 bp, Artificial Sequence
  Synthetic oligonucleotide
ggtggtgcgaaaaatgcggtgtgaactcccctgaa

SEQ ID NO: 638 - DNA, 35 bp, Artificial Sequence
  Synthetic oligonucleotide
tatcgcgagccaggagacgtaaaaaggaaatgcgg

SEQ ID NO: 639 - DNA, 35 bp, Artificial Sequence
  Synthetic oligonucleotide
ggccaccgaccactatgcatcgtgtcatgacgtaa

SEQ ID NO: 640 - DNA, 36 bp, Artificial Sequence
  Synthetic oligonucleotide
atccgatctctaccgtgcaacccacccctttgttta

SEQ ID NO: 641 - DNA, 37 bp, Artificial Sequence
  Synthetic oligonucleotide
gcggtcgatcctctcaactgtgcactttttactacga

SEQ ID NO: 642 - DNA, 37 bp, Artificial Sequence
  Synthetic oligonucleotide
attcgtagctcaactctactgtgcattttttgtttga

SEQ ID NO: 643 - DNA, 37 bp, Artificial Sequence
  Synthetic oligonucleotide
gccgctaaactgtctccactgtgctaccttatcttga

SEQ ID NO: 644 - DNA, 35 bp, Artificial Sequence
  Synthetic oligonucleotide
cgcgtgcttgcgtactgtccgcgtaatcacacaca

SEQ ID NO: 645 - DNA, 36 bp, Artificial Sequence
  Synthetic oligonucleotide
tctccactgtgccgtttcctccgttcttactcctaa

SEQ ID NO: 646 - DNA, 35 bp, Artificial Sequence
  Synthetic oligonucleotide
acctgcgtgctaaggaacgtagcattcgtgtgcga

SEQ ID NO: 647 - DNA, 35 bp, Artificial Sequence
  Synthetic oligonucleotide
acacgcgcgcttgggactgaactcagcaatgcacc

SEQ ID NO: 648 - DNA, 35 bp, Artificial Sequence
  Synthetic oligonucleotide
tcacctactaacgtgtgcggggtttttacatcact

SEQ ID NO: 649 - DNA, 36 bp, Artificial Sequence
  Synthetic oligonucleotide
gatagccgcttagccaacacaaccgcttttgattca

SEQ ID NO: 650 - DNA, 35 bp, Artificial Sequence
  Synthetic oligonucleotide
gcggccttgcatcgattcaactcgccctatttcaa

SEQ ID NO: 651 - DNA, 35 bp, Artificial Sequence
  Synthetic oligonucleotide
agcgcatcgtagccgtacagcaatgtaatattctc

SEQ ID NO: 652 - DNA, 35 bp, Artificial Sequence
  Synthetic oligonucleotide
gctaactgcaggccaccacgcttgccctggctacc

SEQ ID NO: 653 - DNA, 35 bp, Artificial Sequence
  Synthetic oligonucleotide
aagcactgtgccgcagatatgcgatttttgtgatt

SEQ ID NO: 654 - DNA, 38 bp, Artificial Sequence
  Synthetic oligonucleotide
tgagccgcgcgcctggccacgacgattcatgtgattga

SEQ ID NO: 655 - DNA, 37 bp, Artificial Sequence
  Synthetic oligonucleotide
catgcgtaagcttatgtttcgattacgttcccattga

SEQ ID NO: 656 - DNA, 35 bp, Artificial Sequence
  Synthetic oligonucleotide
gtggtccgcgcgaaccaccatgggtgcaggcgaat

SEQ ID NO: 657 - DNA, 35 bp, Artificial Sequence
  Synthetic oligonucleotide
tcacctaccagggaaatgtccagccaccccgagct

SEQ ID NO: 658 - DNA, 35 bp, Artificial Sequence
  Synthetic oligonucleotide
gcagggcttgcaggcttttaattgtttcactatcg

SEQ ID NO: 659 - DNA, 36 bp, Artificial Sequence
  Synthetic oligonucleotide
gctaagtgcggtcactgccccaggagcttgatgcta

SEQ ID NO: 660 - DNA, 35 bp, Artificial Sequence
  Synthetic oligonucleotide
gtgcgggactagcacgcagtacagctttctgcgtc

SEQ ID NO: 661 - DNA, 35 bp, Artificial Sequence
  Synthetic oligonucleotide
gcgggactagcgagtttagcctgatactacattga

SEQ ID NO: 662 - DNA, 37 bp, Artificial Sequence
  Synthetic oligonucleotide
gcggacgattcctgttcctttgcttatttctctgaga

SEQ ID NO: 663 - DNA, 35 bp, Artificial Sequence
  Synthetic oligonucleotide
acacggacctagggtcgtactgcaggaagttgttc

SEQ ID NO: 664 - DNA, 37 bp, Artificial Sequence
  Synthetic oligonucleotide
actccactgtgcctctttaacttctttccatatatga

SEQ ID NO: 665 - DNA, 35 bp, Artificial Sequence
  Synthetic oligonucleotide
gcgtgcctacgacgccaggcactagtttagtaaac

SEQ ID NO: 666 - DNA, 38 bp, Artificial Sequence
  Synthetic oligonucleotide
aagcggggagcaacgtactgccatttactattccatga

SEQ ID NO: 667 - DNA, 35 bp, Artificial Sequence
  Synthetic oligonucleotide
tttaacggaacgacctgtggctgcacgtttctcca

SEQ ID NO: 668 - DNA, 35 bp, Artificial Sequence
  Synthetic oligonucleotide
tttgtactgagcaagcgtacataccgaagccccgt

SEQ ID NO: 669 - DNA, 35 bp, Artificial Sequence
  Synthetic oligonucleotide
catgcgcgattagcttgttctaccaccgctttaca

SEQ ID NO: 670 - DNA, 38 bp, Artificial Sequence
  Synthetic oligonucleotide
catgtcgacctctttgtaaactcgccctattttcctga

SEQ ID NO: 671 - DNA, 35 bp, Artificial Sequence
  Synthetic oligonucleotide
cattgcgcgctttcaataacctccgcttataacac

SEQ ID NO: 672 - DNA, 35 bp, Artificial Sequence
  Synthetic oligonucleotide
catctagaggctcattcatattaacacgctttcct

SEQ ID NO: 673 - DNA, 37 bp, Artificial Sequence
  Synthetic oligonucleotide
tcgtagtgctgcaagtccttagtaccttggatcttga

SEQ ID NO: 674 - DNA, 35 bp, Artificial Sequence
  Synthetic oligonucleotide
atgcacggttctgctcaggccatcattttcttcac

SEQ ID NO: 675 - DNA, 35 bp, Artificial Sequence
  Synthetic oligonucleotide
gcgcgcctacgttaatgcacttcgtgacatcttcc

SEQ ID NO: 676 - DNA, 35 bp, Artificial Sequence
  Synthetic oligonucleotide
ccggtcgtagggtgactgcgggcataagctgggtt

SEQ ID NO: 677 - DNA, 35 bp, Artificial Sequence
  Synthetic oligonucleotide
tgcgcaggcccgttgtactcgctcactgctagatt

SEQ ID NO: 678 - DNA, 36 bp, Artificial Sequence
  Synthetic oligonucleotide
aagcacggacaagcatgtatgcgatcacgcccttta

SEQ ID NO: 679 - DNA, 35 bp, Artificial Sequence
  Synthetic oligonucleotide
gactgcgggactagcaacgtactgtggctggcgat

SEQ ID NO: 680 - DNA, 35 bp, Artificial Sequence
  Synthetic oligonucleotide
gcctccgtaacctacccgcgtgcctgggggttacc

SEQ ID NO: 681 - DNA, 35 bp, Artificial Sequence
  Synthetic oligonucleotide
gcagggaatccagcgaccgttcctctaccgtgcct

SEQ ID NO: 682 - DNA, 38 bp, Artificial Sequence
  Synthetic oligonucleotide
catgcggaagctttctctgttgatgatgaaccctttga

SEQ ID NO: 683 - DNA, 35 bp, Artificial Sequence
  Synthetic oligonucleotide
actgcgctaatgcccgcttaacctccatgattgtt

SEQ ID NO: 684 - DNA, 35 bp, Artificial Sequence
  Synthetic oligonucleotide
ggggtcgcgtgccagaccacgactcatgtctgtgc

SEQ ID NO: 685 - DNA, 35 bp, Artificial Sequence
  Synthetic oligonucleotide
atcgtagaactgcagacccgcatggctacctttgt

SEQ ID NO: 686 - DNA, 36 bp, Artificial Sequence
  Synthetic oligonucleotide
attgcggatcgtagctctaactgcgcatgcggtaca

SEQ ID NO: 687 - DNA, 35 bp, Artificial Sequence
  Synthetic oligonucleotide
tacacaccgctttactatcctcaatttcgctttcc

SEQ ID NO: 688 - DNA, 35 bp, Artificial Sequence
  Synthetic oligonucleotide
tgcctctactgtgccgataccggtttctttatatt

SEQ ID NO: 689 - DNA, 36 bp, Artificial Sequence
  Synthetic oligonucleotide
tcccgcgcgctagggtaatgatccagcagacatgta

SEQ ID NO: 690 - DNA, 36 bp, Artificial Sequence
  Synthetic oligonucleotide
tcgtagtactcgcgcttcccgtatcacaattttgaa

SEQ ID NO: 691 - DNA, 37 bp, Artificial Sequence
  Synthetic oligonucleotide
aggtcgcgcgccagggacgtgctgcagaaccacctga

SEQ ID NO: 692 - DNA, 36 bp, Artificial Sequence
  Synthetic oligonucleotide
tctaccgcgcgcttggaggaacgttccggactggca

SEQ ID NO: 693 - DNA, 35 bp, Artificial Sequence
  Synthetic oligonucleotide
gcaaaataataccgctacattctctacaactcgcc

SEQ ID NO: 694 - DNA, 36 bp, Artificial Sequence
  Synthetic oligonucleotide
gcgtggggtgcgcgctaaccacacttgaccagacta

SEQ ID NO: 695 - DNA, 35 bp, Artificial Sequence
  Synthetic oligonucleotide
cccggcgagccacgggctgtacgagcaagtcacac

SEQ ID NO: 696 - DNA, 36 bp, Artificial Sequence
  Synthetic oligonucleotide
gcgaggaccatcccgcgtgcctgggagtcactttaa

SEQ ID NO: 697 - DNA, 38 bp, Artificial Sequence
  Synthetic oligonucleotide
atgcacggatgcggctagcgatctcccctaaacactga

SEQ ID NO: 698 - DNA, 37 bp, Artificial Sequence
  Synthetic oligonucleotide
atgcactgtacgtagagtaatgcggttcattccttga

SEQ ID NO: 699 - DNA, 35 bp, Artificial Sequence
  Synthetic oligonucleotide
gatcgtaacgctgcaaggtcactccgggaaaacca

SEQ ID NO: 700 - DNA, 38 bp, Artificial Sequence
  Synthetic oligonucleotide
cctgcgcgctaggggagatactggttcgtgcgatttga

SEQ ID NO: 701 - DNA, 35 bp, Artificial Sequence
  Synthetic oligonucleotide
acgcgtgctaggacggactgaacggtaaaactaag

SEQ ID NO: 702 - DNA, 38 bp, Artificial Sequence
  Synthetic oligonucleotide
actgcagagtatgcaagcttgaccaccatacgctttga

SEQ ID NO: 703 - DNA, 37 bp, Artificial Sequence
  Synthetic oligonucleotide
catgcgcaggctttctctttagttctcttctggttga

SEQ ID NO: 704 - DNA, 35 bp, Artificial Sequence
  Synthetic oligonucleotide
tcaagcgaatctagcggtacacctcgcaggctcgc

SEQ ID NO: 705 - DNA, 35 bp, Artificial Sequence
  Synthetic oligonucleotide
catgcaagcttcgttcaacatccaacctagctgta

SEQ ID NO: 706 - DNA, 35 bp, Artificial Sequence
  Synthetic oligonucleotide
gcgtgccaacgttgcatcaactattttcatgaatt

SEQ ID NO: 707 - DNA, 38 bp, Artificial Sequence
  Synthetic oligonucleotide
gcgtgctgtgactccaccgtgccttatactttgaatga

SEQ ID NO: 708 - DNA, 36 bp, Artificial Sequence
  Synthetic oligonucleotide
catgcgcaagcttcaacgacacaactaaacctgcta

SEQ ID NO: 709 - DNA, 36 bp, Artificial Sequence
  Synthetic oligonucleotide
ggctgaccacgatgaagtttgcgcaagcttttatta

SEQ ID NO: 710 - DNA, 37 bp, Artificial Sequence
  Synthetic oligonucleotide
aacgcgagcctgtacggtactgcccctatcccaccga

SEQ ID NO: 711 - DNA, 35 bp, Artificial Sequence
  Synthetic oligonucleotide
gcgggcctacgactgcaggacccctgacccattct

SEQ ID NO: 712 - DNA, 36 bp, Artificial Sequence
  Synthetic oligonucleotide
gctaactgcgtgtcatttcggtttcctacatccata

SEQ ID NO: 713 - DNA, 36 bp, Artificial Sequence
  Synthetic oligonucleotide
ccggatctaggagagtactggctgcacatgcgacaa

SEQ ID NO: 714 - DNA, 36 bp, Artificial Sequence
  Synthetic oligonucleotide
tacgcgcgactaacattaatgcggtcttatcatcca

SEQ ID NO: 715 - DNA, 38 bp, Artificial Sequence
  Synthetic oligonucleotide
cgccgcgccagggtactgcaggaagcgctacgacttga

SEQ ID NO: 716 - DNA, 35 bp, Artificial Sequence
  Synthetic oligonucleotide
gcagtcagcaacgcttctttatgtcatacccgctt

SEQ ID NO: 717 - DNA, 35 bp, Artificial Sequence
  Synthetic oligonucleotide
catgcgaaagcttctcatacttgatcacgtttccc

SEQ ID NO: 718 - DNA, 36 bp, Artificial Sequence
  Synthetic oligonucleotide
cacgcggttcgtagcggaatgtactggtcaatccta

SEQ ID NO: 719 - DNA, 36 bp, Artificial Sequence
  Synthetic oligonucleotide
ccggggctaggaacgggggcagtcagagcgaccata

SEQ ID NO: 720 - DNA, 35 bp, Artificial Sequence
  Synthetic oligonucleotide
ccggcagtcttatctctactgtgccttctttaatc

SEQ ID NO: 721 - DNA, 38 bp, Artificial Sequence
  Synthetic oligonucleotide
gagttgcgagcatgcggacgcttttgttttgcttttga

SEQ ID NO: 722 - DNA, 38 bp, Artificial Sequence
  Synthetic oligonucleotide
tacgcaggagggccatgacgctgactatacgcttttga

SEQ ID NO: 723 - DNA, 38 bp, Artificial Sequence
  Synthetic oligonucleotide
ttctgcgcaatttcaaccctctactgtgcccaatttga

SEQ ID NO: 724 - DNA, 35 bp, Artificial Sequence
  Synthetic oligonucleotide
tcataccctcatgatcatgcagtcaccactcttag

SEQ ID NO: 725 - DNA, 38 bp, Artificial Sequence
  Synthetic oligonucleotide
gcggagctagcacggtactgcgcataaactatgattga

SEQ ID NO: 726 - DNA, 35 bp, Artificial Sequence
  Synthetic oligonucleotide
gaccggaactaggtacggctgcagagcgcaaccgc

SEQ ID NO: 727 - DNA, 38 bp, Artificial Sequence
  Synthetic oligonucleotide
tcgtagtcaccgcgggtcatccactattaacaccttga

SEQ ID NO: 728 - DNA, 35 bp, Artificial Sequence
  Synthetic oligonucleotide
acgcgacagctacgagtccccgcggagtgcaacgc

SEQ ID NO: 729 - DNA, 36 bp, Artificial Sequence
  Synthetic oligonucleotide
tcacctactagggaaggccacacggcacgcacatta

SEQ ID NO: 730 - DNA, 37 bp, Artificial Sequence
  Synthetic oligonucleotide
aaccggaactaggtgtgggacctgaaggcatggacga

SEQ ID NO: 731 - DNA, 37 bp, Artificial Sequence
  Synthetic oligonucleotide
gtaaactgcgctcttcttcgccctcccctgtctcgga

SEQ ID NO: 732 - DNA, 35 bp, Artificial Sequence
  Synthetic oligonucleotide
tcccatcgccggacgctccatatctttcggatcct

SEQ ID NO: 733 - DNA, 36 bp, Artificial Sequence
  Synthetic oligonucleotide
tgcctctaccgtgccgtgttgattttctccattcta

SEQ ID NO: 734 - DNA, 38 bp, Artificial Sequence
  Synthetic oligonucleotide
gcgggccgtgactgtttaccactctactgtgcgattga

SEQ ID NO: 735 - DNA, 35 bp, Artificial Sequence
  Synthetic oligonucleotide
gcgatccatgacgaccaatatataccgctttgaca

SEQ ID NO: 736 - DNA, 36 bp, Artificial Sequence
  Synthetic oligonucleotide
tgtactctctactgtgcccttcctgagtgtttatca

SEQ ID NO: 737 - DNA, 36 bp, Artificial Sequence
  Synthetic oligonucleotide
taaggcgaaactagctgaaggtactgcgaattttta

SEQ ID NO: 738 - DNA, 37 bp, Artificial Sequence
  Synthetic oligonucleotide
atgcacggtacggaaggattctgccttcccatcacga

SEQ ID NO: 739 - DNA, 36 bp, Artificial Sequence
  Synthetic oligonucleotide
ggtcgcgtgccaggcacggagatgcggtcctttgca

SEQ ID NO: 740 - DNA, 35 bp, Artificial Sequence
  Synthetic oligonucleotide
aacctgaaggaaccgcatctctaccgtgcctatat

SEQ ID NO: 741 - DNA, 35 bp, Artificial Sequence
  Synthetic oligonucleotide
catgcaggctttccaacccactttaatagctaact

SEQ ID NO: 742 - DNA, 36 bp, Artificial Sequence
  Synthetic oligonucleotide
tcatgccaggctttttctttgaattccgatttaata

SEQ ID NO: 743 - DNA, 36 bp, Artificial Sequence
  Synthetic oligonucleotide
gcgttagatctctaccgtgctcaacctcttctgtaa

SEQ ID NO: 744 - DNA, 36 bp, Artificial Sequence
  Synthetic oligonucleotide
gtgacgccgctatctttacaactctactgtgcttta

SEQ ID NO: 745 - DNA, 36 bp, Artificial Sequence
  Synthetic oligonucleotide
tattgcgaactcctctgagctacggtacgtgtggca

SEQ ID NO: 746 - DNA, 35 bp, Artificial Sequence
  Synthetic oligonucleotide
tctatcaactcgccccaaattacccgccccacata

SEQ ID NO: 747 - DNA, 35 bp, Artificial Sequence
  Synthetic oligonucleotide
catgtctaggtctttcgtaatcctctaccgtgcca

SEQ ID NO: 748 - DNA, 36 bp, Artificial Sequence
  Synthetic oligonucleotide
ctgcggtcagtgcccatccgctcccaactagcctta

SEQ ID NO: 749 - DNA, 38 bp, Artificial Sequence
  Synthetic oligonucleotide
ccactccaccgtgcccttctataggttttctcaactga

SEQ ID NO: 750 - DNA, 35 bp, Artificial Sequence
  Synthetic oligonucleotide
gccttcccacgtcgagtcagttcgacgtccccgtt

SEQ ID NO: 751 - DNA, 38 bp, Artificial Sequence
  Synthetic oligonucleotide
tcatccttttactcgaccgtgccccccttagttcctga

SEQ ID NO: 752 - DNA, 36 bp, Artificial Sequence
  Synthetic oligonucleotide
taaaggccacgcatcccccgttaaaacatcattaaa

SEQ ID NO: 753 - DNA, 36 bp, Artificial Sequence
  Synthetic oligonucleotide
ttcttctccactgtgccccaactcaatttttgatta

SEQ ID NO: 754 - DNA, 36 bp, Artificial Sequence
  Synthetic oligonucleotide
tctccaccgtgccatcgaaaatttactctctgctca

SEQ ID NO: 755 - DNA, 38 bp, Artificial Sequence
  Synthetic oligonucleotide
taacctactaaggcatgtcgactctatcatatgcttga

SEQ ID NO: 756 - DNA, 36 bp, Artificial Sequence
  Synthetic oligonucleotide
aaaggcatgacatatatcctctaccgtgcccgccta

SEQ ID NO: 757 - DNA, 36 bp, Artificial Sequence
  Synthetic oligonucleotide
catgccagatttcgcactagttacctccttagctta

SEQ ID NO: 758 - DNA, 38 bp, Artificial Sequence
  Synthetic oligonucleotide
catgccggagcgatttattcaatatcttctatgagtga

SEQ ID NO: 759 - DNA, 35 bp, Artificial Sequence
  Synthetic oligonucleotide
atcgtagtacaaaagggggttatctcttggtttcg

SEQ ID NO: 760 - DNA, 35 bp, Artificial Sequence
  Synthetic oligonucleotide
tagacatatcgttctggactttttctccactgtgc

SEQ ID NO: 761 - DNA, 37 bp, Artificial Sequence
  Synthetic oligonucleotide
atcgtagtactgtggtccgccactacccgaactatga

SEQ ID NO: 762 - DNA, 37 bp, Artificial Sequence
  Synthetic oligonucleotide
gaagagccccgcctgcttccttatccagatcatgcga

SEQ ID NO: 763 - DNA, 35 bp, Artificial Sequence
  Synthetic oligonucleotide
gcgcgatacgacatctccttagcttttgttttgct

SEQ ID NO: 764 - DNA, 35 bp, Artificial Sequence
  Synthetic oligonucleotide
gacgtcatggccaccctagcttcatttcttgcttt

SEQ ID NO: 765 - DNA, 38 bp, Artificial Sequence
  Synthetic oligonucleotide
ccggtcgtaggactaccgccaggcatattattgtttga

SEQ ID NO: 766 - DNA, 36 bp, Artificial Sequence
  Synthetic oligonucleotide
tgtggtagtacgcagtcagtcgctgtatcccgctaa

SEQ ID NO: 767 - DNA, 38 bp, Artificial Sequence
  Synthetic oligonucleotide
tatgcgcccctggtctatattcggaaaaccctacctga

SEQ ID NO: 768 - DNA, 35 bp, Artificial Sequence
  Synthetic oligonucleotide
ttaggtatcatgcggccacctggtctaatattttt

SEQ ID NO: 769 - DNA, 35 bp, Artificial Sequence
  Synthetic oligonucleotide
tcgtagtactcagggccccaccaaatttcttaaat

SEQ ID NO: 770 - DNA, 35 bp, Artificial Sequence
  Synthetic oligonucleotide
accgcgcgcctggtatcctgctatgtctagtccct

SEQ ID NO: 771 - DNA, 35 bp, Artificial Sequence
  Synthetic oligonucleotide
gatcgtagcgtacgtaggaaatccccgaaacaacg

SEQ ID NO: 772 - DNA, 37 bp, Artificial Sequence
  Synthetic oligonucleotide
cgtgccatggctttaaccgtatcttcgctttttctga

SEQ ID NO: 773 - DNA, 36 bp, Artificial Sequence
  Synthetic oligonucleotide
gcgatcgtagcacggtaaactggcccccttgcaata

SEQ ID NO: 774 - DNA, 36 bp, Artificial Sequence
  Synthetic oligonucleotide
acgcactgtataaagtctacgcgcccttcaaccata

SEQ ID NO: 775 - DNA, 38 bp, Artificial Sequence
  Synthetic oligonucleotide
cttacgcgtgcttggaacgatgtattgcggccaattga

SEQ ID NO: 776 - DNA, 36 bp, Artificial Sequence
  Synthetic oligonucleotide
tcgtaggactgcaaaccacacgccttgttcgaaaaa

SEQ ID NO: 777 - DNA, 35 bp, Artificial Sequence
  Synthetic oligonucleotide
ccgggtctaggacggctctgttgtctcctccctgt

SEQ ID NO: 778 - DNA, 35 bp, Artificial Sequence
  Synthetic oligonucleotide
atcgtagcactgcagggcgcctagtttacaatggg

SEQ ID NO: 779 - DNA, 35 bp, Artificial Sequence
  Synthetic oligonucleotide
gacgtcatcgtgccttcttggctgaccgtacagga

SEQ ID NO: 780 - DNA, 38 bp, Artificial Sequence
  Synthetic oligonucleotide
ttcatccgcgcgaatgaaaccgatctacatccctatga

SEQ ID NO: 781 - DNA, 35 bp, Artificial Sequence
  Synthetic oligonucleotide
atcgtagtaccataccccgcatgccgccaaaattt

SEQ ID NO: 782 - DNA, 37 bp, Artificial Sequence
  Synthetic oligonucleotide
aaacccgcgagcaggcattgaactcccctgaatacga

SEQ ID NO: 783 - DNA, 37 bp, Artificial Sequence
  Synthetic oligonucleotide
gcaatgacgtgcgttcgaccgattatctctactatga

SEQ ID NO: 784 - DNA, 36 bp, Artificial Sequence
  Synthetic oligonucleotide
aagcactgtacggaagtaggcccgcccccaaattaa

SEQ ID NO: 785 - DNA, 35 bp, Artificial Sequence
  Synthetic oligonucleotide
tcgtagtatctggaggtcgtgcgttgcactattac

SEQ ID NO: 786 - DNA, 36 bp, Artificial Sequence
  Synthetic oligonucleotide
gatcgtatacgtacgctaggtctctttcgcttatca

SEQ ID NO: 787 - DNA, 36 bp, Artificial Sequence
  Synthetic oligonucleotide
tgggcaaccggaactagtacagcccacgtacgttga

SEQ ID NO: 788 - DNA, 36 bp, Artificial Sequence
  Synthetic oligonucleotide
tcgcaaactcagcttcctctctaccgtgcatgttaa

SEQ ID NO: 789 - DNA, 38 bp, Artificial Sequence
  Synthetic oligonucleotide
gcgcgctaacaccctgcggtacaccaggaactccttga

SEQ ID NO: 790 - DNA, 35 bp, Artificial Sequence
  Synthetic oligonucleotide
ccggtcactgctggagtgcgaaagctttctcttgt

SEQ ID NO: 791 - DNA, 36 bp, Artificial Sequence
  Synthetic oligonucleotide
gcagaaggaaatgcgcgctaattgacaacgctcgaa

SEQ ID NO: 792 - DNA, 38 bp, Artificial Sequence
  Synthetic oligonucleotide
accgcgcgcctgggaccgtaatggatcctacataatga

SEQ ID NO: 793 - DNA, 36 bp, Artificial Sequence
  Synthetic oligonucleotide
gcgatcgtagctaagggatctactagggaatgccca

SEQ ID NO: 794 - DNA, 35 bp, Artificial Sequence
  Synthetic oligonucleotide
ttacctaccagggatgcggccccgaagccattctt

SEQ ID NO: 795 - DNA, 38 bp, Artificial Sequence
  Synthetic oligonucleotide
taggcaactaatgcagagacgcgacccacgacatttga

SEQ ID NO: 796 - DNA, 35 bp, Artificial Sequence
  Synthetic oligonucleotide
ctcctagcaggcgggccctgacaggcggtcgtagc

SEQ ID NO: 797 - DNA, 35 bp, Artificial Sequence
  Synthetic oligonucleotide
tcacctaccacggtcatctttacttgagacaacaa

SEQ ID NO: 798 - DNA, 35 bp, Artificial Sequence
  Synthetic oligonucleotide
taagcaactcctgccgtgccattaaagcttttata

SEQ ID NO: 799 - DNA, 36 bp, Artificial Sequence
  Synthetic oligonucleotide
taccgctgccatgaatcatctctgttaaactagcca

SEQ ID NO: 800 - DNA, 37 bp, Artificial Sequence
  Synthetic oligonucleotide
gagtacgcgacgccttggtctactactcttccctgga

SEQ ID NO: 801 - DNA, 35 bp, Artificial Sequence
  Synthetic oligonucleotide
gcggtcgtagcaacactgcatcctcatgatactta

SEQ ID NO: 802 - DNA, 35 bp, Artificial Sequence
  Synthetic oligonucleotide
tccgacggggcatcgtgtcaggcgcatgaaatttt

SEQ ID NO: 803 - DNA, 35 bp, Artificial Sequence
  Synthetic oligonucleotide
atcgtagtagtgccgcgctagcctgacgcaaaatt

SEQ ID NO: 804 - DNA, 38 bp, Artificial Sequence
  Synthetic oligonucleotide
aggcgtgcatgacgatttaattaaccaccgaaccatga

SEQ ID NO: 805 - DNA, 36 bp, Artificial Sequence
  Synthetic oligonucleotide
catcatacgaccgcgtgattggtgagttgtaacgga

SEQ ID NO: 806 - DNA, 35 bp, Artificial Sequence
  Synthetic oligonucleotide
catgcaagcttggattttctcacgtttcattgtta

SEQ ID NO: 807 - DNA, 35 bp, Artificial Sequence
  Synthetic oligonucleotide
gcgcataggctttttatatttattctctatgcttt

SEQ ID NO: 808 - DNA, 35 bp, Artificial Sequence
  Synthetic oligonucleotide
gcccgattccagaaaccacgcttttaccatttcct

SEQ ID NO: 809 - DNA, 37 bp, Artificial Sequence
  Synthetic oligonucleotide
gctagcattggcttttgtttatttgcttctatcttga

SEQ ID NO: 810 - DNA, 35 bp, Artificial Sequence
  Synthetic oligonucleotide
gcgctactagccgatatatttccgttccactcttt

SEQ ID NO: 811 - DNA, 36 bp, Artificial Sequence
  Synthetic oligonucleotide
gactaaatacctcactatctccactgtgccgttaaa

SEQ ID NO: 812 - DNA, 35 bp, Artificial Sequence
  Synthetic oligonucleotide
gcaaattctgttcgatccacactattaactcgctt

SEQ ID NO: 813 - DNA, 37 bp, Artificial Sequence
  Synthetic oligonucleotide
gaatcatccggccctaaactccactgtgccctcttga

SEQ ID NO: 814 - DNA, 35 bp, Artificial Sequence
  Synthetic oligonucleotide
tgctaggtgatgaattaatttggtctctttttggt

SEQ ID NO: 815 - DNA, 35 bp, Artificial Sequence
  Synthetic oligonucleotide
gcctacaggatttttgattgatcgatttcgcttct

SEQ ID NO: 816 - DNA, 36 bp, Artificial Sequence
  Synthetic oligonucleotide
catgcaattcttcgcttcctattccttaagcttgta

SEQ ID NO: 817 - DNA, 36 bp, Artificial Sequence
  Synthetic oligonucleotide
gctaactgcttggcgtgcgagctgaaccaacgctta

SEQ ID NO: 818 - DNA, 36 bp, Artificial Sequence
  Synthetic oligonucleotide
gccgaaaacatcgctgttcgtcttatcaactcgccc

SEQ ID NO: 819 - DNA, 36 bp, Artificial Sequence
  Synthetic oligonucleotide
atgcctgtccaaaaactctaccgtgccgtgttacta

SEQ ID NO: 820 - DNA, 37 bp, Artificial Sequence
  Synthetic oligonucleotide
catgcgtcgattcactatcttcgctttcaattgctga

SEQ ID NO: 821 - DNA, 35 bp, Artificial Sequence
  Synthetic oligonucleotide
gtcaaatgtcaatgggcaccacgcactgttcgcgc

SEQ ID NO: 822 - DNA, 36 bp, Artificial Sequence
  Synthetic oligonucleotide
gcgacacgattggtcaattcctcgctttcctctcta

SEQ ID NO: 823 - DNA, 36 bp, Artificial Sequence
  Synthetic oligonucleotide
catagggacggaacgggcacggtagctcctaacgta

SEQ ID NO: 824 - DNA, 36 bp, Artificial Sequence
  Synthetic oligonucleotide
taggcaactactaggtgatgcgtcaattacctctta

SEQ ID NO: 825 - DNA, 38 bp, Artificial Sequence
  Synthetic oligonucleotide
tcacctaccacaagatcgtgcccctgaatcacttgtga

SEQ ID NO: 826 - DNA, 36 bp, Artificial Sequence
  Synthetic oligonucleotide
agtcaggcatggtagacgcttctacttcgctttcta

SEQ ID NO: 827 - DNA, 37 bp, Artificial Sequence
  Synthetic oligonucleotide
taacctaccaagtacatgacctttcacttgatcttga

SEQ ID NO: 828 - DNA, 38 bp, Artificial Sequence
  Synthetic oligonucleotide
tatgccagcttctcatatatcccgctttctatcaatga

SEQ ID NO: 829 - DNA, 35 bp, Artificial Sequence
  Synthetic oligonucleotide
gaagccgcgcgccaagcaaagggtactgcccctct

SEQ ID NO: 830 - DNA, 36 bp, Artificial Sequence
  Synthetic oligonucleotide
atgcacggtgcggccggtcatgcaagacacttcgta

SEQ ID NO: 831 - DNA, 35 bp, Artificial Sequence
  Synthetic oligonucleotide
ttcatttatctccaccgtgcactccatggatctta

SEQ ID NO: 832 - DNA, 36 bp, Artificial Sequence
  Synthetic oligonucleotide
gcaggcttcgaatcctccactgtgctaatacatgaa

SEQ ID NO: 833 - DNA, 35 bp, Artificial Sequence
  Synthetic oligonucleotide
atgcactgttgtgatcggcctgagcaggcgcccaa

SEQ ID NO: 834 - DNA, 38 bp, Artificial Sequence
  Synthetic oligonucleotide
aacccctcgccgcgtgcctggcgacggagtagtaatga

SEQ ID NO: 835 - DNA, 37 bp, Artificial Sequence
  Synthetic oligonucleotide
actccaccgtgccctttaatctcatgtgccacactga

SEQ ID NO: 836 - DNA, 35 bp, Artificial Sequence
  Synthetic oligonucleotide
gcgattatattaatttctctaccgtgcgatcccaa

SEQ ID NO: 837 - DNA, 35 bp, Artificial Sequence
  Synthetic oligonucleotide
atgcatcagcgcgcttattaatcaatcgcttttgt

SEQ ID NO: 838 - DNA, 34 bp, Artificial Sequence
  Synthetic oligonucleotide
gcgtgccagcgtactcgcatctcacagaacccgt

SEQ ID NO: 839 - DNA, 35 bp, Artificial Sequence
  Synthetic oligonucleotide
caaccactattcgcgtgccagggtggggaaacgtt

SEQ ID NO: 840 - DNA, 36 bp, Artificial Sequence
  Synthetic oligonucleotide
tatgcaaccgggactgagagtcctagcgctttttta

SEQ ID NO: 841 - DNA, 36 bp, Artificial Sequence
  Synthetic oligonucleotide
gcccgctttgtcaccggaattaattaactcgcctca

SEQ ID NO: 842 - DNA, 35 bp, Artificial Sequence
  Synthetic oligonucleotide
tcacctactagattcgtgccagaatttcaaatttc

SEQ ID NO: 843 - DNA, 38 bp, Artificial Sequence
  Synthetic oligonucleotide
tcggacttgatctacacattgacacattgataccctga

SEQ ID NO: 844 - DNA, 37 bp, Artificial Sequence
  Synthetic oligonucleotide
cgtttgacttagacggactgccttgatcactgactga

SEQ ID NO: 845 - DNA, 37 bp, Artificial Sequence
  Synthetic oligonucleotide
gagttctccttaaaatctgaccctgacaacgagtgga

SEQ ID NO: 846 - DNA, 38 bp, Artificial Sequence
  Synthetic oligonucleotide
atactggaggtcatgattctgatcccgtgatattctga

SEQ ID NO: 847 - DNA, 38 bp, Artificial Sequence
  Synthetic oligonucleotide
ggatacacgggagtctgcgttgacacattttgatttga

SEQ ID NO: 848 - DNA, 38 bp, Artificial Sequence
  Synthetic oligonucleotide
gtttgcaattgcttaggatactcaacctgactccatga

SEQ ID NO: 849 - DNA, 38 bp, Artificial Sequence
  Synthetic oligonucleotide
gcggtatttatgataatgactcgtgaccccaatattga

SEQ ID NO: 850 - DNA, 38 bp, Artificial Sequence
  Synthetic oligonucleotide
ggtcagctagtaaagtttatccgatgatttgattttga

SEQ ID NO: 851 - DNA, 37 bp, Artificial Sequence
  Synthetic oligonucleotide
gcaggatagtcatgcaaaatattcaacgataattaga

SEQ ID NO: 852 - DNA, 38 bp, Artificial Sequence
  Synthetic oligonucleotide
tgtgactataacgcactaagccgattctgacgatatga

SEQ ID NO: 853 - DNA, 38 bp, Artificial Sequence
  Synthetic oligonucleotide
ttttgtacctgcttcgataaccaacagttaggatttga

SEQ ID NO: 854 - DNA, 38 bp, Artificial Sequence
  Synthetic oligonucleotide
gactatcaaatgaccccgatcgatacgtaggacactga

SEQ ID NO: 855 - DNA, 36 bp, Artificial Sequence
  Synthetic oligonucleotide
aactggccgtgtgtgccggtgggataactgttacta

SEQ ID NO: 856 - DNA, 36 bp, Artificial Sequence
  Synthetic oligonucleotide
gaggactagccgatacttgataatgattatgacgta

SEQ ID NO: 857 - DNA, 37 bp, Artificial Sequence
  Synthetic oligonucleotide
gtgaatgacacacgtctgaccttggatcgctgattga

SEQ ID NO: 858 - DNA, 38 bp, Artificial Sequence
  Synthetic oligonucleotide
accgtggacttattgcttatattggacttagagcctga

SEQ ID NO: 859 - DNA, 36 bp, Artificial Sequence
  Synthetic oligonucleotide
gaggacgtacgccttgatgtttaactggattactga

SEQ ID NO: 860 - DNA, 36 bp, Artificial Sequence
  Synthetic oligonucleotide
caccccttttgattatccttattgatacttatatga

SEQ ID NO: 861 - DNA, 38 bp, Artificial Sequence
  Synthetic oligonucleotide
tcccgtgatgtgggaacgtagatctttgactgatttga

SEQ ID NO: 862 - DNA, 38 bp, Artificial Sequence
  Synthetic oligonucleotide
tcgtaatgcccaataaccaactggttaagtagacctga

SEQ ID NO: 863 - DNA, 36 bp, Artificial Sequence
  Synthetic oligonucleotide
gcgatcacaatttaccggaccgatctccctagacaa

SEQ ID NO: 864 - DNA, 36 bp, Artificial Sequence
  Synthetic oligonucleotide
gcgtacggaacggaaccgacacaacctgaataccta

SEQ ID NO: 865 - DNA, 36 bp, Artificial Sequence
  Synthetic oligonucleotide
gcgtacggaacggaaccgacacaacctgaataccga

SEQ ID NO: 866 - DNA, 38 bp, Artificial Sequence
  Synthetic oligonucleotide
gcttgaatccacgacgaaattacttaaaataaccctga

SEQ ID NO: 867 - DNA, 38 bp, Artificial Sequence
  Synthetic oligonucleotide
gccggggcggagcctacgatttatatcgcgattattga

SEQ ID NO: 868 - DNA, 38 bp, Artificial Sequence
  Synthetic oligonucleotide
aagtgcacactgcctcgatttacatttcggacctatga

SEQ ID NO: 869 - DNA, 38 bp, Artificial Sequence
  Synthetic oligonucleotide
gcgtactgtgcgcgattccgggatatatattcgattga

SEQ ID NO: 870 - DNA, 38 bp, Artificial Sequence
  Synthetic oligonucleotide
cacagacgttctcgttgatacccggacccgatatttga

SEQ ID NO: 871 - DNA, 38 bp, Artificial Sequence
  Synthetic oligonucleotide
tccattttggaacgtcgaattactcggatactaattga

SEQ ID NO: 872 - DNA, 38 bp, Artificial Sequence
  Synthetic oligonucleotide
actcgacgtaaaactatctgtgactcctaatacattga

SEQ ID NO: 873 - DNA, 38 bp, Artificial Sequence
  Synthetic oligonucleotide
accgtaacttgctagccttccggatccctccaatctga

SEQ ID NO: 874 - DNA, 38 bp, Artificial Sequence
  Synthetic oligonucleotide
ttcgtacagatacccccgataccccgccacctgattga

SEQ ID NO: 875 - DNA, 34 bp, Artificial Sequence
  Synthetic oligonucleotide
atattaatgccttgatccgactccgacctcttga

SEQ ID NO: 876 - DNA, 38 bp, Artificial Sequence
  Synthetic oligonucleotide
ttgacgcgacgtactattttgatcgtattccaatctga

SEQ ID NO: 877 - DNA, 38 bp, Artificial Sequence
  Synthetic oligonucleotide
gcgccgccacggtacttaaaaactcggactttacttga

SEQ ID NO: 878 - DNA, 38 bp, Artificial Sequence
  Synthetic oligonucleotide
cgtagtactgctacatccgaaccgaccataaatactga

SEQ ID NO: 879 - DNA, 38 bp, Artificial Sequence
  Synthetic oligonucleotide
gaggacgcagttgaccggatttccaccgattatattga

SEQ ID NO: 880 - DNA, 38 bp, Artificial Sequence
  Synthetic oligonucleotide
gaggactgaaccatctcggaccacccatggatacttga

SEQ ID NO: 881 - DNA, 38 bp, Artificial Sequence
  Synthetic oligonucleotide
tgcgcgagcaaacgcgactattgaaccttagaacctga

SEQ ID NO: 882 - DNA, 35 bp, Artificial Sequence
  Synthetic oligonucleotide
gctggtgacccctcttgaccttccttattgatttg

SEQ ID NO: 883 - DNA, 38 bp, Artificial Sequence
  Synthetic oligonucleotide
gagtacctcaccgctttcgattatcgttctgaccttga

SEQ ID NO: 884 - DNA, 36 bp, Artificial Sequence
  Synthetic oligonucleotide
agccacttcctgctttgaaccggactccttatataa

SEQ ID NO: 885 - DNA, 38 bp, Artificial Sequence
  Synthetic oligonucleotide
attgagcgtacgcatctaccggattaccttacttttga

SEQ ID NO: 886 - DNA, 37 bp, Artificial Sequence
  Synthetic oligonucleotide
gaacttacgttactaacctgactctatcttacattga

SEQ ID NO: 887 - DNA, 37 bp, Artificial Sequence
  Synthetic oligonucleotide
gcaccactattgtgggaattcctgattttactattga

SEQ ID NO: 888 - DNA, 37 bp, Artificial Sequence
  Synthetic oligonucleotide
gcgtgcctgcctggctctgactccgattattcattga

SEQ ID NO: 889 - DNA, 38 bp, Artificial Sequence
  Synthetic oligonucleotide
agttccttactaacacaacttttggatatttaaattga

SEQ ID NO: 890 - DNA, 37 bp, Artificial Sequence
  Synthetic oligonucleotide
actgccttttcttactgggatacttattgattattga

SEQ ID NO: 891 - DNA, 38 bp, Artificial Sequence
  Synthetic oligonucleotide
atagtacactacctactgactccctatattatgaatga

SEQ ID NO: 892 - DNA, 38 bp, Artificial Sequence
  Synthetic oligonucleotide
gcgatacaacccttcatttctgactaccgatatattga

SEQ ID NO: 893 - DNA, 36 bp, Artificial Sequence
  Synthetic oligonucleotide
gcatctttcttcttaatgatttaccgttctcacata

SEQ ID NO: 894 - DNA, 36 bp, Artificial Sequence
  Synthetic oligonucleotide
accacgtgttattctctgtatttcactttgtctcaa

SEQ ID NO: 895 - DNA, 36 bp, Artificial Sequence
  Synthetic oligonucleotide
accgggaacatttctgtcgtttcatttcatcactaa

SEQ ID NO: 896 - DNA, 36 bp, Artificial Sequence
  Synthetic oligonucleotide
agtttattgctccttcccactattgtctatctcgca

SEQ ID NO: 897 - DNA, 36 bp, Artificial Sequence
  Synthetic oligonucleotide
tcgcttccttgtacttcctatacccttttcaccaca

SEQ ID NO: 898 - DNA, 35 bp, Artificial Sequence
  Synthetic oligonucleotide
actaactcgcccactcttctcatttggaacctatc

SEQ ID NO: 899 - DNA, 36 bp, Artificial Sequence
  Synthetic oligonucleotide
actccccctcagctatcatacatcactcgcatctaa

SEQ ID NO: 900 - DNA, 38 bp, Artificial Sequence
  Synthetic oligonucleotide
aatatatacgcgctacaaatcttttctcctactgatga

SEQ ID NO: 901 - DNA, 37 bp, Artificial Sequence
  Synthetic oligonucleotide
actatactcacatcctatttaattattggcttaatga

SEQ ID NO: 902 - DNA, 38 bp, Artificial Sequence
  Synthetic oligonucleotide
atcgatcctgcctaacctggtaaacaactcatttctga

SEQ ID NO: 903 - DNA, 35 bp, Artificial Sequence
  Synthetic oligonucleotide
ttagctgcttcccagacccaagctattatttttca

SEQ ID NO: 904 - DNA, 36 bp, Artificial Sequence
  Synthetic oligonucleotide
tccctgcatcttaacttctatagggtttgcttaaaa

SEQ ID NO: 905 - DNA, 36 bp, Artificial Sequence
  Synthetic oligonucleotide
gggtcactccgtaaggcctctactccaaattataaa

SEQ ID NO: 906 - DNA, 36 bp, Artificial Sequence
  Synthetic oligonucleotide
aactgtacggcgcaattttactctcaagtaccaaca

SEQ ID NO: 907 - DNA, 35 bp, Artificial Sequence
  Synthetic oligonucleotide
tgcggactttattcgcttgatgcctatcctgttat

SEQ ID NO: 908 - DNA, 36 bp, Artificial Sequence
  Synthetic oligonucleotide
tccgccacatcgggttatacttttgaactagttaaa

SEQ ID NO: 909 - DNA, 38 bp, Artificial Sequence
  Synthetic oligonucleotide
tgttccttcgagttccatcccaaagagttaattcatga

SEQ ID NO: 910 - DNA, 35 bp, Artificial Sequence
  Synthetic oligonucleotide
tcctgcgactctacggtatattcctttaatcgaca

SEQ ID NO: 911 - DNA, 38 bp, Artificial Sequence
  Synthetic oligonucleotide
agtaaaattccggttcatccacactgagctttcaatga

SEQ ID NO: 912 - DNA, 36 bp, Artificial Sequence
  Synthetic oligonucleotide
ttaactccttgaagtacgtcctaggccccctcacca

SEQ ID NO: 913 - DNA, 36 bp, Artificial Sequence
  Synthetic oligonucleotide
tggagtactggtgccgaacgtttttgaacgggttga

SEQ ID NO: 914 - DNA, 38 bp, Artificial Sequence
  Synthetic oligonucleotide
gagtactatagagccaagacctcatttagtcactctga

SEQ ID NO: 915 - DNA, 36 bp, Artificial Sequence
  Synthetic oligonucleotide
ccgacccataacactttcgcttcaagcatctaggca

SEQ ID NO: 916 - DNA, 36 bp, Artificial Sequence
  Synthetic oligonucleotide
cgtccgcacccctttttcaccttgttctgctatgca

SEQ ID NO: 917 - DNA, 35 bp, Artificial Sequence
  Synthetic oligonucleotide
gagcctctgtaacccaatcttcaactgcagggacc

SEQ ID NO: 918 - DNA, 35 bp, Artificial Sequence
  Synthetic oligonucleotide
gagttctccagctagatattccaatacggaaccga

SEQ ID NO: 919 - DNA, 38 bp, Artificial Sequence
  Synthetic oligonucleotide
gagtattgcgaagattgggtttatcggttctaacatga

SEQ ID NO: 920 - DNA, 37 bp, Artificial Sequence
  Synthetic oligonucleotide
aaacgctattacggctgacccggtgactcgggattga

SEQ ID NO: 921 - DNA, 36 bp, Artificial Sequence
  Synthetic oligonucleotide
accgactccagtttcacgggaatattctcaccggga

SEQ ID NO: 922 - DNA, 38 bp, Artificial Sequence
  Synthetic oligonucleotide
gttgtcggtttccattagttcgatatcttgccgtgaga

SEQ ID NO: 923 - DNA, 38 bp, Artificial Sequence
  Synthetic oligonucleotide
atgggaatcacgtagctgtaacgataatccatgggtga

SEQ ID NO: 924 - DNA, 35 bp, Artificial Sequence
  Synthetic oligonucleotide
aggtactgacgattctttaaagtgactactggtga

SEQ ID NO: 925 - DNA, 38 bp, Artificial Sequence
  Synthetic oligonucleotide
ggcggtggaagtccgaactgccgagttaaattccctga

SEQ ID NO: 926 - DNA, 38 bp, Artificial Sequence
  Synthetic oligonucleotide
tatcggtcttacgaaagccggcacgtacgtttctttga

SEQ ID NO: 927 - DNA, 38 bp, Artificial Sequence
  Synthetic oligonucleotide
tgacggatgataggcatgacctcgtagaccacatctga

SEQ ID NO: 928 - DNA, 38 bp, Artificial Sequence
  Synthetic oligonucleotide
tttgtaccatccttacaaatgagatcttgttatgttga

SEQ ID NO: 929 - DNA, 36 bp, Artificial Sequence
  Synthetic oligonucleotide
tacatgcgtactataaaccctattgtttactggtaa

SEQ ID NO: 930 - DNA, 35 bp, Artificial Sequence
  Synthetic oligonucleotide
gcaagtctagatcttcattcatttgttcatgtttt

SEQ ID NO: 931 - DNA, 35 bp, Artificial Sequence
  Synthetic oligonucleotide
gagtttgcgggaatcttccccgaacaaggggctaa

SEQ ID NO: 932 - DNA, 35 bp, Artificial Sequence
  Synthetic oligonucleotide
tagaccgttggaggtccggggttggtgcccgatta

SEQ ID NO: 933 - DNA, 37 bp, Artificial Sequence
  Synthetic oligonucleotide
acactcatacgagatctgattatacacgcgccttgga

SEQ ID NO: 934 - DNA, 37 bp, Artificial Sequence
  Synthetic oligonucleotide
gtcgtcgggagaccacttatcttttttccatgccgga

SEQ ID NO: 935 - DNA, 35 bp, Artificial Sequence
  Synthetic oligonucleotide
tcacctgacgttacactcctccgtacaaacgtgta

SEQ ID NO: 936 - DNA, 35 bp, Artificial Sequence
  Synthetic oligonucleotide
tcctgattaattcatggtcacaactcccggtttcc

SEQ ID NO: 937 - DNA, 36 bp, Artificial Sequence
  Synthetic oligonucleotide
tccttttgcccatgattattctcgatgtaaaaacga

SEQ ID NO: 938 - DNA, 37 bp, Artificial Sequence
  Synthetic oligonucleotide
aacgctaatatctgccgatgggaatcctcgattagga

SEQ ID NO: 939 - DNA, 37 bp, Artificial Sequence
  Synthetic oligonucleotide
agggtgatatttacgttatcttcgaatttctactgga

SEQ ID NO: 940 - DNA, 36 bp, Artificial Sequence
  Synthetic oligonucleotide
tctcacttacaaagcgtttaatcaacgcagttctta

SEQ ID NO: 941 - DNA, 37 bp, Artificial Sequence
  Synthetic oligonucleotide
ccgcaaacttaggggctaataattttcgttatccgga

SEQ ID NO: 942 - DNA, 37 bp, Artificial Sequence
  Synthetic oligonucleotide
tgccagaaaatcgaatttttatacgtaatggcatgga

SEQ ID NO: 943 - DNA, 35 bp, Artificial Sequence
  Synthetic oligonucleotide
atcgatcctgacgccgaaaacttgacacgactaaa

SEQ ID NO: 944 - DNA, 35 bp, Artificial Sequence
  Synthetic oligonucleotide
atgctggtaacttttgcacatcttacttggtaaac

SEQ ID NO: 945 - DNA, 36 bp, Artificial Sequence
  Synthetic oligonucleotide
gcgattactcagcacccccttacttgtttttaatca

SEQ ID NO: 946 - DNA, 35 bp, Artificial Sequence
  Synthetic oligonucleotide
actgcgggactatctgaattattggtattataaca

SEQ ID NO: 947 - DNA, 36 bp, Artificial Sequence
  Synthetic oligonucleotide
gagtactgaaggaactggaaccgagtattcttgtca

SEQ ID NO: 948 - DNA, 36 bp, Artificial Sequence
  Synthetic oligonucleotide
gagaactgcctggtaatatattcccaaacctggaca

SEQ ID NO: 949 - DNA, 36 bp, Artificial Sequence
  Synthetic oligonucleotide
gagtgcgtaggtcttacatcctatcgaatatttaca

SEQ ID NO: 950 - DNA, 36 bp, Artificial Sequence
  Synthetic oligonucleotide
ctcagactttacacaatctttctctccacacaagca

SEQ ID NO: 951 - DNA, 35 bp, Artificial Sequence
  Synthetic oligonucleotide
gccactttcagaatctcgtgtcacacccatcatca

SEQ ID NO: 952 - DNA, 36 bp, Artificial Sequence
  Synthetic oligonucleotide
gcgttccccgtggacaatatcactttcttatcgtca

SEQ ID NO: 953 - DNA, 35 bp, Artificial Sequence
  Synthetic oligonucleotide
tcctggtctacgacttacatctgatccgacccaaa

SEQ ID NO: 954 - DNA, 36 bp, Artificial Sequence
  Synthetic oligonucleotide
ggaccttatttgttcgacccccgttatcacctgaaa

SEQ ID NO: 955 - DNA, 35 bp, Artificial Sequence
  Synthetic oligonucleotide
gaggacttttactgatcaaccccacctttcgaaaa

SEQ ID NO: 956 - DNA, 36 bp, Artificial Sequence
  Synthetic oligonucleotide
gctactacttatccgactactctaaaaacaactaca

SEQ ID NO: 957 - DNA, 35 bp, Artificial Sequence
  Synthetic oligonucleotide
aactgtcatccgccgactaactcaatctaactcaa

SEQ ID NO: 958 - DNA, 35 bp, Artificial Sequence
  Synthetic oligonucleotide
aactgtcatccgccgactaactcaatctaactcta

SEQ ID NO: 959 - DNA, 35 bp, Artificial Sequence
  Synthetic oligonucleotide
aactgtcatccgccgactaactcaatctaactcga

SEQ ID NO: 960 - DNA, 35 bp, Artificial Sequence
  Synthetic oligonucleotide
tactccggcccaactatatacttctccacaccaac

SEQ ID NO: 961 - DNA, 35 bp, Artificial Sequence
  Synthetic oligonucleotide
tactccggcccaactatatacttctccacaccatc

SEQ ID NO: 962 - DNA, 35 bp, Artificial Sequence
  Synthetic oligonucleotide
tactccggcccaactatatacttctccacaccagc

SEQ ID NO: 963 - DNA, 35 bp, Artificial Sequence
  Synthetic oligonucleotide
tcctacctgcccaatccccttttgattacatatat

SEQ ID NO: 964 - DNA, 35 bp, Artificial Sequence
  Synthetic oligonucleotide
ccacgctttggggacgctattactatccctttcaa

SEQ ID NO: 965 - DNA, 35 bp, Artificial Sequence
  Synthetic oligonucleotide
aatgtactgataatcccttttacactggttactat

SEQ ID NO: 966 - DNA, 35 bp, Artificial Sequence
  Synthetic oligonucleotide
ttagtcgtacttttatctatattgggcctaataaa

SEQ ID NO: 967 - DNA, 36 bp, Artificial Sequence
  Synthetic oligonucleotide
ttcgccacgttcctaaatattttacttattactaaa

SEQ ID NO: 968 - DNA, 36 bp, Artificial Sequence
  Synthetic oligonucleotide
ttccatgactctgcctatacttattatatctcataa

SEQ ID NO: 969 - DNA, 36 bp, Artificial Sequence
  Synthetic oligonucleotide
ttggagctacaatcaaacttcatatctctttctaaa

SEQ ID NO: 970 - DNA, 36 bp, Artificial Sequence
  Synthetic oligonucleotide
tgcccaaaactgcctttagaaacttattacattcaa

SEQ ID NO: 971 - DNA, 36 bp, Artificial Sequence
  Synthetic oligonucleotide
tctgcgatcgccatttatctcgaccctttacctaaa

SEQ ID NO: 972 - DNA, 35 bp, Artificial Sequence
  Synthetic oligonucleotide
aacttttttgcactaacctggacctcatatataat

SEQ ID NO: 973 - DNA, 34 bp, Artificial Sequence
  Synthetic oligonucleotide
aaccgcttttcacactaccactcacgctctcata

SEQ ID NO: 974 - DNA, 36 bp, Artificial Sequence
  Synthetic oligonucleotide
ccgccgtacccacgctccaattattctcatcctaca

SEQ ID NO: 975 - DNA, 36 bp, Artificial Sequence
  Synthetic oligonucleotide
tatctccgtccaacacatctctggtcaccacctcca

SEQ ID NO: 976 - DNA, 35 bp, Artificial Sequence
  Synthetic oligonucleotide
tttctccgctcatcataactgacgccatccactca

SEQ ID NO: 977 - DNA, 35 bp, Artificial Sequence
  Synthetic oligonucleotide
acttcgctcattcacttgccaactcctgcacaatc

SEQ ID NO: 978 - DNA, 37 bp, Artificial Sequence
  Synthetic oligonucleotide
tccctcaccgttgcccttattccgtactcacttatga

SEQ ID NO: 979 - DNA, 36 bp, Artificial Sequence
  Synthetic oligonucleotide
gtgcttctccttttgactcgcctcactcttggtcca

SEQ ID NO: 980 - DNA, 36 bp, Artificial Sequence
  Synthetic oligonucleotide
ttttctcctcactccgctccgtgccttgacatcaaa

SEQ ID NO: 981 - DNA, 37 bp, Artificial Sequence
  Synthetic oligonucleotide
taccttcttcaatatccgtccgcttaacctggattca

SEQ ID NO: 982 - DNA, 36 bp, Artificial Sequence
  Synthetic oligonucleotide
cctcctctgcctaaatacgttttctccaccatcata

SEQ ID NO: 983 - DNA, 36 bp, Artificial Sequence
  Synthetic oligonucleotide
acttttttaaattttgttcccacgtatccttaatta

SEQ ID NO: 984 - DNA, 38 bp, Artificial Sequence
  Synthetic oligonucleotide
ttttccgggtttcttctccagtaggttgacttttatga

SEQ ID NO: 985 - DNA, 35 bp, Artificial Sequence
  Synthetic oligonucleotide
tgttttggcctccacggtttagtacttattttttt

SEQ ID NO: 986 - DNA, 35 bp, Artificial Sequence
  Synthetic oligonucleotide
gacttttttgctcatattttcaccaatcaattcca

SEQ ID NO: 987 - DNA, 36 bp, Artificial Sequence
  Synthetic oligonucleotide
tgagttctcttttatattggtcgccactttttccaa

SEQ ID NO: 988 - DNA, 36 bp, Artificial Sequence
  Synthetic oligonucleotide
ttccttcacttgggctttcaaatcatttataaacaa

SEQ ID NO: 989 - DNA, 38 bp, Artificial Sequence
  Synthetic oligonucleotide
ttcttgacttcagttcgattttgttattcttagtttga

SEQ ID NO: 990 - DNA, 38 bp, Artificial Sequence
  Synthetic oligonucleotide
gttaattccttgctcgagtttttccgcttattccttga

SEQ ID NO: 991 - DNA, 37 bp, Artificial Sequence
  Synthetic oligonucleotide
ggtacatttcgtccctaccattggtttattcttttga

SEQ ID NO: 992 - DNA, 37 bp, Artificial Sequence
  Synthetic oligonucleotide
attatttttcgttctctcacttgttttcgatcattga

SEQ ID NO: 993 - DNA, 35 bp, Artificial Sequence
  Synthetic oligonucleotide
taattgagcttttgctcctaacggcgagagccgtt

SEQ ID NO: 994 - DNA, 36 bp, Artificial Sequence
  Synthetic oligonucleotide
tgatatacgcgcgagtagaacatcaaccagtgagaa

SEQ ID NO: 995 - DNA, 38 bp, Artificial Sequence
  Synthetic oligonucleotide
taagccgagcgcatgtaggttcgttttcacgagagtga

SEQ ID NO: 996 - DNA, 35 bp, Artificial Sequence
  Synthetic oligonucleotide
atgaacgcgagtgaggacgctttagttaattatgt

SEQ ID NO: 997 - DNA, 37 bp, Artificial Sequence
  Synthetic oligonucleotide
actcggatagcggggccgggggaggcctacacattga

SEQ ID NO: 998 - DNA, 38 bp, Artificial Sequence
  Synthetic oligonucleotide
acgcagtccgtaaattgataaccgggaggttcgagtga

SEQ ID NO: 999 - DNA, 35 bp, Artificial Sequence
  Synthetic oligonucleotide
agtcccacgagagtggttctctctagataagagga

SEQ ID NO: 1000 - DNA, 37 bp, Artificial Sequence
  Synthetic oligonucleotide
gagtaccataacaaggcctgaagaaccttgcaggtga

SEQ ID NO: 1001 - DNA, 38 bp, Artificial Sequence
  Synthetic oligonucleotide
gcggggtgtgaacccgctcgtatgtaacaacggattga

SEQ ID NO: 1002 - DNA, 37 bp, Artificial Sequence
  Synthetic oligonucleotide
gagtacggttacggtgagtaaccatttagacgtaaga

SEQ ID NO: 1003 - DNA, 38 bp, Artificial Sequence
  Synthetic oligonucleotide
tgggatccgcgaggatctgatggggttcttatgtttga

SEQ ID NO: 1004 - DNA, 36 bp, Artificial Sequence
  Synthetic oligonucleotide
gagtacccgggcagggagccagttattatgttttga

SEQ ID NO: 1005 - DNA, 36 bp, Artificial Sequence
  Synthetic oligonucleotide
gagtacctagatatctcaaaagatatttatcgttaa

SEQ ID NO: 1006 - DNA, 35 bp, Artificial Sequence
  Synthetic oligonucleotide
gagtactctgcgcaagtgttgaactttgtagaaat

SEQ ID NO: 1007 - DNA, 36 bp, Artificial Sequence
  Synthetic oligonucleotide
gagtacttcccgcggggttatggaatgaattggata

SEQ ID NO: 1008 - DNA, 38 bp, Artificial Sequence
  Synthetic oligonucleotide
taatgtctcttccgccgtagtacgagcggttccgctga

SEQ ID NO: 1009 - DNA, 38 bp, Artificial Sequence
  Synthetic oligonucleotide
gagtacagccgcccttgtaccgaggccttattaagtga

SEQ ID NO: 1010 - DNA, 38 bp, Artificial Sequence
  Synthetic oligonucleotide
ttagtttaccgtcaaaggcctcataatgttacaactga

SEQ ID NO: 1011 - DNA, 38 bp, Artificial Sequence
  Synthetic oligonucleotide
cgtagtattgcgggctcgtctcattgcattcctattga

SEQ ID NO: 1012 - DNA, 38 bp, Artificial Sequence
  Synthetic oligonucleotide
cgtgagacgtggttgcccaccacagtgaataaatttga

SEQ ID NO: 1013 - DNA, 37 bp, Artificial Sequence
  Synthetic oligonucleotide
gctccactatttaaccgtgagttgttaaccgggggga

SEQ ID NO: 1014 - DNA, 37 bp, Artificial Sequence
  Synthetic oligonucleotide
gctccagtaccgctgtacgaattatttaagaaaacga

SEQ ID NO: 1015 - DNA, 36 bp, Artificial Sequence
  Synthetic oligonucleotide
gcccacatttttttcgagtgtgtaaggggtgagaaa

SEQ ID NO: 1016 - DNA, 37 bp, Artificial Sequence
  Synthetic oligonucleotide
gcttattccggatgttgcctgcaattaggggactcga

SEQ ID NO: 1017 - DNA, 37 bp, Artificial Sequence
  Synthetic oligonucleotide
gcttgtctcgcggttttgaaagtaatctttaacgaga

SEQ ID NO: 1018 - DNA, 35 bp, Artificial Sequence
  Synthetic oligonucleotide
gcgcgaaagctcaaataaaactaaagtacaacaaa

SEQ ID NO: 1019 - DNA, 36 bp, Artificial Sequence
  Synthetic oligonucleotide
gctaagctgggagaaaatcacaccctcgatcgtaaa

SEQ ID NO: 1020 - DNA, 37 bp, Artificial Sequence
  Synthetic oligonucleotide
ctcacattagggctcggtaaatataacgatctgacga

SEQ ID NO: 1021 - DNA, 35 bp, Artificial Sequence
  Synthetic oligonucleotide
actgtagctattatgaaagtctgggttattggcct

SEQ ID NO: 1022 - DNA, 35 bp, Artificial Sequence
  Synthetic oligonucleotide
aatcgtatggagcgttgaacaaatgaacccgtagt

SEQ ID NO: 1023 - DNA, 38 bp, Artificial Sequence
  Synthetic oligonucleotide
agatatacttgaaaggtggtattatgaatgttgggtga

SEQ ID NO: 1024 - DNA, 38 bp, Artificial Sequence
  Synthetic oligonucleotide
atggtgactcaattaaaatgtgaggtgggggagctaga

SEQ ID NO: 1025 - DNA, 37 bp, Artificial Sequence
  Synthetic oligonucleotide
tcgtggagggtattgaccttctaatgatgggggggga

SEQ ID NO: 1026 - DNA, 38 bp, Artificial Sequence
  Synthetic oligonucleotide
ggttcctatgaaggacacggggggggaggtatcaatga

SEQ ID NO: 1027 - DNA, 37 bp, Artificial Sequence
  Synthetic oligonucleotide
aaggggcggtagactttaggggctgaatggggtggga

SEQ ID NO: 1028 - DNA, 37 bp, Artificial Sequence
  Synthetic oligonucleotide
gagtgcactggatgaattttgaggggggaaggaccga

SEQ ID NO: 1029 - DNA, 37 bp, Artificial Sequence
  Synthetic oligonucleotide
tgcggtgggtggtgggtgggaaataattatgtgggga

SEQ ID NO: 1030 - DNA, 37 bp, Artificial Sequence
  Synthetic oligonucleotide
taccagactggaagtcaatgatcatggttgtctccga

SEQ ID NO: 1031 - DNA, 36 bp, Artificial Sequence
  Synthetic oligonucleotide
aacggtacaacatctgctagagaactgcaacttcta

SEQ ID NO: 1032 - DNA, 36 bp, Artificial Sequence
  Synthetic oligonucleotide
actatatccaatgctatgcgcgcattcagggtagaa

SEQ ID NO: 1033 - DNA, 35 bp, Artificial Sequence
  Synthetic oligonucleotide
agcatcggccgatcgcctcaatcacgttttcgatt

SEQ ID NO: 1034 - DNA, 38 bp, Artificial Sequence
  Synthetic oligonucleotide
aggcttacaatacgttaccccttcttcgtagacggtga

SEQ ID NO: 1035 - DNA, 36 bp, Artificial Sequence
  Synthetic oligonucleotide
cttgacgtcacatttgcctaacactgtaggtcacaa

SEQ ID NO: 1036 - DNA, 35 bp, Artificial Sequence
  Synthetic oligonucleotide
tctggtagcacatgagtttggcattcctctctgca

SEQ ID NO: 1037 - DNA, 35 bp, Artificial Sequence
  Synthetic oligonucleotide
tgttgtccgtatatattccttgtgtgttaattccg

SEQ ID NO: 1038 - DNA, 35 bp, Artificial Sequence
  Synthetic oligonucleotide
gagcactataagtgtgtatctatttgtaactttct

SEQ ID NO: 1039 - DNA, 35 bp, Artificial Sequence
  Synthetic oligonucleotide
tgtggaggcactcttgtatgattgatttcgtatct

SEQ ID NO: 1040 - DNA, 36 bp, Artificial Sequence
  Synthetic oligonucleotide
aatctaacgcatcaaatacgtttgggtagtcattaa

SEQ ID NO: 1041 - DNA, 35 bp, Artificial Sequence
  Synthetic oligonucleotide
tggtcaacgttatcgtatcctactgatcactaact

SEQ ID NO: 1042 - DNA, 36 bp, Artificial Sequence
  Synthetic oligonucleotide
ttgtcgcaccacatcataggtgccacgatgtcccaa

SEQ ID NO: 1043 - DNA, 36 bp, Artificial Sequence
  Synthetic oligonucleotide
actgttacaacagaagggttagatcacatactacaa

SEQ ID NO: 1044 - DNA, 35 bp, Artificial Sequence
  Synthetic oligonucleotide
actcgagggaactaggaactactacaacagtgtgt

SEQ ID NO: 1045 - DNA, 38 bp, Artificial Sequence
  Synthetic oligonucleotide
ccatgaaactacaacatatcaagtcgagtgtggtgtga

SEQ ID NO: 1046 - DNA, 37 bp, Artificial Sequence
  Synthetic oligonucleotide
cggccgacgtagctcaaattctacactatggttgtga

SEQ ID NO: 1047 - DNA, 38 bp, Artificial Sequence
  Synthetic oligonucleotide
ggcagtactatcaacttacatgccaatattcgatgtga

SEQ ID NO: 1048 - DNA, 36 bp, Artificial Sequence
  Synthetic oligonucleotide
gctaccagcgttgcagtctgcggattctgtcaaata

SEQ ID NO: 1049 - DNA, 35 bp, Artificial Sequence
  Synthetic oligonucleotide
cttactcaaagtggcgtgtaggtcattaggttgta

SEQ ID NO: 1050 - DNA, 36 bp, Artificial Sequence
  Synthetic oligonucleotide
cgtagtactagcaacattagggtcgtaacataacta

SEQ ID NO: 1051 - DNA, 36 bp, Artificial Sequence
  Synthetic oligonucleotide
acgaccgtggggttagggcgcatattctttggctta

SEQ ID NO: 1052 - DNA, 37 bp, Artificial Sequence
  Synthetic oligonucleotide
tactctcatgggtatctttctgaatcgaacgttgtga

SEQ ID NO: 1053 - DNA, 35 bp, Artificial Sequence
  Synthetic oligonucleotide
gcggtttaacctcgaaagtaagggcgattaggcga

SEQ ID NO: 1054 - DNA, 35 bp, Artificial Sequence
  Synthetic oligonucleotide
gcgggttcaaattgaggaggaaagacgaaagctct

SEQ ID NO: 1055 - DNA, 38 bp, Artificial Sequence
  Synthetic oligonucleotide
gatcgaatcgatactgcagcggagtgacacgggtctaa

SEQ ID NO: 1056 - DNA, 35 bp, Artificial Sequence
  Synthetic oligonucleotide
tagtccgggtcgttttaaattcagtttggcatttt

SEQ ID NO: 1057 - DNA, 35 bp, Artificial Sequence
  Synthetic oligonucleotide
aaccaggcatagttggccgcaggcaaccccatttt

SEQ ID NO: 1058 - DNA, 35 bp, Artificial Sequence
  Synthetic oligonucleotide
agtccaaacacgaggttccgtcgcgagaactttaa

SEQ ID NO: 1059 - DNA, 37 bp, Artificial Sequence
  Synthetic oligonucleotide
agtccggcaaggggcgcaacttatcatagtcctctga

SEQ ID NO: 1060 - DNA, 35 bp, Artificial Sequence
  Synthetic oligonucleotide
taggctcccgcctttagcttagtttcagatagcaa

SEQ ID NO: 1061 - DNA, 35 bp, Artificial Sequence
  Synthetic oligonucleotide
cgcggtattttgcctcaaactagtcgttaatctat

SEQ ID NO: 1062 - DNA, 37 bp, Artificial Sequence
  Synthetic oligonucleotide
ttacttcgggagctaggctcacccctacattagtgga

SEQ ID NO: 1063 - DNA, 37 bp, Artificial Sequence
  Synthetic oligonucleotide
agtgcaattggatatatcagtgaggagtttcaattga

SEQ ID NO: 1064 - DNA, 37 bp, Artificial Sequence
  Synthetic oligonucleotide
ccgaaatcggggtagattatggggtcctggaaatcga

SEQ ID NO: 1065 - DNA, 38 bp, Artificial Sequence
  Synthetic oligonucleotide
taagtttgtagaatttaacgtatggaacggggacgtga

SEQ ID NO: 1066 - DNA, 35 bp, Artificial Sequence
  Synthetic oligonucleotide
tgagcgagcgcctgatattcggtactgcatatctc

SEQ ID NO: 1067 - DNA, 36 bp, Artificial Sequence
  Synthetic oligonucleotide
gatcgaattaggggaattcgttggaatcgacccata

SEQ ID NO: 1068 - DNA, 38 bp, Artificial Sequence
  Synthetic oligonucleotide
tctgtgcgaagggtttagtctcgggcgaaacttaatga

SEQ ID NO: 1069 - DNA, 38 bp, Artificial Sequence
  Synthetic oligonucleotide
agggaagtcctagttggagtgattttccgtgattctga

SEQ ID NO: 1070 - DNA, 38 bp, Artificial Sequence
  Synthetic oligonucleotide
aggaatggctagtctaagacaaactcctctgtttatga

SEQ ID NO: 1071 - DNA, 37 bp, Artificial Sequence
  Synthetic oligonucleotide
gattgtcacggatgattctggatttatataggtacga

SEQ ID NO: 1072 - DNA, 38 bp, Artificial Sequence
  Synthetic oligonucleotide
attcatgggagcttgaccggagttattgtttgttgtga

SEQ ID NO: 1073 - DNA, 35 bp, Artificial Sequence
  Synthetic oligonucleotide
tatcgaacttagatgtgacactgttttttagtcta

SEQ ID NO: 1074 - DNA, 37 bp, Artificial Sequence
  Synthetic oligonucleotide
agctacggcttatcgttggggtccaagttcatgaaga

SEQ ID NO: 1075 - DNA, 37 bp, Artificial Sequence
  Synthetic oligonucleotide
agtctaccccccaaattgttggtattccgagcataga

SEQ ID NO: 1076 - DNA, 35 bp, Artificial Sequence
  Synthetic oligonucleotide
tcgtcccaagctctggactggtaagttcttatgta

SEQ ID NO: 1077 - DNA, 36 bp, Artificial Sequence
  Synthetic oligonucleotide
tgctacagttcaacctcacgtttttgaactgcgtga

SEQ ID NO: 1078 - DNA, 37 bp, Artificial Sequence
  Synthetic oligonucleotide
cgtttggacgggggtgtccttttttttgatattacga

SEQ ID NO: 1079 - DNA, 37 bp, Artificial Sequence
  Synthetic oligonucleotide
ttcctcgtgttacaggcactttattagcctgtgggga

SEQ ID NO: 1080 - DNA, 36 bp, Artificial Sequence
  Synthetic oligonucleotide
cttggcccgttgaccacgacataatggtcttatata

SEQ ID NO: 1081 - DNA, 36 bp, Artificial Sequence
  Synthetic oligonucleotide
aggatatttaccctgcatcttttcgttacggtatga

SEQ ID NO: 1082 - DNA, 36 bp, Artificial Sequence
  Synthetic oligonucleotide
actgtctggaagtcggaactttcaccattatgatga

SEQ ID NO: 1083 - DNA, 38 bp, Artificial Sequence
  Synthetic oligonucleotide
gaatggaggaactttctcgtattcacgttttgttgtga

SEQ ID NO: 1084 - DNA, 38 bp, Artificial Sequence
  Synthetic oligonucleotide
aaccgttagtgcaaaggggagtacggcctttgttttga

SEQ ID NO: 1085 - DNA, 38 bp, Artificial Sequence
  Synthetic oligonucleotide
ctcgtacgcaaacgctttgaatagaacgtttgtcttga

SEQ ID NO: 1086 - DNA, 37 bp, Artificial Sequence
  Synthetic oligonucleotide
agatacccggtggttatcttaagggtgtgacttttga

SEQ ID NO: 1087 - DNA, 38 bp, Artificial Sequence
  Synthetic oligonucleotide
tagggttcagtatctggcgattctgttgatgttcctga

SEQ ID NO: 1088 - DNA, 38 bp, Artificial Sequence
  Synthetic oligonucleotide
cgagctcccttaagggtgcatcgggattcattgtttga

SEQ ID NO: 1089 - DNA, 38 bp, Artificial Sequence
  Synthetic oligonucleotide
cacatccggagaaggtgcgtttatacatgaatttctga

SEQ ID NO: 1090 - DNA, 38 bp, Artificial Sequence
  Synthetic oligonucleotide
aaggacgacgcggaacaatctgtagctatgactcttga

SEQ ID NO: 1091 - DNA, 37 bp, Artificial Sequence
  Synthetic oligonucleotide
acttgttcctgaagtgggtttgacttgcaaacgttga

SEQ ID NO: 1092 - DNA, 37 bp, Artificial Sequence
  Synthetic oligonucleotide
agtacacgcccgttggtttcgttcggaaattacttga

SEQ ID NO: 1093 - DNA, 37 bp, Artificial Sequence
  Synthetic oligonucleotide
tgaacatctttgttattcaacgggatcacgcaacgga

SEQ ID NO: 1094 - DNA, 36 bp, Artificial Sequence
  Synthetic oligonucleotide
taatccgatgcaatttgtatttactgacaatgcgta

SEQ ID NO: 1095 - DNA, 36 bp, Artificial Sequence
  Synthetic oligonucleotide
aactggaggatcccggaatttatcctcccatacgaa

SEQ ID NO: 1096 - DNA, 37 bp, Artificial Sequence
  Synthetic oligonucleotide
gaattgcggactgacagatagatgcggtgacattgga

SEQ ID NO: 1097 - DNA, 35 bp, Artificial Sequence
  Synthetic oligonucleotide
tcgcactagttctatgagggaaactacaggaacga

SEQ ID NO: 1098 - DNA, 37 bp, Artificial Sequence
  Synthetic oligonucleotide
gattgacctggaaggcaatagctggtcaacgactgga

SEQ ID NO: 1099 - DNA, 37 bp, Artificial Sequence
  Synthetic oligonucleotide
gcagtacggcacgagggatactctgccctatatatga

SEQ ID NO: 1100 - DNA, 37 bp, Artificial Sequence
  Synthetic oligonucleotide
gccatcatggatatatgcacgtatggtgcttttagga

SEQ ID NO: 1101 - DNA, 38 bp, Artificial Sequence
  Synthetic oligonucleotide
tgcgaaactctagatgattatgattaaacttgtactga

SEQ ID NO: 1102 - DNA, 37 bp, Artificial Sequence
  Synthetic oligonucleotide
aactgaccccattgggtcacccgtgatagttatcgga

SEQ ID NO: 1103 - DNA, 38 bp, Artificial Sequence
  Synthetic oligonucleotide
gtactgctctaggagaaaataaccgtatgaaacgatga

SEQ ID NO: 1104 - DNA, 38 bp, Artificial Sequence
  Synthetic oligonucleotide
ttgcgtatttgccttagaacgcaataaagcatttgtga

SEQ ID NO: 1105 - DNA, 38 bp, Artificial Sequence
  Synthetic oligonucleotide
atctacactggaactgacagggggtagtagtatcctga

SEQ ID NO: 1106 - DNA, 38 bp, Artificial Sequence
  Synthetic oligonucleotide
tagggattgaatctcctctaacattcgacaacaggtga

SEQ ID NO: 1107 - DNA, 38 bp, Artificial Sequence
  Synthetic oligonucleotide
agcgttcaacgcggttgagtgggtgccgaactatatga

SEQ ID NO: 1108 - DNA, 38 bp, Artificial Sequence
  Synthetic oligonucleotide
ggacctgatgccatttagtgtggataatgttattgtga

SEQ ID NO: 1109 - DNA, 35 bp, Artificial Sequence
  Synthetic oligonucleotide
tgatatctaggaaccatgcggtaatggtccgagta

SEQ ID NO: 1110 - DNA, 37 bp, Artificial Sequence
  Synthetic oligonucleotide
tgaaagccgtgactggtattaacggcaaataacggga

SEQ ID NO: 1111 - DNA, 36 bp, Artificial Sequence
  Synthetic oligonucleotide
tgcatgatacgggcttcaaggagcttcttattcgta

SEQ ID NO: 1112 - DNA, 37 bp, Artificial Sequence
  Synthetic oligonucleotide
agacacattgtgtgcaacatggaagtggtctttagga

SEQ ID NO: 1113 - DNA, 38 bp, Artificial Sequence
  Synthetic oligonucleotide
gagttgctctatgtacttcctgagggggtatgtgatga

SEQ ID NO: 1114 - DNA, 37 bp, Artificial Sequence
  Synthetic oligonucleotide
cctgttatctatacttgcgtgagcaaattactttaga

SEQ ID NO: 1115 - DNA, 38 bp, Artificial Sequence
  Synthetic oligonucleotide
tggagtacgcgtgcgttacagtccgaataaggctttga

SEQ ID NO: 1116 - DNA, 38 bp, Artificial Sequence
  Synthetic oligonucleotide
cacagtcaggcgtaatgagaatgagcactttggtttga

SEQ ID NO: 1117 - DNA, 36 bp, Artificial Sequence
  Synthetic oligonucleotide
tcatttacgtgagtaacctggcttagtatcggagta

SEQ ID NO: 1118 - DNA, 38 bp, Artificial Sequence
  Synthetic oligonucleotide
gatggaacgtagcgaaaccgggtttacgcgtgatctga

SEQ ID NO: 1119 - DNA, 37 bp, Artificial Sequence
  Synthetic oligonucleotide
taattatcgtcgtgagatcgatactacggttgtgcga

SEQ ID NO: 1120 - DNA, 35 bp, Artificial Sequence
  Synthetic oligonucleotide
gaggactggcattaccgtggtcagctaaactagac

SEQ ID NO: 1121 - DNA, 37 bp, Artificial Sequence
  Synthetic oligonucleotide
tgcagcatacctaattgttcaccgttgggaaaggtga

SEQ ID NO: 1122 - DNA, 36 bp, Artificial Sequence
  Synthetic oligonucleotide
agctttgtaatacgtgagtttgggtaggtcatcgta

SEQ ID NO: 1123 - DNA, 35 bp, Artificial Sequence
  Synthetic oligonucleotide
cctgcgtcctaaacggataacgaaaacgaatactc

SEQ ID NO: 1124 - DNA, 35 bp, Artificial Sequence
  Synthetic oligonucleotide
ccctgcacgaacgaaccggaataaatcgatggtga

SEQ ID NO: 1125 - DNA, 36 bp, Artificial Sequence
  Synthetic oligonucleotide
gcgcttttctcaaccgacgaccatcgaatagaagaa

SEQ ID NO: 1126 - DNA, 36 bp, Artificial Sequence
  Synthetic oligonucleotide
ttaggctaaggaacgggacccattcgatgaaaatca

SEQ ID NO: 1127 - DNA, 36 bp, Artificial Sequence
  Synthetic oligonucleotide
tcggagtttgcaatccggcaattattagattacaca

SEQ ID NO: 1128 - DNA, 35 bp, Artificial Sequence
  Synthetic oligonucleotide
accggaaatgaaccgtcgcttattccacgaattag

SEQ ID NO: 1129 - DNA, 35 bp, Artificial Sequence
  Synthetic oligonucleotide
gagaattgcggtaaatttcggggcaatatcctctc

SEQ ID NO: 1130 - DNA, 36 bp, Artificial Sequence
  Synthetic oligonucleotide
acgccccgaatgatcggtgggctgtattttacaata

SEQ ID NO: 1131 - DNA, 37 bp, Artificial Sequence
  Synthetic oligonucleotide
gagtagtgggctcacgggggcagtatatcggatacga

SEQ ID NO: 1132 - DNA, 36 bp, Artificial Sequence
  Synthetic oligonucleotide
gagtgcgatggcgtccacggggatttttcggaataa

SEQ ID NO: 1133 - DNA, 36 bp, Artificial Sequence
  Synthetic oligonucleotide
accacgtacaaggaagttaggattcggggaccgtga

SEQ ID NO: 1134 - DNA, 35 bp, Artificial Sequence
  Synthetic oligonucleotide
gaaagctcaagctaatgagaatacgatcatacacc

SEQ ID NO: 1135 - DNA, 36 bp, Artificial Sequence
  Synthetic oligonucleotide
aggacgacgaatttactctaggggtgggctggttaa

SEQ ID NO: 1136 - DNA, 37 bp, Artificial Sequence
  Synthetic oligonucleotide
gtacactggtgtgattgttgtggtggagttggtaaga

SEQ ID NO: 1137 - DNA, 36 bp, Artificial Sequence
  Synthetic oligonucleotide
gggtagtacggggagcactgggctagattgtgacta

SEQ ID NO: 1138 - DNA, 35 bp, Artificial Sequence
  Synthetic oligonucleotide
ggtggaacgggggttgggattgtaagggagtatgt

SEQ ID NO: 1139 - DNA, 37 bp, Artificial Sequence
  Synthetic oligonucleotide
acggtaaaaagggcaatgcttggcgtctatcagacga

SEQ ID NO: 1140 - DNA, 35 bp, Artificial Sequence
  Synthetic oligonucleotide
gtgtggaccggctagtaaaggctgttggggtaatt

SEQ ID NO: 1141 - DNA, 35 bp, Artificial Sequence
  Synthetic oligonucleotide
gcctatcggtggatagtttggtcattcattggagc

SEQ ID NO: 1142 - DNA, 37 bp, Artificial Sequence
  Synthetic oligonucleotide
actctccatgggtggggctcccgaaagaatttctaga

SEQ ID NO: 1143 - DNA, 37 bp, Artificial Sequence
  Synthetic oligonucleotide
ttaaagccatcaaaatctatctaaagttgtagaagga

SEQ ID NO: 1144 - DNA, 37 bp, Artificial Sequence
  Synthetic oligonucleotide
gtctacataatttgtatacggtttaaaatctcgagga

SEQ ID NO: 1145 - DNA, 38 bp, Artificial Sequence
  Synthetic oligonucleotide
tctcggagtagaatccaccagaatcacaggaattctga

SEQ ID NO: 1146 - DNA, 35 bp, Artificial Sequence
  Synthetic oligonucleotide
gaaaggtgccaatcgccggtacacaatttaggaaa

SEQ ID NO: 1147 - DNA, 35 bp, Artificial Sequence
  Synthetic oligonucleotide
cataaacaccttatgaatttatgtagaaatcgaaa

SEQ ID NO: 1148 - DNA, 34 bp, Artificial Sequence
  Synthetic oligonucleotide
gaaccgaagtagtagatttaattatacataatgt

SEQ ID NO: 1149 - DNA, 36 bp, Artificial Sequence
  Synthetic oligonucleotide
gccgcaatacaaacgagaggcttctcccgattaata

SEQ ID NO: 1150 - DNA, 35 bp, Artificial Sequence
  Synthetic oligonucleotide
acctgcggaatatcgtgagaattgaaaaaagcaaa

SEQ ID NO: 1151 - DNA, 38 bp, Artificial Sequence
  Synthetic oligonucleotide
taggcgaatcgaaaaaaagtaatcattatgggttgtga

SEQ ID NO: 1152 - DNA, 37 bp, Artificial Sequence
  Synthetic oligonucleotide
ataccggaccaaggacgccggggtactaaggactcga

SEQ ID NO: 1153 - DNA, 37 bp, Artificial Sequence
  Synthetic oligonucleotide
cgcataatagtcgacgtttttttttgtcggattcgga

SEQ ID NO: 1154 - DNA, 38 bp, Artificial Sequence
  Synthetic oligonucleotide
acaggaaggccaaagtttttccaaggtcgattgcctga

SEQ ID NO: 1155 - DNA, 36 bp, Artificial Sequence
  Synthetic oligonucleotide
gaaatcgtttggtaatttagttcggaacccagggta

SEQ ID NO: 1156 - DNA, 35 bp, Artificial Sequence
  Synthetic oligonucleotide
aaaacgtctcatgcggcctttcgagggcatatctc

SEQ ID NO: 1157 - DNA, 38 bp, Artificial Sequence
  Synthetic oligonucleotide
aaggttcgagaattctcactgcagatcatccgtcatga

SEQ ID NO: 1158 - DNA, 35 bp, Artificial Sequence
  Synthetic oligonucleotide
agtgctctctcttgggggtagtcatccagaatagt

SEQ ID NO: 1159 - DNA, 35 bp, Artificial Sequence
  Synthetic oligonucleotide
taagtcccaatttatttgaagacgttgtaatcgtc

SEQ ID NO: 1160 - DNA, 36 bp, Artificial Sequence
  Synthetic oligonucleotide
aaaacaggctaaaaaggtacatccccattttgctta

SEQ ID NO: 1161 - DNA, 37 bp, Artificial Sequence
  Synthetic oligonucleotide
gtgcgcaaggtttagcgcatacgtagttgaataccga

SEQ ID NO: 1162 - DNA, 37 bp, Artificial Sequence
  Synthetic oligonucleotide
ttccaagtacccaggtttagacctgggacgatagcga

SEQ ID NO: 1163 - DNA, 35 bp, Artificial Sequence
  Synthetic oligonucleotide
tttccaccaaccctgatttgaaaaagacacgcaaa

SEQ ID NO: 1164 - DNA, 35 bp, Artificial Sequence
  Synthetic oligonucleotide
ctccgcccaacgagagttctacgtaaagatcaaac

SEQ ID NO: 1165 - DNA, 37 bp, Artificial Sequence
  Synthetic oligonucleotide
tgtcccgcgcttgacatcatcctaagattaaagaaga

SEQ ID NO: 1166 - DNA, 35 bp, Artificial Sequence
  Synthetic oligonucleotide
attaccgttaatttaaagtacccacgggttgttgg

SEQ ID NO: 1167 - DNA, 37 bp, Artificial Sequence
  Synthetic oligonucleotide
gcatcgtggaaagattctcttataatcaattggggga

SEQ ID NO: 1168 - DNA, 35 bp, Artificial Sequence
  Synthetic oligonucleotide
acacacacggggtagatcacataggcaaacgcttg

SEQ ID NO: 1169 - DNA, 36 bp, Artificial Sequence
  Synthetic oligonucleotide
acaaacgtactaagggcgaagccttttactcgcgca

SEQ ID NO: 1170 - DNA, 38 bp, Artificial Sequence
  Synthetic oligonucleotide
cgtgcaaaccgctgtaagcattcaaaccaactggatga

SEQ ID NO: 1171 - DNA, 35 bp, Artificial Sequence
  Synthetic oligonucleotide
acacaaacacaatctaggagttaaatacagttgga

SEQ ID NO: 1172 - DNA, 35 bp, Artificial Sequence
  Synthetic oligonucleotide
actttcacgatgttgggggggcccaattacagatg

SEQ ID NO: 1173 - DNA, 35 bp, Artificial Sequence
  Synthetic oligonucleotide
acgtttagattaagttcgcttatgaatgtgggatt

SEQ ID NO: 1174 - DNA, 37 bp, Artificial Sequence
  Synthetic oligonucleotide
attgccgttgatgttcgtgattttattaagtggggga

SEQ ID NO: 1175 - DNA, 37 bp, Artificial Sequence
  Synthetic oligonucleotide
gttcttaggcctgttgttaccaggattttcgtgtaga

SEQ ID NO: 1176 - DNA, 36 bp, Artificial Sequence
  Synthetic oligonucleotide
agtccggatacctgtttgtatgcgaaagggaattta

SEQ ID NO: 1177 - DNA, 35 bp, Artificial Sequence
  Synthetic oligonucleotide
gttaatgtcaatctgaaccgacgtgagtattcggc

SEQ ID NO: 1178 - DNA, 37 bp, Artificial Sequence
  Synthetic oligonucleotide
accacggttgggttgcggctaacgtatagccgatgga

SEQ ID NO: 1179 - DNA, 36 bp, Artificial Sequence
  Synthetic oligonucleotide
gtgccttggttgtaattggactttatggctacctaa

SEQ ID NO: 1180 - DNA, 38 bp, Artificial Sequence
  Synthetic oligonucleotide
gatttgcgagtgtgaaacgaattatagcacacgtctga

SEQ ID NO: 1181 - DNA, 35 bp, Artificial Sequence
  Synthetic oligonucleotide
atgctggtgaaccaaactcaagcatgacatttaag

SEQ ID NO: 1182 - DNA, 36 bp, Artificial Sequence
  Synthetic oligonucleotide
cctgcccacgaattgtatatgtaattgcactatcga

SEQ ID NO: 1183 - DNA, 35 bp, Artificial Sequence
  Synthetic oligonucleotide
tctgcaggacttttgattcgtgggttcaacctcat

SEQ ID NO: 1184 - DNA, 37 bp, Artificial Sequence
  Synthetic oligonucleotide
gcacattatgtcacgtagaggcacagtcggtaatcga

SEQ ID NO: 1185 - DNA, 36 bp, Artificial Sequence
  Synthetic oligonucleotide
gggctacgttatcccattcaattcgaattaaatgta

SEQ ID NO: 1186 - DNA, 36 bp, Artificial Sequence
  Synthetic oligonucleotide
acattgccgaattaattcgttgtcgaggaaagacaa

SEQ ID NO: 1187 - DNA, 35 bp, Artificial Sequence
  Synthetic oligonucleotide
cccacgtgttacgggttttatcatgacatcactat

SEQ ID NO: 1188 - DNA, 35 bp, Artificial Sequence
  Synthetic oligonucleotide
catgcacgttttattgtggaaatgtaagcttgggc

SEQ ID NO: 1189 - DNA, 37 bp, Artificial Sequence
  Synthetic oligonucleotide
tgcaagggaaatacgttcctgtgttgtttcgatgaga

SEQ ID NO: 1190 - DNA, 35 bp, Artificial Sequence
  Synthetic oligonucleotide
tgggcagtctctatttgtcattacggttttatgtc

SEQ ID NO: 1191 - DNA, 38 bp, Artificial Sequence
  Synthetic oligonucleotide
agcaggcaacagtatcagccctatttgtcgtaaaatga

SEQ ID NO: 1192 - DNA, 38 bp, Artificial Sequence
  Synthetic oligonucleotide
ggctacgggaaagatgtcacgtctgtttcatttgatga

SEQ ID NO: 1193 - DNA, 35 bp, Artificial Sequence
  Synthetic oligonucleotide
actacgttttaatttcagtaacccatccgatgctc

SEQ ID NO: 1194 - DNA, 36 bp, Artificial Sequence
  Synthetic oligonucleotide
aacaaacgccaaccatatggtaggattcctctttta

SEQ ID NO: 1195 - DNA, 36 bp, Artificial Sequence
  Synthetic oligonucleotide
tgataaccatcggtacctcaccgctcccaactctta

SEQ ID NO: 1196 - DNA, 36 bp, Artificial Sequence
  Synthetic oligonucleotide
cgaaccgacgaaatttccacaccgctttgtatgtta

SEQ ID NO: 1197 - DNA, 35 bp, Artificial Sequence
  Synthetic oligonucleotide
tacctcatgtttgtcactatggaaatcatcccgac

SEQ ID NO: 1198 - DNA, 36 bp, Artificial Sequence
  Synthetic oligonucleotide
agttatttctcgccacataacactctatggaaacta

SEQ ID NO: 1199 - DNA, 36 bp, Artificial Sequence
  Synthetic oligonucleotide
atctcggatttcccgtaggtcactggcacatttcta

SEQ ID NO: 1200 - DNA, 37 bp, Artificial Sequence
  Synthetic oligonucleotide
aattttccgctgggacgaatttctaaccctatttgga

SEQ ID NO: 1201 - DNA, 35 bp, Artificial Sequence
  Synthetic oligonucleotide
gaagcaccgaatcacctggcatggccctttatcta

SEQ ID NO: 1202 - DNA, 35 bp, Artificial Sequence
  Synthetic oligonucleotide
actgccgacgcacaacttgggtggggctctaattt

SEQ ID NO: 1203 - DNA, 35 bp, Artificial Sequence
  Synthetic oligonucleotide
ttcgctgacctcaccggacatatcatttaaagcta

SEQ ID NO: 1204 - DNA, 35 bp, Artificial Sequence
  Synthetic oligonucleotide
tcccttattatgcgaaacaaatatgtagttcttac

SEQ ID NO: 1205 - DNA, 35 bp, Artificial Sequence
  Synthetic oligonucleotide
tctaaaactcacgctaggtggtacaaccgattcta

SEQ ID NO: 1206 - DNA, 36 bp, Artificial Sequence
  Synthetic oligonucleotide
gtagccaacgaagctcgcgtattctatttgccctta

SEQ ID NO: 1207 - DNA, 36 bp, Artificial Sequence
  Synthetic oligonucleotide
acctcaccaagtccttaaggattctgtattcataaa

SEQ ID NO: 1208 - DNA, 35 bp, Artificial Sequence
  Synthetic oligonucleotide
agaatctggctattgatccccacacattgcgaaaa

SEQ ID NO: 1209 - DNA, 35 bp, Artificial Sequence
  Synthetic oligonucleotide
acctaccaatctagatccgcttttatggattgctc

SEQ ID NO: 1210 - DNA, 35 bp, Artificial Sequence
  Synthetic oligonucleotide
gacttctaaacacatggggtgcccgcaacatattt

SEQ ID NO: 1211 - DNA, 38 bp, Artificial Sequence
  Synthetic oligonucleotide
tccagaacgtcagctctccatacgcaattaattcatga

SEQ ID NO: 1212 - DNA, 35 bp, Artificial Sequence
  Synthetic oligonucleotide
gacggccttataaggcactcctcattcatttaata

SEQ ID NO: 1213 - DNA, 38 bp, Artificial Sequence
  Synthetic oligonucleotide
gggacctgcaagcctatcaacgggttatacatttgtga

SEQ ID NO: 1214 - DNA, 36 bp, Artificial Sequence
  Synthetic oligonucleotide
tacacttccatttgatgcgctcaccttgaatctgta

SEQ ID NO: 1215 - DNA, 36 bp, Artificial Sequence
  Synthetic oligonucleotide
aatcgaactcattactttccaatggacctgggagaa

SEQ ID NO: 1216 - DNA, 36 bp, Artificial Sequence
  Synthetic oligonucleotide
agtttacgagttacactacaacggacgaatctttta

SEQ ID NO: 1217 - DNA, 35 bp, Artificial Sequence
  Synthetic oligonucleotide
aacttttctggctttatacacatacggttgccatt

SEQ ID NO: 1218 - DNA, 36 bp, Artificial Sequence
  Synthetic oligonucleotide
agaactgggccttggaatcacacacctaactagtta

SEQ ID NO: 1219 - DNA, 36 bp, Artificial Sequence
  Synthetic oligonucleotide
attcgcactaataacatgttgctccattcaacctaa

SEQ ID NO: 1220 - DNA, 35 bp, Artificial Sequence
  Synthetic oligonucleotide
tatctgctgttttctctggtgccaataactacatc

SEQ ID NO: 1221 - DNA, 37 bp, Artificial Sequence
  Synthetic oligonucleotide
ttgcacataattttctgctttaaccaagcgaacccga

SEQ ID NO: 1222 - DNA, 35 bp, Artificial Sequence
  Synthetic oligonucleotide
taaaattctgaaaatacacgtgtctttcgcattac

SEQ ID NO: 1223 - DNA, 35 bp, Artificial Sequence
  Synthetic oligonucleotide
tcccgaacacatcccccttttaagggctttgctaa

SEQ ID NO: 1224 - DNA, 38 bp, Artificial Sequence
  Synthetic oligonucleotide
aaccacacggggctctcatcgatacttctagtgattga

SEQ ID NO: 1225 - DNA, 35 bp, Artificial Sequence
  Synthetic oligonucleotide
atctagaattccgtttgcgcgagtaacttccctgt

SEQ ID NO: 1226 - DNA, 36 bp, Artificial Sequence
  Synthetic oligonucleotide
cccgcttatcgctagtacctcatttagaattggaaa

SEQ ID NO: 1227 - DNA, 36 bp, Artificial Sequence
  Synthetic oligonucleotide
acctgtaaatttggctcacttttcctttacactgga

SEQ ID NO: 1228 - DNA, 35 bp, Artificial Sequence
  Synthetic oligonucleotide
aatagtatcacacctatctggcttcctgtacccgt

SEQ ID NO: 1229 - DNA, 38 bp, Artificial Sequence
  Synthetic oligonucleotide
acccacccttgagcaccattaaatagtgatttcgctga

SEQ ID NO: 1230 - DNA, 37 bp, Artificial Sequence
  Synthetic oligonucleotide
tcacgaaccctttagctctattttgtttgacgcatga

SEQ ID NO: 1231 - DNA, 37 bp, Artificial Sequence
  Synthetic oligonucleotide
gaggaacgtttctcccctcaacatttaaataaacaga

SEQ ID NO: 1232 - DNA, 35 bp, Artificial Sequence
  Synthetic oligonucleotide
atcctacgcataattctcgaggatctatttcgaaa

SEQ ID NO: 1233 - DNA, 36 bp, Artificial Sequence
  Synthetic oligonucleotide
tgcccgcaattacccctagatccacagcttggttta

SEQ ID NO: 1234 - DNA, 38 bp, Artificial Sequence
  Synthetic oligonucleotide
ggctcttatacaaaacattgggttctcgacctccctga

SEQ ID NO: 1235 - DNA, 36 bp, Artificial Sequence
  Synthetic oligonucleotide
gtgagctgctaatatttatcctgaacttgcttacga

SEQ ID NO: 1236 - DNA, 35 bp, Artificial Sequence
  Synthetic oligonucleotide
agttaccttacaacgaggtttcttgaatggattct

SEQ ID NO: 1237 - DNA, 35 bp, Artificial Sequence
  Synthetic oligonucleotide
ttacaccatccctacgcggtaatagcaactctgtt

SEQ ID NO: 1238 - DNA, 36 bp, Artificial Sequence
  Synthetic oligonucleotide
gcaccacgcacctgtggggattccctaatgtcttta

SEQ ID NO: 1239 - DNA, 35 bp, Artificial Sequence
  Synthetic oligonucleotide
ctatcggactaatacacgtaaaaataactctggtt

SEQ ID NO: 1240 - DNA, 35 bp, Artificial Sequence
  Synthetic oligonucleotide
ggcgtacttatcacaaacggtggaaccacacttct

SEQ ID NO: 1241 - DNA, 37 bp, Artificial Sequence
  Synthetic oligonucleotide
tattcttatccaacccacgaaatcaattgtattttga

SEQ ID NO: 1242 - DNA, 35 bp, Artificial Sequence
  Synthetic oligonucleotide
agatccgaatccgtaactccaaaatatttatgcac

SEQ ID NO: 1243 - DNA, 38 bp, Artificial Sequence
  Synthetic oligonucleotide
actatagaacaatccaccgctttaaatcaactatctta

SEQ ID NO: 1244 - DNA, 35 bp, Artificial Sequence
  Synthetic oligonucleotide
gccgttcttctgcgacgaacacatcctcccttaat

SEQ ID NO: 1245 - DNA, 35 bp, Artificial Sequence
  Synthetic oligonucleotide
gcgcgaggcccgcgggctcatcacttttgttatct

SEQ ID NO: 1246 - DNA, 38 bp, Artificial Sequence
  Synthetic oligonucleotide
tacccctgacaatcctcgcgccgaggcctccatcctga

SEQ ID NO: 1247 - DNA, 36 bp, Artificial Sequence
  Synthetic oligonucleotide
ttcggtctaatttttagcggccaaattttcttatca

SEQ ID NO: 1248 - DNA, 36 bp, Artificial Sequence
  Synthetic oligonucleotide
gattttaaaacccttgcacctgattgtgccaatcca

SEQ ID NO: 1249 - DNA, 35 bp, Artificial Sequence
  Synthetic oligonucleotide
gcgcgaggcccgcgggctcatcacttttgttatat

SEQ ID NO: 1250 - DNA, 35 bp, Artificial Sequence
  Synthetic oligonucleotide
gccgttcttctgcgacgaacacatcctcccttact

SEQ ID NO: 1251 - DNA, 36 bp, Artificial Sequence
  Synthetic oligonucleotide
tgctcggccctattaacacgtgccgtgtcttgttca

SEQ ID NO: 1252 - DNA, 38 bp, Artificial Sequence
  Synthetic oligonucleotide
tcgcgccgaccgtattacaccaactctatggactctaa

SEQ ID NO: 1253 - DNA, 36 bp, Artificial Sequence
  Synthetic oligonucleotide
aacccaattcacatacactctcacccccactaaaca

SEQ ID NO: 1254 - DNA, 35 bp, Artificial Sequence
  Synthetic oligonucleotide
gccgttcttctgcgacgaacacatcctcccttatt

SEQ ID NO: 1255 - DNA, 35 bp, Artificial Sequence
  Synthetic oligonucleotide
gcgcgaggcccgcgggctcatcacttttgttatgt

SEQ ID NO: 1256 - DNA, 38 bp, Artificial Sequence
  Synthetic oligonucleotide
tacccctgacaatcctcgcgccgaggcctccatcctca

SEQ ID NO: 1257 - DNA, 36 bp, Artificial Sequence
  Synthetic oligonucleotide
ttccgcgcaaacgaatgactctttgttgaaaaacga

SEQ ID NO: 1258 - DNA, 36 bp, Artificial Sequence
  Synthetic oligonucleotide
gcgtagtggctgcttggcgtttccgcatactaggca

SEQ ID NO: 1259 - DNA, 37 bp, Artificial Sequence
  Synthetic oligonucleotide
aaacctcggctaaccgccaagggtagtgtcccccgca

SEQ ID NO: 1260 - DNA, 38 bp, Artificial Sequence
  Synthetic oligonucleotide
atgagacgtagcaacactcgagacccttggagcactca

SEQ ID NO: 1261 - DNA, 36 bp, Artificial Sequence
  Synthetic oligonucleotide
agctgccagggttcgggaccttaacggatgtcccaa

SEQ ID NO: 1262 - DNA, 37 bp, Artificial Sequence
  Synthetic oligonucleotide
tcacgagcttccactacgtctatccgcgtagacggaa

SEQ ID NO: 1263 - DNA, 37 bp, Artificial Sequence
  Synthetic oligonucleotide
gatcgacgattcgatcatccaacgtatttacaccaga

SEQ ID NO: 1264 - DNA, 36 bp, Artificial Sequence
  Synthetic oligonucleotide
gcagccggcgaccgggatgtcgtcgggacttgctta

SEQ ID NO: 1265 - DNA, 38 bp, Artificial Sequence
  Synthetic oligonucleotide
atgaaccatggttacacctctaatgtagcctcatgtca

SEQ ID NO: 1266 - DNA, 37 bp, Artificial Sequence
  Synthetic oligonucleotide
ccaccggtacttattattcgccatccacacccagtta

SEQ ID NO: 1267 - DNA, 35 bp, Artificial Sequence
  Synthetic oligonucleotide
tagttacgccactactctgtgggagaaacccgaga

SEQ ID NO: 1268 - DNA, 38 bp, Artificial Sequence
  Synthetic oligonucleotide
atccacccaaaatcgatataagtgcgcccccaatctaa

SEQ ID NO: 1269 - DNA, 35 bp, Artificial Sequence
  Synthetic oligonucleotide
aggggggaaagtcatcgggtggctgtactacttca

SEQ ID NO: 1270 - DNA, 37 bp, Artificial Sequence
  Synthetic oligonucleotide
gggggtcgtactcccgagatttgcgttacggtgaaca

SEQ ID NO: 1271 - DNA, 37 bp, Artificial Sequence
  Synthetic oligonucleotide
gagtatcctctggtcgttcggtacagaaacggtgtaa

SEQ ID NO: 1272 - DNA, 37 bp, Artificial Sequence
  Synthetic oligonucleotide
acatggcctttaaatctacggagtactgttgggggga

SEQ ID NO: 1273 - DNA, 36 bp, Artificial Sequence
  Synthetic oligonucleotide
gcgtagtggctgcttggcgtttccgcatactaggaa

SEQ ID NO: 1274 - DNA, 36 bp, Artificial Sequence
  Synthetic oligonucleotide
tccgataccgaacttcactccgtgggcggggttgaa

SEQ ID NO: 1275 - DNA, 38 bp, Artificial Sequence
  Synthetic oligonucleotide
gcagtgttatttctcttggtttctttgatttcacttaa

SEQ ID NO: 1276 - DNA, 38 bp, Artificial Sequence
  Synthetic oligonucleotide
acatccagatacccttgacttaagattgtgaccactaa

SEQ ID NO: 1277 - DNA, 37 bp, Artificial Sequence
  Synthetic oligonucleotide
acaggttctgcgaccagaaagttaggactaacctaga

SEQ ID NO: 1278 - DNA, 38 bp, Artificial Sequence
  Synthetic oligonucleotide
gcagtgttatttctcttggtttctttgatttcacttca

SEQ ID NO: 1279 - DNA, 37 bp, Artificial Sequence
  Synthetic oligonucleotide
ccgcagttttgttcccgggggaatccggactgaacga

SEQ ID NO: 1280 - DNA, 37 bp, Artificial Sequence
  Synthetic oligonucleotide
aggtccggttcctatggactgcctgaccccgcgaaga

SEQ ID NO: 1281 - DNA, 35 bp, Artificial Sequence
  Synthetic oligonucleotide
ttgtaacgatttgggagtccagagactcgctgttt

SEQ ID NO: 1282 - DNA, 37 bp, Artificial Sequence
  Synthetic oligonucleotide
tttgatttaagtactcccgcgttcctccgaataccca

SEQ ID NO: 1283 - DNA, 38 bp, Artificial Sequence
  Synthetic oligonucleotide
gcagagcgcacgtgtactcaatgggttgttaattttaa

SEQ ID NO: 1284 - DNA, 36 bp, Artificial Sequence
  Synthetic oligonucleotide
gaactctgtattattcctgtcattagccgttggtaa

SEQ ID NO: 1285 - DNA, 38 bp, Artificial Sequence
  Synthetic oligonucleotide
gaggccctaccgtgtattttgataatggatttgtttaa

SEQ ID NO: 1286 - DNA, 38 bp, Artificial Sequence
  Synthetic oligonucleotide
tgtaatcacgggtgcgaactcgagagaatttgtgctaa

SEQ ID NO: 1287 - DNA, 38 bp, Artificial Sequence
  Synthetic oligonucleotide
ggccggtagtccacgctttcgcgagatagtgactgtga

SEQ ID NO: 1288 - DNA, 36 bp, Artificial Sequence
  Synthetic oligonucleotide
aggtcctcagaacttgtgcgtgagcaaagaatgaag

SEQ ID NO: 1289 - DNA, 38 bp, Artificial Sequence
  Synthetic oligonucleotide
gagtatctgggttcgagagcgcatttgcccgctgttga

SEQ ID NO: 1290 - DNA, 35 bp, Artificial Sequence
  Synthetic oligonucleotide
gtattaatcttcgctgtgggagagcgattacgcca

SEQ ID NO: 1291 - DNA, 36 bp, Artificial Sequence
  Synthetic oligonucleotide
tatccttggatcaccgatcgatgcgagaggtagtaa

SEQ ID NO: 1292 - DNA, 38 bp, Artificial Sequence
  Synthetic oligonucleotide
ttttctacgtgacggagagtccagatcgaagacaaaga

SEQ ID NO: 1293 - DNA, 36 bp, Artificial Sequence
  Synthetic oligonucleotide
acaatgcatcgtagcgggtctcggagctcgccttaa

SEQ ID NO: 1294 - DNA, 37 bp, Artificial Sequence
  Synthetic oligonucleotide
tacaaagaacggaagctattcaaaaacacacggagga

SEQ ID NO: 1295 - DNA, 35 bp, Artificial Sequence
  Synthetic oligonucleotide
ggacgaccggatatagtaaagtccccggcttctgt

SEQ ID NO: 1296 - DNA, 37 bp, Artificial Sequence
  Synthetic oligonucleotide
agccatcatgttggcacggtcctttgataccattgga

SEQ ID NO: 1297 - DNA, 36 bp, Artificial Sequence
  Synthetic oligonucleotide
attaccgtcaacgggtcctgggctccatacgaggca

SEQ ID NO: 1298 - DNA, 35 bp, Artificial Sequence
  Synthetic oligonucleotide
ctgctttaggtgtggtcgcactcaaatgtgaatgg

SEQ ID NO: 1299 - DNA, 36 bp, Artificial Sequence
  Synthetic oligonucleotide
gcggggtaagaactcgatgaggtgagtggatttgta

SEQ ID NO: 1300 - DNA, 35 bp, Artificial Sequence
  Synthetic oligonucleotide
aagggattggaacttggatgttttcagttggcgca

SEQ ID NO: 1301 - DNA, 38 bp, Artificial Sequence
  Synthetic oligonucleotide
tgcctcggctagcatcacaatagatggtttgcacttga

SEQ ID NO: 1302 - DNA, 38 bp, Artificial Sequence
  Synthetic oligonucleotide
gagacgaaggcaccttttcgacgcgataagctcgttga

SEQ ID NO: 1303 - DNA, 36 bp, Artificial Sequence
  Synthetic oligonucleotide
accgcgaggtcttttggaacagggcatatgaatcca

SEQ ID NO: 1304 - DNA, 37 bp, Artificial Sequence
  Synthetic oligonucleotide
acgtgaaactaccgagcggtgcttttcgctgtagcga

SEQ ID NO: 1305 - DNA, 37 bp, Artificial Sequence
  Synthetic oligonucleotide
caacgcctgactactgtagagtgaacgctggtggtga

SEQ ID NO: 1306 - DNA, 38 bp, Artificial Sequence
  Synthetic oligonucleotide
gcgaaggtttgggtaaaaggaaatagactttgttgtga

SEQ ID NO: 1307 - DNA, 36 bp, Artificial Sequence
  Synthetic oligonucleotide
acaagtcgctgctcagcttcctagggcagtactcaa

SEQ ID NO: 1308 - DNA, 36 bp, Artificial Sequence
  Synthetic oligonucleotide
aaacgggatctgtcgcgagtacagtgttgcccagta

SEQ ID NO: 1309 - DNA, 36 bp, Artificial Sequence
  Synthetic oligonucleotide
taaaggaacagcgattcgggctgttattttaggtga

SEQ ID NO: 1310 - DNA, 36 bp, Artificial Sequence
  Synthetic oligonucleotide
tgtgggattattgtagttgtagtaaggtgaccggca

SEQ ID NO: 1311 - DNA, 36 bp, Artificial Sequence
  Synthetic oligonucleotide
cgctaaccggaactaggttgcaaagctatggtggta

SEQ ID NO: 1312 - DNA, 36 bp, Artificial Sequence
  Synthetic oligonucleotide
cccttaggttccagtgaagttatgcaacttcatgta

SEQ ID NO: 1313 - DNA, 37 bp, Artificial Sequence
  Synthetic oligonucleotide
ctattccagcttttttgatcccgcttttgagagttga

SEQ ID NO: 1314 - DNA, 38 bp, Artificial Sequence
  Synthetic oligonucleotide
acaggacgtgcgcgctaacgttctattagttgtgctga

SEQ ID NO: 1315 - DNA, 36 bp, Artificial Sequence
  Synthetic oligonucleotide
gagtttcgttttatgtgttggctttatttccctcga

SEQ ID NO: 1316 - DNA, 36 bp, Artificial Sequence
  Synthetic oligonucleotide
tggcgttgtagccacgtccctccgctagtagagaaa

SEQ ID NO: 1317 - DNA, 35 bp, Artificial Sequence
  Synthetic oligonucleotide
tcgtagtactggtcttaatttgttgtagtcctaag

SEQ ID NO: 1318 - DNA, 36 bp, Artificial Sequence
  Synthetic oligonucleotide
tccacacgcggcgagctacgcgactaaaatcacgta

SEQ ID NO: 1319 - DNA, 38 bp, Artificial Sequence
  Synthetic oligonucleotide
tatcaaattcggtcgtagtatttgtcgccgtaacgtga

SEQ ID NO: 1320 - DNA, 36 bp, Artificial Sequence
  Synthetic oligonucleotide
gctacgaagtccaaacgtacgcacctgtttggagta

SEQ ID NO: 1321 - DNA, 35 bp, Artificial Sequence
  Synthetic oligonucleotide
tccgggcaccatatctccactgtgcgaatcactat

SEQ ID NO: 1322 - DNA, 35 bp, Artificial Sequence
  Synthetic oligonucleotide
tccgggcaccatatctccactgtgcgaatcactct

SEQ ID NO: 1323 - DNA, 38 bp, Artificial Sequence; identical to SEQ ID NO: 1314
  Synthetic oligonucleotide

SEQ ID NO: 1324 - DNA, 36 bp, Artificial Sequence
  Synthetic oligonucleotide
agcaaacgatgggccatcattcacgcttggtattaa

SEQ ID NO: 1325 - DNA, 38 bp, Artificial Sequence
  Synthetic oligonucleotide
agggacgtgatatttcaatgctgaatatacacacctga

SEQ ID NO: 1326 - DNA, 37 bp, Artificial Sequence
  Synthetic oligonucleotide
agtgattctcacttgttcccggggttcaaagatctga

SEQ ID NO: 1327 - DNA, 36 bp, Artificial Sequence
  Synthetic oligonucleotide
atcaagggaggatttttcggtcggcctagggacaca

SEQ ID NO: 1328 - DNA, 35 bp, Artificial Sequence
  Synthetic oligonucleotide
atacgcggcctaataataagatcgtcataccccaa

SEQ ID NO: 1329 - DNA, 35 bp, Artificial Sequence
  Synthetic oligonucleotide
atctcacgataaagctaacggtgagagtatctact

SEQ ID NO: 1330 - DNA, 37 bp, Artificial Sequence
  Synthetic oligonucleotide
ccgccggcgatgggggatcgcttattttattgttcga

SEQ ID NO: 1331 - DNA, 36 bp, Artificial Sequence
  Synthetic oligonucleotide
cgggtacgttggatcgacaccgaccatcttgacgta

SEQ ID NO: 1332 - DNA, 36 bp, Artificial Sequence; identical to SEQ ID NO: 1311
  Synthetic oligonucleotide

SEQ ID NO: 1333 - DNA, 38 bp, Artificial Sequence
  Synthetic oligonucleotide
cgagtgctgcgcgggttccttggggtgctccaatttga

SEQ ID NO: 1334 - DNA, 35 bp, Artificial Sequence
  Synthetic oligonucleotide
cgtgtaacccgcccaattccatcgtcacgaaattt

SEQ ID NO: 1335 - DNA, 37 bp, Artificial Sequence; identical to SEQ ID NO: 1313
  Synthetic oligonucleotide

SEQ ID NO: 1336 - DNA, 38 bp, Artificial Sequence
  Synthetic oligonucleotide
cctcgaacctgcgcgggagaaggcgcttgctaatctga

SEQ ID NO: 1337 - DNA, 38 bp, Artificial Sequence
  Synthetic oligonucleotide
cttggtccctgctcggttgaatgacgcaatgagtgtga

SEQ ID NO: 1338 - DNA, 38 bp, Artificial Sequence
  Synthetic oligonucleotide
ctcgtaggactgaggtcgatagttatttcacaccgtga

SEQ ID NO: 1339 - DNA, 38 bp, Artificial Sequence
  Synthetic oligonucleotide
gacacgacgtatctccttattccctgctataagtttga

SEQ ID NO: 1340 - DNA, 36 bp, Artificial Sequence
  Synthetic oligonucleotide
gacgttcttgcaccgcgaggtctgcagcaattctaa

SEQ ID NO: 1341 - DNA, 35 bp, Artificial Sequence
  Synthetic oligonucleotide
gcaactattgggccgtattcgtccacggggcttgt

SEQ ID NO: 1342 - DNA, 38 bp, Artificial Sequence
  Synthetic oligonucleotide
gcgtagggttggttatgcatcaattttccgctaattga

SEQ ID NO: 1343 - DNA, 36 bp, Artificial Sequence
  Synthetic oligonucleotide
gccttcggggtttattaagttattacggatctagta

SEQ ID NO: 1344 - DNA, 37 bp, Artificial Sequence
  Synthetic oligonucleotide
gcgcgtgagctgcaccgacatcacgccgattctctga

SEQ ID NO: 1345 - DNA, 36 bp, Artificial Sequence; identical to SEQ ID NO: 1320
  Synthetic oligonucleotide

SEQ ID NO: 1346 - DNA, 36 bp, Artificial Sequence
  Synthetic oligonucleotide
ggtcactcgtaggtctcccgcatcgagaaagccgta

SEQ ID NO: 1347 - DNA, 38 bp, Artificial Sequence
  Synthetic oligonucleotide
gtggatggcactaatatccccttctcgttaaagtgtga

SEQ ID NO: 1348 - DNA, 35 bp, Artificial Sequence
  Synthetic oligonucleotide
gtccaccgggattcgtatgggtatttttacccacc

SEQ ID NO: 1349 - DNA, 38 bp, Artificial Sequence
  Synthetic oligonucleotide
gttacggtatgcgaggtctcacgttgcgatcattttga

SEQ ID NO: 1350 - DNA, 37 bp, Artificial Sequence
  Synthetic oligonucleotide
gttcatcgttcctatgtcactatttccctactgctga

SEQ ID NO: 1351 - DNA, 37 bp, Artificial Sequence
  Synthetic oligonucleotide
tactaggggccgtgagccttgtgccccaagtagccga

SEQ ID NO: 1352 - DNA, 38 bp, Artificial Sequence; identical to SEQ ID NO: 1319
  Synthetic oligonucleotide

SEQ ID NO: 1353 - DNA, 36 bp, Artificial Sequence; identical to SEQ ID NO: 1318
  Synthetic oligonucleotide

SEQ ID NO: 1354 - DNA, 35 bp, Artificial Sequence; identical to SEQ ID NO: 1317
  Synthetic oligonucleotide

SEQ ID NO: 1355 - DNA, 37 bp, Artificial Sequence
  Synthetic oligonucleotide
tcgtgcgctcggttctacgccactgtacgagacacga

SEQ ID NO: 1356 - DNA, 35 bp, Artificial Sequence
  Synthetic oligonucleotide
tgtacgaaccgggcctaggatagttgctacatgta

SEQ ID NO: 1357 - DNA, 36 bp, Artificial Sequence
  Synthetic oligonucleotide
ataatgccagatctttggtttatcttgcgcttggta

SEQ ID NO: 1358 - DNA, 37 bp, Artificial Sequence
  Synthetic oligonucleotide
ccattagctgagtttcggtggacgcatgatagtttga

SEQ ID NO: 1359 - DNA, 35 bp, Artificial Sequence
  Synthetic oligonucleotide
actccatgggccccccggtttggaccccgggttta

SEQ ID NO: 1360 - DNA, 36 bp, Artificial Sequence
  Synthetic oligonucleotide
gaaaatctggcgacttagttttcgtttgatccctta

SEQ ID NO: 1361 - DNA, 36 bp, Artificial Sequence
  Synthetic oligonucleotide
agctcatggacgcactggtggcagtgcgactactaa

SEQ ID NO: 1362 - DNA, 35 bp, Artificial Sequence
  Synthetic oligonucleotide
aggataactggtttttatctctgctaattcactcg

SEQ ID NO: 1363 - DNA, 38 bp, Artificial Sequence
  Synthetic oligonucleotide
cgtggcctgtttggagacgtactgtgtcaggcatttga

SEQ ID NO: 1364 - DNA, 36 bp, Artificial Sequence
  Synthetic oligonucleotide
accttgggatcctgtttagaccgaatcggtgcgcta

SEQ ID NO: 1365 - DNA, 35 bp, Artificial Sequence
  Synthetic oligonucleotide
atcgtagtcatagacccggctttggtttccgggta

SEQ ID NO: 1366 - DNA, 37 bp, Artificial Sequence
  Synthetic oligonucleotide
gacctgggctgtctttactttgtttcgcggggctgga

SEQ ID NO: 1367 - DNA, 38 bp, Artificial Sequence
  Synthetic oligonucleotide
ccttgagccgccgggtttcggtccttattcgtgaatga

SEQ ID NO: 1368 - DNA, 35 bp, Artificial Sequence
  Synthetic oligonucleotide
agatcttttcggttattggggggaaccgagacgta

SEQ ID NO: 1369 - DNA, 36 bp, Artificial Sequence
  Synthetic oligonucleotide
gtgcgttggttaccgatggaggggacccgtagacta

SEQ ID NO: 1370 - DNA, 35 bp, Artificial Sequence
  Synthetic oligonucleotide
ttttattggctcgtttcctataatatgttgaatcc

SEQ ID NO: 1371 - DNA, 35 bp, Artificial Sequence
  Synthetic oligonucleotide
gcctcgacgacagtgacctacatcgctcgtttcgt

SEQ ID NO: 1372 - DNA, 38 bp, Artificial Sequence
  Synthetic oligonucleotide
ggtctggggggattcctacggttccaacagcataatga

SEQ ID NO: 1373 - DNA, 36 bp, Artificial Sequence
  Synthetic oligonucleotide
gttgccttgtaccccatagctggtaaggtcctagta

SEQ ID NO: 1374 - DNA, 36 bp, Artificial Sequence
  Synthetic oligonucleotide
gttgttcgggcgtcgcaacacggtcccattgtctta

SEQ ID NO: 1375 - DNA, 36 bp, Artificial Sequence
  Synthetic oligonucleotide
tcgttatagcctatatacacgcggttgactcgctga

SEQ ID NO: 1376 - DNA, 35 bp, Artificial Sequence
  Synthetic oligonucleotide
ttgtagctgctattgttttctcgattgagaactta

SEQ ID NO: 1377 - DNA, 35 bp, Artificial Sequence
  Synthetic oligonucleotide
ggctcttggtttagcccttattgtttatcattcat

SEQ ID NO: 1378 - DNA, 35 bp, Artificial Sequence
  Synthetic oligonucleotide
taattggcccgtttccaaatttatagattcctaca

SEQ ID NO: 1379 - DNA, 38 bp, Artificial Sequence
  Synthetic oligonucleotide
tccgacccatatcgacgatactggcgtggcgctactga

SEQ ID NO: 1380 - DNA, 38 bp, Artificial Sequence
  Synthetic oligonucleotide
tgcgtgagtaacgcacaggggaacactccgttttgtga

SEQ ID NO: 1381 - DNA, 36 bp, Artificial Sequence
  Synthetic oligonucleotide
gctggtatagctgggtttctatcgtttattctcgta

SEQ ID NO: 1382 - DNA, 36 bp, Artificial Sequence
  Synthetic oligonucleotide
tttgcttcatttgcacttcccccgttattccgctca

SEQ ID NO: 1383 - DNA, 38 bp, Artificial Sequence
  Synthetic oligonucleotide
aatttttactgcgtggaaaggattcgggaatttgttga

SEQ ID NO: 1384 - DNA, 36 bp, Artificial Sequence; identical to SEQ ID NO: 1364
  Synthetic oligonucleotide

SEQ ID NO: 1385 - DNA, 35 bp, Artificial Sequence; identical to SEQ ID NO: 1362
  Synthetic oligonucleotide

SEQ ID NO: 1386 - DNA, 36 bp, Artificial Sequence; identical to SEQ ID NO: 1361
  Synthetic oligonucleotide

SEQ ID NO: 1387 - DNA, 36 bp, Artificial Sequence
  Synthetic oligonucleotide
aggagtacgcgttcatccagacacggaatactttga

SEQ ID NO: 1388 - DNA, 36 bp, Artificial Sequence
  Synthetic oligonucleotide
agccttacgccatgccgagagagcgctttgtttcga

SEQ ID NO: 1389 - DNA, 35 bp, Artificial Sequence
  Synthetic oligonucleotide
agggcttagtttcctgattttactacagctcgctc

SEQ ID NO: 1390 - DNA, 36 bp, Artificial Sequence; identical to SEQ ID NO: 1357
  Synthetic oligonucleotide

SEQ ID NO: 1391 - DNA, 35 bp, Artificial Sequence
  Synthetic oligonucleotide
agtcctgatgctcaatgcgcgagtttcattgagct

SEQ ID NO: 1392 - DNA, 35 bp, Artificial Sequence; identical to SEQ ID NO: 1365
  Synthetic oligonucleotide

SEQ ID NO: 1393 - DNA, 37 bp, Artificial Sequence; identical to SEQ ID NO: 1358
  Synthetic oligonucleotide

SEQ ID NO: 1394 - DNA, 35 bp, Artificial Sequence
  Synthetic oligonucleotide
cgtaagccggtttcagcccacctggagattcttca

SEQ ID NO: 1395 - DNA, 38 bp, Artificial Sequence; identical to SEQ ID NO: 1367
  Synthetic oligonucleotide

SEQ ID NO: 1396 - DNA, 36 bp, Artificial Sequence
  Synthetic oligonucleotide
cgtagttactcgtcatggggtctttgttatgtggta

SEQ ID NO: 1397 - DNA, 36 bp, Artificial Sequence; identical to SEQ ID NO: 1360
  Synthetic oligonucleotide

SEQ ID NO: 1398 - DNA, 37 bp, Artificial Sequence; identical to SEQ ID NO: 1366
  Synthetic oligonucleotide

SEQ ID NO: 1399 - DNA, 37 bp, Artificial Sequence
  Synthetic oligonucleotide
gagtccccttctttgatgctggggtgagctcctccga

SEQ ID NO: 1400 - DNA, 37 bp, Artificial Sequence
  Synthetic oligonucleotide
gatgatcgcgcctttcgtttgtgacggttaccaggga

SEQ ID NO: 1401 - DNA, 35 bp, Artificial Sequence; identical to SEQ ID NO: 1371
  Synthetic oligonucleotide

SEQ ID NO: 1402 - DNA, 38 bp, Artificial Sequence
  Synthetic oligonucleotide
ggcccccgctccctagtttgagcgccctccacgattga

SEQ ID NO: 1403 - DNA, 35 bp, Artificial Sequence; identical to SEQ ID NO: 1377
  Synthetic oligonucleotide

SEQ ID NO: 1404 - DNA, 38 bp, Artificial Sequence; identical to SEQ ID NO: 1372
  Synthetic oligonucleotide

SEQ ID NO: 1405 - DNA, 36 bp, Artificial Sequence; identical to SEQ ID NO: 1373
  Synthetic oligonucleotide

SEQ ID NO: 1406 - DNA, 36 bp, Artificial Sequence; identical to SEQ ID NO: 1374
  Synthetic oligonucleotide

SEQ ID NO: 1407 - DNA, 38 bp, Artificial Sequence
  Synthetic oligonucleotide
tactggggaagctccgggcgcttggtttcgccacctga

SEQ ID NO: 1408 - DNA, 35 bp, Artificial Sequence
  Synthetic oligonucleotide
tcatttcggactgttctaacgcgagttatgaaggg

SEQ ID NO: 1409 - DNA, 36 bp, Artificial Sequence
  Synthetic oligonucleotide
tcacccgacggcaacaagggcatttgcttcatagta

SEQ ID NO: 1410 - DNA, 37 bp, Artificial Sequence
  Synthetic oligonucleotide
tcgaggggaattgtccacatgcatggtttcataagga

SEQ ID NO: 1411 - DNA, 38 bp, Artificial Sequence; identical to SEQ ID NO: 1379
  Synthetic oligonucleotide

SEQ ID NO: 1412 - DNA, 38 bp, Artificial Sequence; identical to SEQ ID NO: 1380
  Synthetic oligonucleotide

SEQ ID NO: 1413 - DNA, 38 bp, Artificial Sequence
  Synthetic oligonucleotide
tgttcttactaggcttagcagcctgttcccgttattga

SEQ ID NO: 1414 - DNA, 37 bp, Artificial Sequence
  Synthetic oligonucleotide
tgttttcagaccagagtaggaattccgagggcggtta

SEQ ID NO: 1415 - DNA, 35 bp, Artificial Sequence
  Synthetic oligonucleotide
tgttttgctgcttagagcgtaatcgtattggctct

SEQ ID NO: 1416 - DNA, 37 bp, Artificial Sequence
  Synthetic oligonucleotide
ttcctaggatgaaacagaaacaccgattggtccagga

SEQ ID NO: 1417 - DNA, 37 bp, Artificial Sequence
  Synthetic oligonucleotide
ttccggttttgggcgactccgtttgcgcccacgctga

SEQ ID NO: 1418 - DNA, 35 bp, Artificial Sequence
  Synthetic oligonucleotide
tttgcaagttcgctacgtatatccactgtgaagcc

SEQ ID NO: 1419 - DNA, 35 bp, Artificial Sequence; identical to SEQ ID NO: 1376
  Synthetic oligonucleotide

SEQ ID NO: 1420 - DNA, 37 bp, Artificial Sequence
  Synthetic oligonucleotide
ttttgttaaacaacgccggcaagggtcgttgttacga

SEQ ID NO: 1421 - DNA, 37 bp, Artificial Sequence
  Synthetic oligonucleotide
ttttcgcattaaaaacgggtgtccaccggttggtgga

SEQ ID NO: 1422 - DNA, 36 bp, Artificial Sequence
  Synthetic oligonucleotide
cgcgcgagcaactacactaacggaaaacccgttcaa

SEQ ID NO: 1423 - DNA, 36 bp, Artificial Sequence
  Synthetic oligonucleotide
ctactcgccgcaacccaacactcagtcaaacgatca

SEQ ID NO: 1424 - DNA, 38 bp, Artificial Sequence
  Synthetic oligonucleotide
ataacgcacgtttccataactcataccactggccttga

SEQ ID NO: 1425 - DNA, 35 bp, Artificial Sequence
  Synthetic oligonucleotide
gagagaagtatttgttaagccacatagttttcttg

SEQ ID NO: 1426 - DNA, 36 bp, Artificial Sequence
  Synthetic oligonucleotide
ccttactgcatggtttggtaccgctattgtccccca

SEQ ID NO: 1427 - DNA, 37 bp, Artificial Sequence
  Synthetic oligonucleotide
aaaattatgcgccttagggaagacatacggcctgtga

SEQ ID NO: 1428 - DNA, 37 bp, Artificial Sequence
  Synthetic oligonucleotide
aatgatcggacttgcaggctcaaccctactgatggga

SEQ ID NO: 1429 - DNA, 35 bp, Artificial Sequence
  Synthetic oligonucleotide
aaggcacgtacacactatcacctggggtgtgcctc

SEQ ID NO: 1430 - DNA, 35 bp, Artificial Sequence
  Synthetic oligonucleotide
aatagattaaagtgaacgtgagtgtttccatatta

SEQ ID NO: 1431 - DNA, 38 bp, Artificial Sequence
  Synthetic oligonucleotide
aattcgtcactcgttgtgtgtagccggtgcccaattga

SEQ ID NO: 1432 - DNA, 36 bp, Artificial Sequence
  Synthetic oligonucleotide
acgggagatcctttaagtacgtcgaagccagcaata

SEQ ID NO: 1433 - DNA, 37 bp, Artificial Sequence
  Synthetic oligonucleotide
actccgttacgtgttggcgctttcagttcagcacgga

SEQ ID NO: 1434 - DNA, 35 bp, Artificial Sequence
  Synthetic oligonucleotide
agacagtggacttctcgtcgaaaatgcatctctat

SEQ ID NO: 1435 - DNA, 37 bp, Artificial Sequence
  Synthetic oligonucleotide
agagaacgttgcccttgagtgtttcttgagccttgga

SEQ ID NO: 1436 - DNA, 36 bp, Artificial Sequence
  Synthetic oligonucleotide
agcgtgtatcatcactgatttagttatcccgagcta

SEQ ID NO: 1437 - DNA, 36 bp, Artificial Sequence
  Synthetic oligonucleotide
agaggccagcttagtgtggccaccgtgagtttacta

SEQ ID NO: 1438 - DNA, 35 bp, Artificial Sequence
  Synthetic oligonucleotide
atatgtatacgaaccctcctaatcgcactatcagt

SEQ ID NO: 1439 - DNA, 38 bp, Artificial Sequence; identical to SEQ ID NO: 1424
  Synthetic oligonucleotide

SEQ ID NO: 1440 - DNA, 36 bp, Artificial Sequence
  Synthetic oligonucleotide
agtacctatcaaggattttgccgaatccgtgccgca

SEQ ID NO: 1441 - DNA, 35 bp, Artificial Sequence
  Synthetic oligonucleotide
agttcactctaacttccgtgccgaaggcgttatcc

SEQ ID NO: 1442 - DNA, 35 bp, Artificial Sequence
  Synthetic oligonucleotide
cacatcgactgcgcgatcaatattagggtggacat

SEQ ID NO: 1443 - DNA, 35 bp, Artificial Sequence
  Synthetic oligonucleotide
attgcattcttcaggacgcttcgcccgggattctt

SEQ ID NO: 1444 - DNA, 35 bp, Artificial Sequence
  Synthetic oligonucleotide
catccctgacgcgagttggaacatgagtacgtact

SEQ ID NO: 1445 - DNA, 36 bp, Artificial Sequence
  Synthetic oligonucleotide
caccgcttagtcttatttagggtcgctaatctggta

SEQ ID NO: 1446 - DNA, 36 bp, Artificial Sequence
  Synthetic oligonucleotide
caaaccgctgcaaaaggatccccgttatggctacat

SEQ ID NO: 1447 - DNA, 38 bp, Artificial Sequence
  Synthetic oligonucleotide
ccggaccattaggtcttcttgttcaaatactttgatga

SEQ ID NO: 1448 - DNA, 36 bp, Artificial Sequence
  Synthetic oligonucleotide
ccgagcttcgtttgggttcatttcgtccgattcgca

SEQ ID NO: 1449 - DNA, 38 bp, Artificial Sequence
  Synthetic oligonucleotide
cctcctattacagttccccgggaatgaatagcaactga

SEQ ID NO: 1450 - DNA, 38 bp, Artificial Sequence
  Synthetic oligonucleotide
cgcctataccgcactcgcttggaacgacacaaagctga

SEQ ID NO: 1451 - DNA, 38 bp, Artificial Sequence
  Synthetic oligonucleotide
cgtggattcgcccacatgatgatggccggtatgtttga

SEQ ID NO: 1452 - DNA, 37 bp, Artificial Sequence
  Synthetic oligonucleotide
ccttttgtaggacgccctttctgcgcatccggtagga

SEQ ID NO: 1453 - DNA, 37 bp, Artificial Sequence
  Synthetic oligonucleotide
ccttaactacacgagagcatgtcaaggggtaaatgga

SEQ ID NO: 1454 - DNA, 36 bp, Artificial Sequence; identical to SEQ ID NO: 1423
  Synthetic oligonucleotide

SEQ ID NO: 1455 - DNA, 38 bp, Artificial Sequence; identical to SEQ ID NO: 1333
  Synthetic oligonucleotide

SEQ ID NO: 1456 - DNA, 36 bp, Artificial Sequence
  Synthetic oligonucleotide
cggagtacgaagccgcttagattacctagcccgtta

SEQ ID NO: 1457 - DNA, 37 bp, Artificial Sequence
  Synthetic oligonucleotide
cgagcgacgtttgtttcaaaaatcactgggaatatga

SEQ ID NO: 1458 - DNA, 35 bp, Artificial Sequence
  Synthetic oligonucleotide
ctacatcgctctccgtaatcgggcgattcatttca

SEQ ID NO: 1459 - DNA, 38 bp, Artificial Sequence
  Synthetic oligonucleotide
gaaaacgttggaagtttttacgccgctctcagccgtga

SEQ ID NO: 1460 - DNA, 35 bp, Artificial Sequence
  Synthetic oligonucleotide
gaatttatgcaatccattaggaaaatgggtgtgcg

SEQ ID NO: 1461 - DNA, 36 bp, Artificial Sequence
  Synthetic oligonucleotide
ctgacagtcttccctggtctattgtccgcagatcga

SEQ ID NO: 1462 - DNA, 38 bp, Artificial Sequence; identical to SEQ ID NO: 1337
  Synthetic oligonucleotide

SEQ ID NO: 1463 - DNA, 36 bp, Artificial Sequence
  Synthetic oligonucleotide
gagggactgcacagcggtgatattctaaatgtacga

SEQ ID NO: 1464 - DNA, 38 bp, Artificial Sequence
  Synthetic oligonucleotide
gaccgggtaggcttctaggcgcccccctccttacttga

SEQ ID NO: 1465 - DNA, 35 bp, Artificial Sequence
  Synthetic oligonucleotide
gaccaaagtatgtgtggtattgatatgccgtgaac

SEQ ID NO: 1466 - DNA, 36 bp, Artificial Sequence
  Synthetic oligonucleotide
gagaaccgtgctcaaggcagaattgtcaccgctcga

SEQ ID NO: 1467 - DNA, 38 bp, Artificial Sequence
  Synthetic oligonucleotide
gacgagtgacttgcactacgaaggccctcgtcgcctga

SEQ ID NO: 1468 - DNA, 37 bp, Artificial Sequence
  Synthetic oligonucleotide
gagtttgtcttgccccgggtcgggacgttgtatccta

SEQ ID NO: 1469 - DNA, 35 bp, Artificial Sequence
  Synthetic oligonucleotide
gagtggcttactttcattggatccgtgagccttgc

SEQ ID NO: 1470 - DNA, 37 bp, Artificial Sequence
  Synthetic oligonucleotide
gcaatacgctagataggcttagaaacggaatacacga

SEQ ID NO: 1471 - DNA, 35 bp, Artificial Sequence
  Synthetic oligonucleotide
gatgtcgtcacggaagtacatatggcgctgtagcc

SEQ ID NO: 1472 - DNA, 35 bp, Artificial Sequence
  Synthetic oligonucleotide
gccactggatttaactgcatcccgtctctgaggct

SEQ ID NO: 1473 - DNA, 35 bp, Artificial Sequence; identical to SEQ ID NO: 1341
  Synthetic oligonucleotide

SEQ ID NO: 1474 - DNA, 37 bp, Artificial Sequence
  Synthetic oligonucleotide
gcaatatgggatatgtgtaactcagtgagacaggaga

SEQ ID NO: 1475 - DNA, 37 bp, Artificial Sequence
  Synthetic oligonucleotide
gattacataactcgtacgtcgcttgttttaagtttga

SEQ ID NO: 1476 - DNA, 37 bp, Artificial Sequence
  Synthetic oligonucleotide
gcgtgctgctttgtactacggtctcatcgttgtagga

SEQ ID NO: 1477 - DNA, 35 bp, Artificial Sequence
  Synthetic oligonucleotide
gccctggcaccaaagtcgcacaatcaatcgtgtgc

SEQ ID NO: 1478 - DNA, 36 bp, Artificial Sequence
  Synthetic oligonucleotide
gccgttggtattctgtcgtcttcctttgttctatca

SEQ ID NO: 1479 - DNA, 37 bp, Artificial Sequence
  Synthetic oligonucleotide
ggcactgtgctgcgatcaggaaaagtcacataccgga

SEQ ID NO: 1480 - DNA, 38 bp, Artificial Sequence
  Synthetic oligonucleotide
ggcccttgaattaacatgatgaatatcacaacgggtga

SEQ ID NO: 1481 - DNA, 36 bp, Artificial Sequence
  Synthetic oligonucleotide
gggtgtttcctgcttatgactacttttctttacgca

SEQ ID NO: 1482 - DNA, 35 bp, Artificial Sequence
  Synthetic oligonucleotide
ggctcgtattttcccagtatcgtttccggtacgtc

SEQ ID NO: 1483 - DNA, 35 bp, Artificial Sequence
  Synthetic oligonucleotide
ggggatctcgggcgatgaagcctagctattgtact

SEQ ID NO: 1484 - DNA, 35 bp, Artificial Sequence
  Synthetic oligonucleotide
ggtcccgtattccagatatactaacggttaccacc

SEQ ID NO: 1485 - DNA, 37 bp, Artificial Sequence
  Synthetic oligonucleotide
gtactgtccgtgtgaacgggtctctgcagaaattcga

SEQ ID NO: 1486 - DNA, 38 bp, Artificial Sequence
  Synthetic oligonucleotide
gtgatcggtactgttgaacttgttgcaccgcccgctga

SEQ ID NO: 1487 - DNA, 38 bp, Artificial Sequence
  Synthetic oligonucleotide
gtgtcacatggggtgaccggattgaggagaggatatga

SEQ ID NO: 1488 - DNA, 37 bp, Artificial Sequence
  Synthetic oligonucleotide
gtgtcctttctgggttgatgcatttacggtttggtga

SEQ ID NO: 1489 - DNA, 37 bp, Artificial Sequence
  Synthetic oligonucleotide
gttcggttggttcccgcgctgaacaatattacctgga

SEQ ID NO: 1490 - DNA, 36 bp, Artificial Sequence
  Synthetic oligonucleotide
gttgggacccgattaacccaacagaattcggaataa

SEQ ID NO: 1491 - DNA, 36 bp, Artificial Sequence
  Synthetic oligonucleotide
tacctgagcgctggagctcgttagtcggaataggaa

SEQ ID NO: 1492 - DNA, 35 bp, Artificial Sequence
  Synthetic oligonucleotide
tacccgttcaccggataggatgttcgtccttaatt

SEQ ID NO: 1493 - DNA, 38 bp, Artificial Sequence
  Synthetic oligonucleotide
taccgatcaacccagcaaggcttgggtggattgaatga

SEQ ID NO: 1494 - DNA, 36 bp, Artificial Sequence
  Synthetic oligonucleotide
tccccccgtcgcttacggtgttggacgggctcatta

SEQ ID NO: 1495 - DNA, 36 bp, Artificial Sequence
  Synthetic oligonucleotide
tcttcataaatgactaacgcttcttagtgatgttga

SEQ ID NO: 1496 - DNA, 36 bp, Artificial Sequence
  Synthetic oligonucleotide
tgccatacctacccagagtgagacttctagcctgga

SEQ ID NO: 1497 - DNA, 38 bp, Artificial Sequence
  Synthetic oligonucleotide
tgaggtcccttttgtcggggtatatccatgaggtttga

SEQ ID NO: 1498 - DNA, 37 bp, Artificial Sequence
  Synthetic oligonucleotide
tggcttggcccgttcgttcgtgatcaagattttttga

SEQ ID NO: 1499 - DNA, 38 bp, Artificial Sequence
  Synthetic oligonucleotide
tggtctgaaattcccgtgaggagatagatcatttctga

SEQ ID NO: 1500 - DNA, 35 bp, Artificial Sequence
  Synthetic oligonucleotide
tgtccaaatcactcattctcgtaaggttaccgtcc

SEQ ID NO: 1501 - DNA, 36 bp, Artificial Sequence
  Synthetic oligonucleotide
tgttctgtcttatgccatgaagttcttataagtaga

SEQ ID NO: 1502 - DNA, 38 bp, Artificial Sequence
  Synthetic oligonucleotide
ttacccctgtaatgccctacatgatgttcggttcatga

SEQ ID NO: 1503 - DNA, 35 bp, Artificial Sequence
  Synthetic oligonucleotide
ttgtaccagtgcgtatgttgtctcatcaatgtttt

SEQ ID NO: 1504 - DNA, 37 bp, Artificial Sequence
  Synthetic oligonucleotide
ttttagcaacgggagttgcagcggggttgttaaacga

SEQ ID NO: 1505 - DNA, 35 bp, Artificial Sequence; identical to SEQ ID NO: 1362
  Synthetic oligonucleotide

SEQ ID NO: 1506 - DNA, 36 bp, Artificial Sequence; identical to SEQ ID NO: 1357
  Synthetic oligonucleotide

SEQ ID NO: 1507 - DNA, 36 bp, Artificial Sequence; identical to SEQ ID NO: 1360
  Synthetic oligonucleotide

SEQ ID NO: 1508 - DNA, 38 bp, Artificial Sequence; identical to SEQ ID NO: 1383
  Synthetic oligonucleotide

SEQ ID NO: 1509 - DNA, 35 bp, Artificial Sequence; identical to SEQ ID NO: 1365
  Synthetic oligonucleotide

SEQ ID NO: 1510 - DNA, 37 bp, Artificial Sequence; identical to SEQ ID NO: 1366
  Synthetic oligonucleotide

SEQ ID NO: 1511 - DNA, 35 bp, Artificial Sequence
  Synthetic oligonucleotide
attccgtgaggtacgtaaggcaaccagttttattt

SEQ ID NO: 1512 - DNA, 36 bp, Artificial Sequence; identical to SEQ ID NO: 1364
  Synthetic oligonucleotide

SEQ ID NO: 1513 - DNA, 37 bp, Artificial Sequence; identical to SEQ ID NO: 1358
  Synthetic oligonucleotide

SEQ ID NO: 1514 - DNA, 38 bp, Artificial Sequence; identical to SEQ ID NO: 1367
  Synthetic oligonucleotide

SEQ ID NO: 1515 - DNA, 35 bp, Artificial Sequence; identical to SEQ ID NO: 1371
  Synthetic oligonucleotide

SEQ ID NO: 1516 - DNA, 35 bp, Artificial Sequence; identical to SEQ ID NO: 1377
  Synthetic oligonucleotide

SEQ ID NO: 1517 - DNA, 38 bp, Artificial Sequence; identical to SEQ ID NO: 1379
  Synthetic oligonucleotide

SEQ ID NO: 1518 - DNA, 38 bp, Artificial Sequence; identical to SEQ ID NO: 1372
  Synthetic oligonucleotide

SEQ ID NO: 1519 - DNA, 35 bp, Artificial Sequence; identical to SEQ ID NO: 1376
  Synthetic oligonucleotide

SEQ ID NO: 1520 - DNA, 36 bp, Artificial Sequence; identical to SEQ ID NO: 1382
  Synthetic oligonucleotide

SEQ ID NO: 1521 - DNA, 36 bp, Artificial Sequence
  Synthetic oligonucleotide
tcttgtcgggattttgctcctttcatactcatggta

SEQ ID NO: 1522 - DNA, 36 bp, Artificial Sequence; identical to SEQ ID NO: 1369
  Synthetic oligonucleotide

SEQ ID NO: 1523 - DNA, 35 bp, Artificial Sequence; identical to SEQ ID NO: 1370
  Synthetic oligonucleotide

SEQ ID NO: 1524 - DNA, 36 bp, Artificial Sequence; identical to SEQ ID NO: 1374
  Synthetic oligonucleotide

SEQ ID NO: 1525 - DNA, 38 bp, Artificial Sequence; identical to SEQ ID NO: 1380
  Synthetic oligonucleotide

SEQ ID NO: 1526 - DNA, 36 bp, Artificial Sequence; identical to SEQ ID NO: 1364
  Synthetic oligonucleotide

SEQ ID NO: 1527 - DNA, 35 bp, Artificial Sequence; identical to SEQ ID NO: 1362
  Synthetic oligonucleotide

SEQ ID NO: 1528 - DNA, 36 bp, Artificial Sequence; identical to SEQ ID NO: 1361
  Synthetic oligonucleotide

SEQ ID NO: 1529 - DNA, 36 bp, Artificial Sequence; identical to SEQ ID NO: 1388
  Synthetic oligonucleotide

SEQ ID NO: 1530 - DNA, 36 bp, Artificial Sequence; identical to SEQ ID NO: 1387
  Synthetic oligonucleotide

SEQ ID NO: 1531 - DNA, 36 bp, Artificial Sequence; identical to SEQ ID NO: 1357
  Synthetic oligonucleotide

SEQ ID NO: 1532 - DNA, 35 bp, Artificial Sequence; identical to SEQ ID NO: 1391
  Synthetic oligonucleotide

SEQ ID NO: 1533 - DNA, 35 bp, Artificial Sequence; identical to SEQ ID NO: 1365
  Synthetic oligonucleotide

SEQ ID NO: 1534 - DNA, 37 bp, Artificial Sequence; identical to SEQ ID NO: 1358
  Synthetic oligonucleotide

SEQ ID NO: 1535 - DNA, 38 bp, Artificial Sequence; identical to SEQ ID NO: 1367
  Synthetic oligonucleotide

SEQ ID NO: 1536 - DNA, 36 bp, Artificial Sequence; identical to SEQ ID NO: 1360
  Synthetic oligonucleotide

SEQ ID NO: 1537 - DNA, 37 bp, Artificial Sequence; identical to SEQ ID NO: 1366
  Synthetic oligonucleotide

SEQ ID NO: 1538 - DNA, 37 bp, Artificial Sequence
  Synthetic oligonucleotide
gagcgactcatcccggggtttggatcagcgctccgga

SEQ ID NO: 1539 - DNA, 37 bp, Artificial Sequence; identical to SEQ ID NO: 1399
  Synthetic oligonucleotide

SEQ ID NO: 1540 - DNA, 36 bp, Artificial Sequence
  Synthetic oligonucleotide
ggtctcttggtttagatcccgtcttttctgtggaaa

SEQ ID NO: 1541 - DNA, 38 bp, Artificial Sequence; identical to SEQ ID NO: 1372
  Synthetic oligonucleotide

SEQ ID NO: 1542 - DNA, 35 bp, Artificial Sequence; identical to SEQ ID NO: 1377
  Synthetic oligonucleotide

SEQ ID NO: 1543 - DNA, 38 bp, Artificial Sequence
  Synthetic oligonucleotide
gtccaggctctatgcttagtacccgttcatttgcttga

SEQ ID NO: 1544 - DNA, 36 bp, Artificial Sequence; identical to SEQ ID NO: 1374
  Synthetic oligonucleotide

SEQ ID NO: 1545 - DNA, 38 bp, Artificial Sequence; identical to SEQ ID NO: 1407
  Synthetic oligonucleotide

SEQ ID NO: 1546 - DNA, 35 bp, Artificial Sequence; identical to SEQ ID NO: 1408
  Synthetic oligonucleotide

SEQ ID NO: 1547 - DNA, 36 bp, Artificial Sequence; identical to SEQ ID NO: 1409
  Synthetic oligonucleotide

SEQ ID NO: 1548 - DNA, 35 bp, Artificial Sequence
  Synthetic oligonucleotide
tcctagaaatctgtattgtttctcaaggccacctg

SEQ ID NO: 1549 - DNA, 37 bp, Artificial Sequence; identical to SEQ ID NO: 1410
  Synthetic oligonucleotide

SEQ ID NO: 1550 - DNA, 36 bp, Artificial Sequence; identical to SEQ ID NO: 1521
  Synthetic oligonucleotide

SEQ ID NO: 1551 - DNA, 38 bp, Artificial Sequence; identical to SEQ ID NO: 1380
  Synthetic oligonucleotide

SEQ ID NO: 1552 - DNA, 35 bp, Artificial Sequence
  Synthetic oligonucleotide
tgttttatctggatcacactagctattgtacggtt

SEQ ID NO: 1553 - DNA, 37 bp, Artificial Sequence; identical to SEQ ID NO: 1414
  Synthetic oligonucleotide

SEQ ID NO: 1554 - DNA, 37 bp, Artificial Sequence; identical to SEQ ID NO: 1416
  Synthetic oligonucleotide

SEQ ID NO: 1555 - DNA, 37 bp, Artificial Sequence; identical to SEQ ID NO: 1417
  Synthetic oligonucleotide

SEQ ID NO: 1556 - DNA, 35 bp, Artificial Sequence; identical to SEQ ID NO: 1418
  Synthetic oligonucleotide

SEQ ID NO: 1557 - DNA, 35 bp, Artificial Sequence; identical to SEQ ID NO: 1376
  Synthetic oligonucleotide

SEQ ID NO: 1558 - DNA, 37 bp, Artificial Sequence
  Synthetic oligonucleotide
tttgagcgcctcagtttgcgcgacttccagcccgtga

SEQ ID NO: 1559 - DNA, 37 bp, Artificial Sequence; identical to SEQ ID NO: 1420
  Synthetic oligonucleotide

SEQ ID NO: 1560 - DNA, 37 bp, Artificial Sequence; identical to SEQ ID NO: 1421
  Synthetic oligonucleotide

SEQ ID NO: 1561 - DNA, 36 bp, Artificial Sequence; identical to SEQ ID NO: 1423
  Synthetic oligonucleotide

SEQ ID NO: 1562 - DNA, 38 bp, Artificial Sequence; identical to SEQ ID NO: 1424
  Synthetic oligonucleotide

SEQ ID NO: 1563 - DNA, 38 bp, Artificial Sequence
  Synthetic oligonucleotide
atgctatcccgtgaaacgagaacatacggtttttttga

SEQ ID NO: 1564 - DNA, 35 bp, Artificial Sequence; identical to SEQ ID NO: 1425
  Synthetic oligonucleotide

SEQ ID NO: 1565 - DNA, 36 bp, Artificial Sequence; identical to SEQ ID NO: 1311
  Synthetic oligonucleotide

SEQ ID NO: 1566 - DNA, 36 bp, Artificial Sequence
  Synthetic oligonucleotide
agggcaatctgtcccgccctcagcttttttatttaa

SEQ ID NO: 1567 - DNA, 37 bp, Artificial Sequence; identical to SEQ ID NO: 1326
  Synthetic oligonucleotide

SEQ ID NO: 1568 - DNA, 38 bp, Artificial Sequence; identical to SEQ ID NO: 1314
  Synthetic oligonucleotide

SEQ ID NO: 1569 - DNA, 38 bp, Artificial Sequence
  Synthetic oligonucleotide
accgaaaacccgttcccgccgtactgcttctatattga

SEQ ID NO: 1570 - DNA, 36 bp, Artificial Sequence; identical to SEQ ID NO: 1320
  Synthetic oligonucleotide

SEQ ID NO: 1571 - DNA, 36 bp, Artificial Sequence; identical to SEQ ID NO: 1318
  Synthetic oligonucleotide

SEQ ID NO: 1572 - DNA, 35 bp, Artificial Sequence; identical to SEQ ID NO: 1321
  Synthetic oligonucleotide

SEQ ID NO: 1573 - DNA, 35 bp, Artificial Sequence; identical to SEQ ID NO: 1322
  Synthetic oligonucleotide

SEQ ID NO: 1574 - DNA, 35 bp, Artificial Sequence; identical to SEQ ID NO: 1317
  Synthetic oligonucleotide

SEQ ID NO: 1575 - DNA, 38 bp, Artificial Sequence
  Synthetic oligonucleotide
tttccgattattatgaccgcttttattattggaggtga

SEQ ID NO: 1576 - DNA, 38 bp, Artificial Sequence
  Synthetic oligonucleotide
tcttggacgtgcgtgatccccattttatatatgattga

SEQ ID NO: 1577 - DNA, 38 bp, Artificial Sequence; identical to SEQ ID NO: 1314
  Synthetic oligonucleotide

SEQ ID NO: 1578 - DNA, 36 bp, Artificial Sequence; identical to SEQ ID NO: 1324
  Synthetic oligonucleotide

SEQ ID NO: 1579 - DNA, 36 bp, Artificial Sequence; identical to SEQ ID NO: 1311
  Synthetic oligonucleotide

SEQ ID NO: 1580 - DNA, 37 bp, Artificial Sequence; identical to SEQ ID NO: 1313
  Synthetic oligonucleotide

SEQ ID NO: 1581 - DNA, 36 bp, Artificial Sequence; identical to SEQ ID NO: 1320
  Synthetic oligonucleotide

SEQ ID NO: 1582 - DNA, 35 bp, Artificial Sequence; identical to SEQ ID NO: 1322
  Synthetic oligonucleotide

SEQ ID NO: 1583 - DNA, 38 bp, Artificial Sequence; identical to SEQ ID NO: 1576
  Synthetic oligonucleotide

SEQ ID NO: 1584 - DNA, 35 bp, Artificial Sequence; identical to SEQ ID NO: 1317
  Synthetic oligonucleotide

SEQ ID NO: 1585 - DNA, 38 bp, Artificial Sequence
  Synthetic oligonucleotide
tgcccttagtttccgtatgaccactttgattcttttga

SEQ ID NO: 1586 - DNA, 38 bp, Artificial Sequence; identical to SEQ ID NO: 1575
  Synthetic oligonucleotide

SEQ ID NO: 1587 - DNA, 38 bp, Artificial Sequence
  Synthetic oligonucleotide
attcgcatagcctatgggaagggaattgtgaggggtga

SEQ ID NO: 1588 - DNA, 38 bp, Artificial Sequence
  Synthetic oligonucleotide
gaggttccctgtgggtcatgtcgcacgatttttagtga

SEQ ID NO: 1589 - DNA, 38 bp, Artificial Sequence; identical to SEQ ID NO: 1314
  Synthetic oligonucleotide

SEQ ID NO: 1590 - DNA, 38 bp, Artificial Sequence; identical to SEQ ID NO: 1319
  Synthetic oligonucleotide

SEQ ID NO: 1591 - DNA, 37 bp, Artificial Sequence
  Synthetic oligonucleotide
tgcccgcttttggtttatatggcttcttatctttcga

SEQ ID NO: 1592 - DNA, 38 bp, Artificial Sequence; identical to SEQ ID NO: 1575
  Synthetic oligonucleotide

SEQ ID NO: 1593 - DNA, 35 bp, Artificial Sequence; identical to SEQ ID NO: 1321
  Synthetic oligonucleotide

SEQ ID NO: 1594 - DNA, 38 bp, Artificial Sequence
  Synthetic oligonucleotide
aaacgtgggggcgtcccagccccatgtgttatctctga

SEQ ID NO: 1595 - DNA, 38 bp, Artificial Sequence
  Synthetic oligonucleotide
aaccctctcccatcctctcgaaacactagattacctga

SEQ ID NO: 1596 - DNA, 35 bp, Artificial Sequence
  Synthetic oligonucleotide
aacatacgtcccaagcgcatctcgattctatcttc

SEQ ID NO: 1597 - DNA, 37 bp, Artificial Sequence
  Synthetic oligonucleotide
aaccacgcctaaatggattcacttcctcaaaaattga

SEQ ID NO: 1598 - DNA, 37 bp, Artificial Sequence
  Synthetic oligonucleotide
aacgccgcacttcgttaaaagtctataaaactctaga

SEQ ID NO: 1599 - DNA, 37 bp, Artificial Sequence
  Synthetic oligonucleotide
aacgaagtattataacccttgtgtatcccgaccatga

SEQ ID NO: 1600 - DNA, 35 bp, Artificial Sequence
  Synthetic oligonucleotide
aacaaagttcacccataccacaaccccaattcgac

SEQ ID NO: 1601 - DNA, 38 bp, Artificial Sequence
  Synthetic oligonucleotide
aacggctgggaggggtagcattttaactatatttctga

SEQ ID NO: 1602 - DNA, 38 bp, Artificial Sequence
  Synthetic oligonucleotide
aagtggtccgtttcggcaataagtacaacgggatctga

SEQ ID NO: 1603 - DNA, 38 bp, Artificial Sequence
  Synthetic oligonucleotide
aactctgcataactaaccgacgccaactattatcctga

SEQ ID NO: 1604 - DNA, 36 bp, Artificial Sequence
  Synthetic oligonucleotide
aatcaggcttgtttgctagacaaaataagcacgaaa

SEQ ID NO: 1605 - DNA, 38 bp, Artificial Sequence
  Synthetic oligonucleotide
aattgcgttttccggttgactaaaaacacggaatctga

SEQ ID NO: 1606 - DNA, 36 bp, Artificial Sequence
  Synthetic oligonucleotide
aataaacacttcgaccaaactaaggccttatctcca

SEQ ID NO: 1607 - DNA, 38 bp, Artificial Sequence
  Synthetic oligonucleotide
aagtttcctggtcgcccgcttctgaaaagttagtttga

SEQ ID NO: 1608 - DNA, 38 bp, Artificial Sequence
  Synthetic oligonucleotide
aagagggctatgatttagccggtgcctccttgctttga

SEQ ID NO: 1609 - DNA, 37 bp, Artificial Sequence
  Synthetic oligonucleotide
aagccggtatcgcccgtaacattcccttcctctagga

SEQ ID NO: 1610 - DNA, 38 bp, Artificial Sequence
  Synthetic oligonucleotide
aacttcaccgatacggttcttttctctaacccgcttga

SEQ ID NO: 1611 - DNA, 37 bp, Artificial Sequence
  Synthetic oligonucleotide
aaggatagccataggctgatggggactcaacaggtga

SEQ ID NO: 1612 - DNA, 36 bp, Artificial Sequence
  Synthetic oligonucleotide
aatcgtcttacgtgcccttgataaatcccatactaa

SEQ ID NO: 1613 - DNA, 38 bp, Artificial Sequence
  Synthetic oligonucleotide
aattcgcgcgaattgaagaggcccatggcccgctctga

SEQ ID NO: 1614 - DNA, 37 bp, Artificial Sequence
  Synthetic oligonucleotide
accatgaatcaccgcgcctgctactgcaacttttgga

SEQ ID NO: 1615 - DNA, 36 bp, Artificial Sequence
  Synthetic oligonucleotide
acactggcatttttcgaaacatagaatgaatgggaa

SEQ ID NO: 1616 - DNA, 37 bp, Artificial Sequence
  Synthetic oligonucleotide
acacccacaagctttaacttatcataactcgccccga

SEQ ID NO: 1617 - DNA, 35 bp, Artificial Sequence
  Synthetic oligonucleotide
acccaacgttgagcgcaataccccttcataatacc

SEQ ID NO: 1618 - DNA, 35 bp, Artificial Sequence
  Synthetic oligonucleotide
acctctctctgaaatttaactctattctcccattc

SEQ ID NO: 1619 - DNA, 35 bp, Artificial Sequence
  Synthetic oligonucleotide
accggactagatatttaccacattgcatttccata

SEQ ID NO: 1620 - DNA, 35 bp, Artificial Sequence
  Synthetic oligonucleotide
acgctgaatctggttcacaacggggaacgtgttag

SEQ ID NO: 1621 - DNA, 38 bp, Artificial Sequence
  Synthetic oligonucleotide
acccgctgtgtgaaccaccgtgccttcggacgtcatga

SEQ ID NO: 1622 - DNA, 35 bp, Artificial Sequence
  Synthetic oligonucleotide
accgctctctgaaatttatctctattctcccattc

SEQ ID NO: 1623 - DNA, 36 bp, Artificial Sequence
  Synthetic oligonucleotide
acggtacactcactttcctaaatccctctttatcta

SEQ ID NO: 1624 - DNA, 38 bp, Artificial Sequence
  Synthetic oligonucleotide
acgccccagcctatttaccttggagtttctttgactga

SEQ ID NO: 1625 - DNA, 35 bp, Artificial Sequence
  Synthetic oligonucleotide
acccggcgaagacgttagctctggcgctccgttca

SEQ ID NO: 1626 - DNA, 38 bp, Artificial Sequence
  Synthetic oligonucleotide
actatcccaggtttacattagtgtgccccgcattctga

SEQ ID NO: 1627 - DNA, 38 bp, Artificial Sequence
  Synthetic oligonucleotide
actgctttttttgcccaatatctcgagtaaccccctga

SEQ ID NO: 1628 - DNA, 35 bp, Artificial Sequence
  Synthetic oligonucleotide
actgaacactctacatgaccataaacacctctctt

SEQ ID NO: 1629 - DNA, 37 bp, Artificial Sequence
  Synthetic oligonucleotide
actcgggcttccatcaagcttctgattggtgaggtga

SEQ ID NO: 1630 - DNA, 35 bp, Artificial Sequence
  Synthetic oligonucleotide
actgaacactctacatgactgtaaacacctctctt

SEQ ID NO: 1631 - DNA, 38 bp, Artificial Sequence
  Synthetic oligonucleotide
acgtttttctcgctcgtaattttatcgttaatttctga

SEQ ID NO: 1632 - DNA, 37 bp, Artificial Sequence
  Synthetic oligonucleotide
actactcatccccccgtcttaacaacgatcccactga

SEQ ID NO: 1633 - DNA, 37 bp, Artificial Sequence
  Synthetic oligonucleotide
actacgcgctcatcggccagagttccggtcaaccgga

SEQ ID NO: 1634 - DNA, 36 bp, Artificial Sequence
  Synthetic oligonucleotide
acttcacccacacaatacccttatcgataactcaaa

SEQ ID NO: 1635 - DNA, 36 bp, Artificial Sequence
  Synthetic oligonucleotide
acgttacgccgggggactataagcagttcagtagca

SEQ ID NO: 1636 - DNA, 36 bp, Artificial Sequence
  Synthetic oligonucleotide
agacctattccccaatcctgaattacaacatctcta

SEQ ID NO: 1637 - DNA, 35 bp, Artificial Sequence
  Synthetic oligonucleotide
agcacccgcccgcttctattcctcgatcctacact

SEQ ID NO: 1638 - DNA, 35 bp, Artificial Sequence
  Synthetic oligonucleotide
agccccagagtttatccggcttggccggcaattcc

SEQ ID NO: 1639 - DNA, 35 bp, Artificial Sequence
  Synthetic oligonucleotide
aggaatcgatcctggtggttttagctttgaccctt

SEQ ID NO: 1640 - DNA, 37 bp, Artificial Sequence
  Synthetic oligonucleotide
agacttagactcaataactggaccctttacacaccgt

SEQ ID NO: 1641 - DNA, 37 bp, Artificial Sequence; identical to SEQ ID NO: 1326
  Synthetic oligonucleotide

SEQ ID NO: 1642 - DNA, 38 bp, Artificial Sequence
  Synthetic oligonucleotide
atacacgctgcccatttccactcgtcaaaccactatga

SEQ ID NO: 1643 - DNA, 35 bp, Artificial Sequence
  Synthetic oligonucleotide
agttcgcgcaaccccttctcgcttgtgtggcttaa

SEQ ID NO: 1644 - DNA, 35 bp, Artificial Sequence
  Synthetic oligonucleotide
atcaagccggtgtaggcgctccaggcctttcagcc

SEQ ID NO: 1645 - DNA, 35 bp, Artificial Sequence
  Synthetic oligonucleotide
agtcatccattacctcaatgttcatctattttcac

SEQ ID NO: 1646 - DNA, 38 bp, Artificial Sequence
  Synthetic oligonucleotide
atcctctacgttccaaccacttacttttatgccattga

SEQ ID NO: 1647 - DNA, 38 bp, Artificial Sequence
  Synthetic oligonucleotide
atcacactctaactgtaatcaatcatttcgaaccctga

SEQ ID NO: 1648 - DNA, 38 bp, Artificial Sequence
  Synthetic oligonucleotide
atcccttccaattccctataattactactctaatgtga

SEQ ID NO: 1649 - DNA, 37 bp, Artificial Sequence
  Synthetic oligonucleotide
atcccacttgccatcttcggtcctatcaaatggtaga

SEQ ID NO: 1650 - DNA, 34 bp, Artificial Sequence
  Synthetic oligonucleotide
atcttaatgccttgatccgactcctacctcttga

SEQ ID NO: 1651 - DNA, 38 bp, Artificial Sequence
  Synthetic oligonucleotide
atgccccccgcgcttttaactcacacctgctctgctga

SEQ ID NO: 1652 - DNA, 35 bp, Artificial Sequence
  Synthetic oligonucleotide
atgcagtcgttaacgtccatcgcgtgtgtcttccg

SEQ ID NO: 1653 - DNA, 38 bp, Artificial Sequence
  Synthetic oligonucleotide
atcccttttattgttaaacttcatagaaatcatactga

SEQ ID NO: 1654 - DNA, 37 bp, Artificial Sequence
  Synthetic oligonucleotide
atcttcccgccacttgtgccttatcattaccccccga

SEQ ID NO: 1655 - DNA, 36 bp, Artificial Sequence
  Synthetic oligonucleotide
atcccaattcacatacactctcaccctcactaaaca

SEQ ID NO: 1656 - DNA, 36 bp, Artificial Sequence
  Synthetic oligonucleotide
atctacaccctatcgaaacttcccatgaaactacaa

SEQ ID NO: 1657 - DNA, 35 bp, Artificial Sequence
  Synthetic oligonucleotide
attggtgcccgttgtgaggatcaagcaacatgcta

SEQ ID NO: 1658 - DNA, 38 bp, Artificial Sequence
  Synthetic oligonucleotide
caaacgtaccttactgcatacaccttccctgttattga

SEQ ID NO: 1659 - DNA, 35 bp, Artificial Sequence
  Synthetic oligonucleotide
attgaacgagcgagaaatctaagcgccggcatctg

SEQ ID NO: 1660 - DNA, 35 bp, Artificial Sequence
  Synthetic oligonucleotide
atttcctaacattgctctcttaactgttcctatcc

SEQ ID NO: 1661 - DNA, 37 bp, Artificial Sequence
  Synthetic oligonucleotide
cacctggccattacactttccttttgagttctctcga

SEQ ID NO: 1662 - DNA, 38 bp, Artificial Sequence
  Synthetic oligonucleotide
attttagcatacggctccttggtttcatcagctgttga

SEQ ID NO: 1663 - DNA, 35 bp, Artificial Sequence
  Synthetic oligonucleotide
attcgaattctccacctgataaccgccacattaaa

SEQ ID NO: 1664 - DNA, 36 bp, Artificial Sequence
  Synthetic oligonucleotide
atgtttgtcggcctttgtgggtcctttcgcttccca

SEQ ID NO: 1665 - DNA, 38 bp, Artificial Sequence
  Synthetic oligonucleotide
ccgcaacccaactcgtattctaatctactacacattga

SEQ ID NO: 1666 - DNA, 36 bp, Artificial Sequence; identical to SEQ ID NO: 1312
  Synthetic oligonucleotide

SEQ ID NO: 1667 - DNA, 35 bp, Artificial Sequence
  Synthetic oligonucleotide
ccccaaggacgcacgggggtacccgcatactgtta

SEQ ID NO: 1668 - DNA, 36 bp, Artificial Sequence
  Synthetic oligonucleotide
ccagccggtccaggtggctgacccgcgaaggagcta

SEQ ID NO: 1669 - DNA, 37 bp, Artificial Sequence
  Synthetic oligonucleotide
cccgtcatgaaccgggacccaatcttaccttttatga

SEQ ID NO: 1670 - DNA, 37 bp, Artificial Sequence
  Synthetic oligonucleotide
ccgcgcgttagctacggatggcattaacccagttgga

SEQ ID NO: 1671 - DNA, 38 bp, Artificial Sequence
  Synthetic oligonucleotide
catggctctcatccgaagacgcgccttcttctatttga

SEQ ID NO: 1672 - DNA, 38 bp, Artificial Sequence
  Synthetic oligonucleotide
ccgctggcgctattttttttctatgctgttggagctga

SEQ ID NO: 1673 - DNA, 36 bp, Artificial Sequence
  Synthetic oligonucleotide
catggatttagtcgtccctagccgaacttctgttaa

SEQ ID NO: 1674 - DNA, 38 bp, Artificial Sequence
  Synthetic oligonucleotide
ccgcttaacggggcacccaactaattcgatatctctga

SEQ ID NO: 1675 - DNA, 36 bp, Artificial Sequence
  Synthetic oligonucleotide
cggtccgtcgacccatgttttttggctctattgcta

SEQ ID NO: 1676 - DNA, 36 bp, Artificial Sequence; identical to SEQ ID NO: 1311
  Synthetic oligonucleotide

SEQ ID NO: 1677 - DNA, 38 bp, Artificial Sequence
  Synthetic oligonucleotide
cgctattattactctccccgggtaatatcctatattga

SEQ ID NO: 1678 - DNA, 36 bp, Artificial Sequence
  Synthetic oligonucleotide
ccttgaaaggtgtaacgcacgttggatcgtcgtgaa

SEQ ID NO: 1679 - DNA, 36 bp, Artificial Sequence
  Synthetic oligonucleotide
cgacgaaaccggacaccatacccttacgacttttaa

SEQ ID NO: 1680 - DNA, 35 bp, Artificial Sequence
  Synthetic oligonucleotide
ccttaccccgagcgtgcccccttcttaagtattcg

SEQ ID NO: 1681 - DNA, 36 bp, Artificial Sequence
  Synthetic oligonucleotide
cgttttatagtttcgatctaaggttcattatatata

SEQ ID NO: 1682 - DNA, 38 bp, Artificial Sequence
  Synthetic oligonucleotide
cgcttaattcttggttatattatctaactacgcaatga

SEQ ID NO: 1683 - DNA, 37 bp, Artificial Sequence
  Synthetic oligonucleotide
ctctaccgagtcccttacatatgtacccacttccaga

SEQ ID NO: 1684 - DNA, 37 bp, Artificial Sequence
  Synthetic oligonucleotide
gaacccgagggagggattctcaatgtgcaatgtatga

SEQ ID NO: 1685 - DNA, 38 bp, Artificial Sequence
  Synthetic oligonucleotide
cttcggggcactaccttcgtttttttgttctactatga

SEQ ID NO: 1686 - DNA, 37 bp, Artificial Sequence
  Synthetic oligonucleotide
gaagccccataaaagacgccgaaatattgcatctgga

SEQ ID NO: 1687 - DNA, 37 bp, Artificial Sequence
  Synthetic oligonucleotide
gaaactaaaccgactgggttaaattttatcatgcgga

SEQ ID NO: 1688 - DNA, 37 bp, Artificial Sequence
  Synthetic oligonucleotide
gagcttaaacctctccgagcgcttatggctcgattga

SEQ ID NO: 1689 - DNA, 35 bp, Artificial Sequence
  Synthetic oligonucleotide
gaggaaacgcggcagccttataggccgatctttca

SEQ ID NO: 1690 - DNA, 38 bp, Artificial Sequence
  Synthetic oligonucleotide
gaggtttaataaataggccatgcttattggtccgctga

SEQ ID NO: 1691 - DNA, 37 bp, Artificial Sequence
  Synthetic oligonucleotide
gatcacgtcgcggattcccccgtttcgcgagaggaga

SEQ ID NO: 1692 - DNA, 37 bp, Artificial Sequence
  Synthetic oligonucleotide
gagttcctttatttgcatttttatcagatcaagttta

SEQ ID NO: 1693 - DNA, 36 bp, Artificial Sequence
  Synthetic oligonucleotide
gagtcctctacttcatataatctccagaggggggga

SEQ ID NO: 1694 - DNA, 35 bp, Artificial Sequence
  Synthetic oligonucleotide
gagtttcgatattcgtcttaaatccacccctgtaa

SEQ ID NO: 1695 - DNA, 36 bp, Artificial Sequence
  Synthetic oligonucleotide
gagtacgatttgaccactatcttcgtagattccata

SEQ ID NO: 1696 - DNA, 37 bp, Artificial Sequence
  Synthetic oligonucleotide
gataacgggaaccaaatcgcgctgtagaggcctggga

SEQ ID NO: 1697 - DNA, 36 bp, Artificial Sequence
  Synthetic oligonucleotide
gatctacccgaccctattaaccttagtacttgacaa

SEQ ID NO: 1698 - DNA, 38 bp, Artificial Sequence
  Synthetic oligonucleotide
gatccctaattgttttcctattaatcgttttcccatga

SEQ ID NO: 1699 - DNA, 36 bp, Artificial Sequence
  Synthetic oligonucleotide
gatcgctcgccaggcacactgccgtttcgagtatta

SEQ ID NO: 1700 - DNA, 36 bp, Artificial Sequence
  Synthetic oligonucleotide
gcacgacgaacgagtccgggaggaccggcttcccca

SEQ ID NO: 1701 - DNA, 35 bp, Artificial Sequence
  Synthetic oligonucleotide
gatcttatccggcccacatctttaaccccaacact

SEQ ID NO: 1702 - DNA, 35 bp, Artificial Sequence
  Synthetic oligonucleotide
gccgtctcggggtaatcggcctaatacgtagacat

SEQ ID NO: 1703 - DNA, 37 bp, Artificial Sequence
  Synthetic oligonucleotide
gccgcggggggccggggaggtcccatcgaggttatga

SEQ ID NO: 1704 - DNA, 38 bp, Artificial Sequence
  Synthetic oligonucleotide
gctaacctttgttatactaggactttctccacaggtga

SEQ ID NO: 1705 - DNA, 35 bp, Artificial Sequence
  Synthetic oligonucleotide
ggggtttcttggagcgcaatacggtttgtttctga

SEQ ID NO: 1706 - DNA, 35 bp, Artificial Sequence
  Synthetic oligonucleotide
ggcgaaactagcctggattggagttagacctttca

SEQ ID NO: 1707 - DNA, 38 bp, Artificial Sequence
  Synthetic oligonucleotide
gggggagttgcatggttgcaactctggaggccctttga

SEQ ID NO: 1708 - DNA, 37 bp, Artificial Sequence
  Synthetic oligonucleotide
gggtttaacgtgcccacccgtcagggtagtcctacga

SEQ ID NO: 1709 - DNA, 35 bp, Artificial Sequence
  Synthetic oligonucleotide
gggtatgccgttctgtccgggccttatgcgcatat

SEQ ID NO: 1710 - DNA, 37 bp, Artificial Sequence
  Synthetic oligonucleotide
gggacaatagaattaaactcgggcttaggtcctcgga

SEQ ID NO: 1711 - DNA, 37 bp, Artificial Sequence
  Synthetic oligonucleotide
ggggagatggctgggtcttgataccggaaacttgcga

SEQ ID NO: 1712 - DNA, 38 bp, Artificial Sequence
  Synthetic oligonucleotide
ggcttgtatacctattatgttaggcaggtgccctttga

SEQ ID NO: 1713 - DNA, 36 bp, Artificial Sequence
  Synthetic oligonucleotide
gtggcccggttgtgttgtcacggacgtgcggtccca

SEQ ID NO: 1714 - DNA, 36 bp, Artificial Sequence
  Synthetic oligonucleotide
gtgttgtatgtcttcgcaatcctagccgaccgccaa

SEQ ID NO: 1715 - DNA, 38 bp, Artificial Sequence
  Synthetic oligonucleotide
gtgcgcgttggtgggccgcttgtaactataccctttga

SEQ ID NO: 1716 - DNA, 35 bp, Artificial Sequence
  Synthetic oligonucleotide
gttttggtggttcaaaccggtcgcccactggcatt

SEQ ID NO: 1717 - DNA, 36 bp, Artificial Sequence
  Synthetic oligonucleotide
tacatcccggctagatccgtgaggactggcggtgtc

SEQ ID NO: 1718 - DNA, 38 bp, Artificial Sequence
  Synthetic oligonucleotide
taaaagaactcttttcgtcaaccatacctcaggcctga

SEQ ID NO: 1719 - DNA, 37 bp, Artificial Sequence
  Synthetic oligonucleotide
tagtccatatatagcttaaactgatgcgggggttcga

SEQ ID NO: 1720 - DNA, 35 bp, Artificial Sequence
  Synthetic oligonucleotide
tacccttatcggcacccccacacttatggtaattc

SEQ ID NO: 1721 - DNA, 36 bp, Artificial Sequence
  Synthetic oligonucleotide
tacgggaatgggtttggccctaaaagccagacacga

SEQ ID NO: 1722 - DNA, 36 bp, Artificial Sequence
  Synthetic oligonucleotide
tagctaacggtcccaacaagcatgttgggattggca

SEQ ID NO: 1723 - DNA, 38 bp, Artificial Sequence
  Synthetic oligonucleotide
tacgccatgatacttacatctagccaccttttttttga

SEQ ID NO: 1724 - DNA, 36 bp, Artificial Sequence
  Synthetic oligonucleotide
tatatctggccaccggcgggggggctggtgatctta

SEQ ID NO: 1725 - DNA, 36 bp, Artificial Sequence; identical to SEQ ID NO: 1491
  Synthetic oligonucleotide

SEQ ID NO: 1726 - DNA, 38 bp, Artificial Sequence
  Synthetic oligonucleotide
tatcaaattcggtcgtagtatttgtcgccgtaacgtta

SEQ ID NO: 1727 - DNA, 38 bp, Artificial Sequence
  Synthetic oligonucleotide
tactagcgatcatttgttcgctttgggttggttattga

SEQ ID NO: 1728 - DNA, 35 bp, Artificial Sequence
  Synthetic oligonucleotide
taggtggtcgtgcctacattgactgtttccatcca

SEQ ID NO: 1729 - DNA, 35 bp, Artificial Sequence
  Synthetic oligonucleotide
tactccggcccaactatatacttctccacacctcc

SEQ ID NO: 1730 - DNA, 37 bp, Artificial Sequence
  Synthetic oligonucleotide
tatcacgacttcccaccttcttccgcctttgtcccaa

SEQ ID NO: 1731 - DNA, 37 bp, Artificial Sequence
  Synthetic oligonucleotide
tcacagggcctgaaggtagtagatattaaacgctgga

SEQ ID NO: 1732 - DNA, 35 bp, Artificial Sequence
  Synthetic oligonucleotide
tcattatacggatcccgcgccgaacctggccgact

SEQ ID NO: 1733 - DNA, 38 bp, Artificial Sequence
  Synthetic oligonucleotide
tcactttggtaaactattcccccgtttctctcctatga

SEQ ID NO: 1734 - DNA, 37 bp, Artificial Sequence
  Synthetic oligonucleotide
tcaatacgcgtccggaaatccccctgtgcaagctgga

SEQ ID NO: 1735 - DNA, 37 bp, Artificial Sequence
  Synthetic oligonucleotide
tcaatgcttgctgctcgtagctttcaaccgtggtgga

SEQ ID NO: 1736 - DNA, 35 bp, Artificial Sequence
  Synthetic oligonucleotide
tatcgtttgccatattccgccagagaaaagtctcc

SEQ ID NO: 1737 - DNA, 38 bp, Artificial Sequence
  Synthetic oligonucleotide
tcctcgtggcttaccggtatactcccccaactcattga

SEQ ID NO: 1738 - DNA, 37 bp, Artificial Sequence
  Synthetic oligonucleotide
tccctccccgttgcccttattccgtactcacttatga

SEQ ID NO: 1739 - DNA, 38 bp, Artificial Sequence
  Synthetic oligonucleotide
tcctgtctccgctaggtaacatccgaatactctcttga

SEQ ID NO: 1740 - DNA, 36 bp, Artificial Sequence
  Synthetic oligonucleotide
tcctcgaccatctacaaactttgaagccacacccca

SEQ ID NO: 1741 - DNA, 35 bp, Artificial Sequence; identical to SEQ ID NO: 1322
  Synthetic oligonucleotide

SEQ ID NO: 1742 - DNA, 38 bp, Artificial Sequence
  Synthetic oligonucleotide
tccactcaatccccggttcgtatgctctgtaccattga

SEQ ID NO: 1743 - DNA, 38 bp, Artificial Sequence
  Synthetic oligonucleotide
tcccgtcccacctttactttgctacttcaccatcttga

SEQ ID NO: 1744 - DNA, 38 bp, Artificial Sequence
  Synthetic oligonucleotide
tccttgcatacctcggctctcctttctctcacatttga

SEQ ID NO: 1745 - DNA, 37 bp, Artificial Sequence
  Synthetic oligonucleotide
tctcgtgcgcgatttctgttctagggtaggagaggga

SEQ ID NO: 1746 - DNA, 38 bp, Artificial Sequence
  Synthetic oligonucleotide
tcggctcatccaaaattacttgcgggtttcataaatga

SEQ ID NO: 1747 - DNA, 36 bp, Artificial Sequence
  Synthetic oligonucleotide
tctcgcacctttattttctccgctcttttgtttcca

SEQ ID NO: 1748 - DNA, 38 bp, Artificial Sequence
  Synthetic oligonucleotide
tcgctacaattggccttttctgtatttgggttctatga

SEQ ID NO: 1749 - DNA, 37 bp, Artificial Sequence
  Synthetic oligonucleotide
tgcacgccgagcaaggcggtactctaggacccacgga

SEQ ID NO: 1750 - DNA, 38 bp, Artificial Sequence
  Synthetic oligonucleotide
tgccgcttttaccacttgacttacgataagaaaactga

SEQ ID NO: 1751 - DNA, 37 bp, Artificial Sequence
  Synthetic oligonucleotide
tgagtttttctaaataccgcagcctcagccacgcgga

SEQ ID NO: 1752 - DNA, 34 bp, Artificial Sequence
  Synthetic oligonucleotide
tgccttttttttcaccggtttgattccgctttcg

SEQ ID NO: 1753 - DNA, 35 bp, Artificial Sequence
  Synthetic oligonucleotide
tgaaagccaggtattttggggctcctttttcctcc

SEQ ID NO: 1754 - DNA, 38 bp, Artificial Sequence
  Synthetic oligonucleotide
tgacctacaaagggtttgaaataaatcgctcgacgtga

SEQ ID NO: 1755 - DNA, 35 bp, Artificial Sequence
  Synthetic oligonucleotide
tggaaagttagatttcctggggtctcgctttgagt

SEQ ID NO: 1756 - DNA, 35 bp, Artificial Sequence
  Synthetic oligonucleotide
tgtacttacttttactcgatcaccttataatttcc

SEQ ID NO: 1757 - DNA, 38 bp, Artificial Sequence
  Synthetic oligonucleotide
tggcctattctcgtacaatttacttcttatcatcctga

SEQ ID NO: 1758 - DNA, 38 bp, Artificial Sequence
  Synthetic oligonucleotide
ttagtacgtgccgagccccgagccctagagacctgtga

SEQ ID NO: 1759 - DNA, 36 bp, Artificial Sequence; identical to SEQ ID NO: 1501
  Synthetic oligonucleotide

SEQ ID NO: 1760 - DNA, 35 bp, Artificial Sequence
  Synthetic oligonucleotide
tgttagttccactttccgataatccgtcttcctta

SEQ ID NO: 1761 - DNA, 36 bp, Artificial Sequence
  Synthetic oligonucleotide
tgttaggcctttatttaccttatcttaattgtttta

SEQ ID NO: 1762 - DNA, 38 bp, Artificial Sequence
  Synthetic oligonucleotide
tgtttttacacgcctactttttatctatctccacatga

SEQ ID NO: 1763 - DNA, 38 bp, Artificial Sequence
  Synthetic oligonucleotide
ttccccttttatttgcccgtaataatcgcttgacatga

SEQ ID NO: 1764 - DNA, 38 bp, Artificial Sequence
  Synthetic oligonucleotide
ttgaacctcggtagagccgtaaggcctatccggtttga

SEQ ID NO: 1765 - DNA, 37 bp, Artificial Sequence
  Synthetic oligonucleotide
ttcgacccttttccatacttcttctcacgcaaattga

SEQ ID NO: 1766 - DNA, 35 bp, Artificial Sequence
  Synthetic oligonucleotide
ttcttaatgtaaacttttgttgatactgtgccacc

SEQ ID NO: 1767 - DNA, 36 bp, Artificial Sequence
  Synthetic oligonucleotide
ttcccctctactcgcctattttcctcataaaattta

SEQ ID NO: 1768 - DNA, 35 bp, Artificial Sequence
  Synthetic oligonucleotide
ttcctcccccccgtgcaattttagaggtcccgtgg

SEQ ID NO: 1769 - DNA, 35 bp, Artificial Sequence
  Synthetic oligonucleotide
ttctcaccgtacatcccttacctatccccttttat

SEQ ID NO: 1770 - DNA, 38 bp, Artificial Sequence; identical to SEQ ID NO: 1575
  Synthetic oligonucleotide

SEQ ID NO: 1771 - DNA, 36 bp, Artificial Sequence
  Synthetic oligonucleotide
tttgcgaatctagctttcctgtatacatgacaataa

SEQ ID NO: 1772 - DNA, 35 bp, Artificial Sequence
  Synthetic oligonucleotide
ttggtctattatgctctatatgtgaagtgcgaaaa

SEQ ID NO: 1773 - DNA, 35 bp, Artificial Sequence
  Synthetic oligonucleotide
ttttagttccactttccgataatccgccttcctta

SEQ ID NO: 1774 - DNA, 35 bp, Artificial Sequence
  Synthetic oligonucleotide
ttttagtatacccaccgcgatactctcagtcttgc

SEQ ID NO: 1775 - DNA, 38 bp, Artificial Sequence
  Synthetic oligonucleotide
ttttggcgtgagctccaggtagtggttgaaacccatga

SEQ ID NO: 1776 - DNA, 37 bp, Artificial Sequence
  Synthetic oligonucleotide
agttcgccgttggaggctctttcgacatcatgctaga

SEQ ID NO: 1777 - DNA, 36 bp, Artificial Sequence; identical to SEQ ID NO: 1357
  Synthetic oligonucleotide

SEQ ID NO: 1778 - DNA, 35 bp, Artificial Sequence
  Synthetic oligonucleotide
aaagcgatcacgtttctttgggctgctgtctagca

SEQ ID NO: 1779 - DNA, 36 bp, Artificial Sequence
  Synthetic oligonucleotide
ccattaacggtaagacttaattccgtttggcgtgta

SEQ ID NO: 1780 - DNA, 37 bp, Artificial Sequence; identical to SEQ ID NO: 1358
  Synthetic oligonucleotide

SEQ ID NO: 1781 - DNA, 36 bp, Artificial Sequence
  Synthetic oligonucleotide
aatcgtactcacggtgacatccttggtttgatggta

SEQ ID NO: 1782 - DNA, 36 bp, Artificial Sequence; identical to SEQ ID NO: 1361
  Synthetic oligonucleotide

SEQ ID NO: 1783 - DNA, 38 bp, Artificial Sequence
  Synthetic oligonucleotide
gagttttactgccgtgtcaattatcggtcctgtgttga

SEQ ID NO: 1784 - DNA, 38 bp, Artificial Sequence
  Synthetic oligonucleotide
cgggacgaatcttagtttattccattcgcaagtgctga

SEQ ID NO: 1785 - DNA, 35 bp, Artificial Sequence
  Synthetic oligonucleotide
gatcataccgcgatatagacattgcaccgtttcta

SEQ ID NO: 1786 - DNA, 35 bp, Artificial Sequence; identical to SEQ ID NO: 1362
  Synthetic oligonucleotide

SEQ ID NO: 1787 - DNA, 38 bp, Artificial Sequence
  Synthetic oligonucleotide
agggacgaatcttagtttattccattcgcaagtgctga

SEQ ID NO: 1788 - DNA, 38 bp, Artificial Sequence
  Synthetic oligonucleotide
atcgcttaagttccgtaagggttaaggttcgttattga

SEQ ID NO: 1789 - DNA, 35 bp, Artificial Sequence
  Synthetic oligonucleotide
gagtacgcgcaatgacaatcgacttgttttcggtc

SEQ ID NO: 1790 - DNA, 37 bp, Artificial Sequence; identical to SEQ ID NO: 1366
  Synthetic oligonucleotide

SEQ ID NO: 1791 - DNA, 36 bp, Artificial Sequence
  Synthetic oligonucleotide
cctcagtttacgtactcatcttgaatgggggaaata

SEQ ID NO: 1792 - DNA, 38 bp, Artificial Sequence; identical to SEQ ID NO: 1367
  Synthetic oligonucleotide

SEQ ID NO: 1793 - DNA, 35 bp, Artificial Sequence; identical to SEQ ID NO: 1368
  Synthetic oligonucleotide

SEQ ID NO: 1794 - DNA, 38 bp, Artificial Sequence
  Synthetic oligonucleotide
agattaggttgctctgtcccgtgcttaagtatcgctga

SEQ ID NO: 1795 - DNA, 38 bp, Artificial Sequence
  Synthetic oligonucleotide
acattttccgcatgggacggaatgttcttcttcattga

SEQ ID NO: 1796 - DNA, 36 bp, Artificial Sequence; identical to SEQ ID NO: 1521
  Synthetic oligonucleotide

SEQ ID NO: 1797 - DNA, 36 bp, Artificial Sequence; identical to SEQ ID NO: 1369
  Synthetic oligonucleotide

SEQ ID NO: 1798 - DNA, 35 bp, Artificial Sequence; identical to SEQ ID NO: 1197
  Synthetic oligonucleotide

SEQ ID NO: 1799 - DNA, 35 bp, Artificial Sequence
  Synthetic oligonucleotide
tacctcatgtttgtcactatggaaatcatcccgcc

SEQ ID NO: 1800 - DNA, 35 bp, Artificial Sequence
  Synthetic oligonucleotide
tgcttctgcatgcaacgtgctctggactagctgtc

SEQ ID NO: 1801 - DNA, 35 bp, Artificial Sequence; identical to SEQ ID NO: 1370
  Synthetic oligonucleotide

SEQ ID NO: 1802 - DNA, 37 bp, Artificial Sequence; identical to SEQ ID NO: 1421
  Synthetic oligonucleotide

SEQ ID NO: 1803 - DNA, 36 bp, Artificial Sequence; identical to SEQ ID NO: 1409
  Synthetic oligonucleotide

SEQ ID NO: 1804 - DNA, 37 bp, Artificial Sequence; identical to SEQ ID NO: 1420
  Synthetic oligonucleotide

SEQ ID NO: 1805 - DNA, 38 bp, Artificial Sequence; identical to SEQ ID NO: 1372
  Synthetic oligonucleotide

SEQ ID NO: 1806 - DNA, 36 bp, Artificial Sequence; identical to SEQ ID NO: 1373
  Synthetic oligonucleotide

SEQ ID NO: 1807 - DNA, 36 bp, Artificial Sequence; identical to SEQ ID NO: 1374
  Synthetic oligonucleotide

SEQ ID NO: 1808 - DNA, 36 bp, Artificial Sequence
  Synthetic oligonucleotide
ttggcctttgagttagtgcctagatagcctgagtta

SEQ ID NO: 1809 - DNA, 36 bp, Artificial Sequence
  Synthetic oligonucleotide
tcattggttccgatccggggctctggacctgacata

SEQ ID NO: 1810 - DNA, 36 bp, Artificial Sequence; identical to SEQ ID NO: 1375
  Synthetic oligonucleotide

SEQ ID NO: 1811 - DNA, 35 bp, Artificial Sequence; identical to SEQ ID NO: 1376
  Synthetic oligonucleotide

SEQ ID NO: 1812 - DNA, 36 bp, Artificial Sequence
  Synthetic oligonucleotide
gcggagcgcttatataatggtgttgtaggtccatta

SEQ ID NO: 1813 - DNA, 35 bp, Artificial Sequence
  Synthetic oligonucleotide
gtacgccgctgccaataatgtctgttgttacattc

SEQ ID NO: 1814 - DNA, 36 bp, Artificial Sequence
  Synthetic oligonucleotide
tttaatggggagctacgtctcgaatcgattttggta

SEQ ID NO: 1815 - DNA, 35 bp, Artificial Sequence; identical to SEQ ID NO: 1377
  Synthetic oligonucleotide

SEQ ID NO: 1816 - DNA, 35 bp, Artificial Sequence
  Synthetic oligonucleotide
ttcccttgttcgagtttcccagcctggacgccctg

SEQ ID NO: 1817 - DNA, 36 bp, Artificial Sequence
  Synthetic oligonucleotide
tccctgtcggtccaaacgtaagggcgggctaaaaca

SEQ ID NO: 1818 - DNA, 36 bp, Artificial Sequence
  Synthetic oligonucleotide
gtctggctggaaaatcagggttgcctatgtttcaaa

SEQ ID NO: 1819 - DNA, 36 bp, Artificial Sequence
  Synthetic oligonucleotide
tacattccgggctgttcagcaatgtcgctccagtta

SEQ ID NO: 1820 - DNA, 38 bp, Artificial Sequence; identical to SEQ ID NO: 1380
  Synthetic oligonucleotide

SEQ ID NO: 1821 - DNA, 35 bp, Artificial Sequence
  Synthetic oligonucleotide
tttgcaagttcgctccgtatatccactgtgaagac

SEQ ID NO: 1822 - DNA, 35 bp, Artificial Sequence
  Synthetic oligonucleotide
tttgcaagttcgctccgtatatccactgtgaagcc

SEQ ID NO: 1823 - DNA, 36 bp, Artificial Sequence
  Synthetic oligonucleotide
tcctctccgtctgtgaagacgtgtgtggcggaatta

SEQ ID NO: 1824 - DNA, 35 bp, Artificial Sequence; identical to SEQ ID NO: 1415
  Synthetic oligonucleotide

SEQ ID NO: 1825 - DNA, 36 bp, Artificial Sequence; identical to SEQ ID NO: 1382
  Synthetic oligonucleotide

SEQ ID NO: 1826 - DNA, 37 bp, Artificial Sequence
  Synthetic oligonucleotide
aaccaaacctgtacccgaataaatcatccattaacga

SEQ ID NO: 1827 - DNA, 36 bp, Artificial Sequence
  Synthetic oligonucleotide
aacccaattcacatactctctcaccctcactaaaca

SEQ ID NO: 1828 - DNA, 37 bp, Artificial Sequence
  Synthetic oligonucleotide
aacaacctcgaatttgtataggttcgcatcactctga

SEQ ID NO: 1829 - DNA, 35 bp, Artificial Sequence
  Synthetic oligonucleotide
aactgtcatccgctgactaactcaatctaactcca

SEQ ID NO: 1830 - DNA, 38 bp, Artificial Sequence
  Synthetic oligonucleotide
acattaaggatttatcttcacccatttttgcctcttga

SEQ ID NO: 1831 - DNA, 38 bp, Artificial Sequence
  Synthetic oligonucleotide
acaaagtaacgtacctcagttccggtacttacgggtga

SEQ ID NO: 1832 - DNA, 35 bp, Artificial Sequence
  Synthetic oligonucleotide
accccacctgcacaccttcatctcatctattacat

SEQ ID NO: 1833 - DNA, 38 bp, Artificial Sequence; identical to SEQ ID NO: 1795
  Synthetic oligonucleotide

SEQ ID NO: 1834 - DNA, 37 bp, Artificial Sequence
  Synthetic oligonucleotide
acaattaatataaattccttacatcaatcctagacga

SEQ ID NO: 1835 - DNA, 38 bp, Artificial Sequence
  Synthetic oligonucleotide
acattcccgtggtggtccttacgggtgggccagcctga

SEQ ID NO: 1836 - DNA, 38 bp, Artificial Sequence; identical to SEQ ID NO: 1383
  Synthetic oligonucleotide

SEQ ID NO: 1837 - DNA, 35 bp, Artificial Sequence
  Synthetic oligonucleotide
accggactgcacagggatcccgataggagggtgac

SEQ ID NO: 1838 - DNA, 37 bp, Artificial Sequence
  Synthetic oligonucleotide
acccttgcaatcaatccccccttttacctgtacatga

SEQ ID NO: 1839 - DNA, 36 bp, Artificial Sequence
  Synthetic oligonucleotide
actcgcccttcacgactttatccaaatttactttca

SEQ ID NO: 1840 - DNA, 35 bp, Artificial Sequence
  Synthetic oligonucleotide
acgtctgccaaatctactcgcattcgatacacaca

SEQ ID NO: 1841 - DNA, 35 bp, Artificial Sequence
  Synthetic oligonucleotide
actactgggcgcactagcgcgaggctccactgaat

SEQ ID NO: 1842 - DNA, 38 bp, Artificial Sequence
  Synthetic oligonucleotide
actcacattcccaccccctattgcctttaaatacctga

SEQ ID NO: 1843 - DNA, 37 bp, Artificial Sequence
  Synthetic oligonucleotide
actgcagcatcaagccactaattggggcttgtatcga

SEQ ID NO: 1844 - DNA, 37 bp, Artificial Sequence
  Synthetic oligonucleotide
acggttggagcttgtgggaaactaggttgggttcgga

SEQ ID NO: 1845 - DNA, 35 bp, Artificial Sequence; identical to SEQ ID NO: 1368
  Synthetic oligonucleotide

SEQ ID NO: 1846 - DNA, 35 bp, Artificial Sequence
  Synthetic oligonucleotide
agcacccacccgcttctattcctcgatcatacact

SEQ ID NO: 1847 - DNA, 35 bp, Artificial Sequence; identical to SEQ ID NO: 1362
  Synthetic oligonucleotide

SEQ ID NO: 1848 - DNA, 36 bp, Artificial Sequence; identical to SEQ ID NO: 1361
  Synthetic oligonucleotide

SEQ ID NO: 1849 - DNA, 35 bp, Artificial Sequence
  Synthetic oligonucleotide
agattgctccgcagtacggtgtagggcgataaaaa

SEQ ID NO: 1850 - DNA, 35 bp, Artificial Sequence
  Synthetic oligonucleotide
agccgcccctttagacagaggttacgacttgcgta

SEQ ID NO: 1851 - DNA, 38 bp, Artificial Sequence
  Synthetic oligonucleotide
actttggggctttctcggtcttcgcactatggtactga

SEQ ID NO: 1852 - DNA, 36 bp, Artificial Sequence; identical to SEQ ID NO: 1388
  Synthetic oligonucleotide

SEQ ID NO: 1853 - DNA, 36 bp, Artificial Sequence
  Synthetic oligonucleotide
agaaccccattctcattccaccagttactacgctta

SEQ ID NO: 1854 - DNA, 36 bp, Artificial Sequence
  Synthetic oligonucleotide
aggtatacaaatgtgtagtctagtcctgccgatcga

SEQ ID NO: 1855 - DNA, 36 bp, Artificial Sequence; identical to SEQ ID NO: 1357
  Synthetic oligonucleotide

SEQ ID NO: 1856 - DNA, 36 bp, Artificial Sequence
  Synthetic oligonucleotide
agggattcgccctgtgtcacgctcaaactgtagtaa

SEQ ID NO: 1857 - DNA, 38 bp, Artificial Sequence
  Synthetic oligonucleotide
agtaatccccggcgtataatttcagtcctgtggtttga

SEQ ID NO: 1858 - DNA, 35 bp, Artificial Sequence
  Synthetic oligonucleotide
agttgatgcagtgggacctgagattaggcttatga

SEQ ID NO: 1859 - DNA, 36 bp, Artificial Sequence
  Synthetic oligonucleotide
agtattcctctggtagtatttttccttaattccgta

SEQ ID NO: 1860 - DNA, 35 bp, Artificial Sequence; identical to SEQ ID NO: 1391
  Synthetic oligonucleotide

SEQ ID NO: 1861 - DNA, 35 bp, Artificial Sequence
  Synthetic oligonucleotide
agtacctcttgtgggtcttggggctgccactgcct

SEQ ID NO: 1862 - DNA, 36 bp, Artificial Sequence
  Synthetic oligonucleotide
atcaccgtccttatcataaccagttcgttttttata

SEQ ID NO: 1863 - DNA, 36 bp, Artificial Sequence
  Synthetic oligonucleotide
atgcttccatctctgttttttaaccccttaccgtta

SEQ ID NO: 1864 - DNA, 35 bp, Artificial Sequence; identical to SEQ ID NO: 1365
  Synthetic oligonucleotide

SEQ ID NO: 1865 - DNA, 37 bp, Artificial Sequence
  Synthetic oligonucleotide
caccctaatcaccgctaaccttaccataacaatttga

SEQ ID NO: 1866 - DNA, 37 bp, Artificial Sequence
  Synthetic oligonucleotide
cagccgctctagttacaggtttactgcggctaaacga

SEQ ID NO: 1867 - DNA, 35 bp, Artificial Sequence
  Synthetic oligonucleotide
cacagtatccttgtacagattttgatggttgttgg

SEQ ID NO: 1868 - DNA, 35 bp, Artificial Sequence
  Synthetic oligonucleotide
catcggggtacgcttcctttaaaagatcctgtgcc

SEQ ID NO: 1869 - DNA, 36 bp, Artificial Sequence
  Synthetic oligonucleotide
attcatggtgccgtgagaaaataaccatgtacgcaa

SEQ ID NO: 1870 - DNA, 35 bp, Artificial Sequence
  Synthetic oligonucleotide
atttccataccattgtaggccttctcgtatcgtaa

SEQ ID NO: 1871 - DNA, 38 bp, Artificial Sequence
  Synthetic oligonucleotide
cccatagggcactttttacacccctcgcatactattga

SEQ ID NO: 1872 - DNA, 37 bp, Artificial Sequence
  Synthetic oligonucleotide
ccgtgatgcagatgaatgtacggacgtctgccggtga

SEQ ID NO: 1873 - DNA, 38 bp, Artificial Sequence
  Synthetic oligonucleotide
cccaccgagggcaggtggtgacgtttccccagccttga

SEQ ID NO: 1874 - DNA, 38 bp, Artificial Sequence
  Synthetic oligonucleotide
cccagacaactaccgcggagtagcggaagccgtactga

SEQ ID NO: 1875 - DNA, 36 bp, Artificial Sequence
  Synthetic oligonucleotide
ccgcgcatcacattgggctctgggatgcccgctgca

SEQ ID NO: 1876 - DNA, 35 bp, Artificial Sequence
  Synthetic oligonucleotide
cctagaccacgtgtgtgtcccgggtagggaagtct

SEQ ID NO: 1877 - DNA, 37 bp, Artificial Sequence; identical to SEQ ID NO: 1358
  Synthetic oligonucleotide

SEQ ID NO: 1878 - DNA, 36 bp, Artificial Sequence; identical to SEQ ID NO: 1779
  Synthetic oligonucleotide

SEQ ID NO: 1879 - DNA, 37 bp, Artificial Sequence
  Synthetic oligonucleotide
ccccaccgcgcacaccccgaactttacatatgcatga

SEQ ID NO: 1880 - DNA, 38 bp, Artificial Sequence
  Synthetic oligonucleotide
ccacacccattttgactgaacagcctatccggtactga

SEQ ID NO: 1881 - DNA, 36 bp, Artificial Sequence
  Synthetic oligonucleotide
cctgttcaattcatcctccaggttcgtgttacccta

SEQ ID NO: 1882 - DNA, 36 bp, Artificial Sequence
  Synthetic oligonucleotide
cctttcggactagcttctggcccatttggcgccata

SEQ ID NO: 1883 - DNA, 35 bp, Artificial Sequence
  Synthetic oligonucleotide
ctacaattagaagctcggtttcttctgcggtgacg

SEQ ID NO: 1884 - DNA, 38 bp, Artificial Sequence; identical to SEQ ID NO: 1367
  Synthetic oligonucleotide

SEQ ID NO: 1885 - DNA, 35 bp, Artificial Sequence
  Synthetic oligonucleotide
cgcgggggcctatatgctgtttccaccgctagtta

SEQ ID NO: 1886 - DNA, 35 bp, Artificial Sequence
  Synthetic oligonucleotide
cgctggctgcacgcacgcctgggcgcactgcccta

SEQ ID NO: 1887 - DNA, 35 bp, Artificial Sequence
  Synthetic oligonucleotide
cgtataggttaatacgtactggagcccggagggga

SEQ ID NO: 1888 - DNA, 37 bp, Artificial Sequence
  Synthetic oligonucleotide
cctgaatgggcggtccgcacttcgttagtatcccaga

SEQ ID NO: 1889 - DNA, 35 bp, Artificial Sequence
  Synthetic oligonucleotide
ctcaacgtagtctgcggagttactccagaatgacg

SEQ ID NO: 1890 - DNA, 38 bp, Artificial Sequence
  Synthetic oligonucleotide
gaacttcgcggtgactcgtgcccttcgttgtcctttga

SEQ ID NO: 1891 - DNA, 35 bp, Artificial Sequence
  Synthetic oligonucleotide
gaaccatcattggcttcatttagctattctacacc

SEQ ID NO: 1892 - DNA, 38 bp, Artificial Sequence
  Synthetic oligonucleotide
ctgtccttaaatggaaggtcattttggctcaggtctga

SEQ ID NO: 1893 - DNA, 37 bp, Artificial Sequence
  Synthetic oligonucleotide
gacacgggggcaaaggtggtttgtgtaccccgtacga

SEQ ID NO: 1894 - DNA, 37 bp, Artificial Sequence
  Synthetic oligonucleotide
gaaggtcatcggactgttctgtcaatccccctttgga

SEQ ID NO: 1895 - DNA, 35 bp, Artificial Sequence
  Synthetic oligonucleotide
gagctcaaatcggggactactgcattgtctactcg

SEQ ID NO: 1896 - DNA, 37 bp, Artificial Sequence; identical to SEQ ID NO: 1366
  Synthetic oligonucleotide

SEQ ID NO: 1897 - DNA, 38 bp, Artificial Sequence
  Synthetic oligonucleotide
gacgccttgaaagcgacgcctgatactcgggggcctga

SEQ ID NO: 1898 - DNA, 37 bp, Artificial Sequence
  Synthetic oligonucleotide
gagggccccaagtcaccgctgtagttctaggcccaga

SEQ ID NO: 1899 - DNA, 35 bp, Artificial Sequence
  Synthetic oligonucleotide
gacggtcgtactggagcatcctgagactgttcgag

SEQ ID NO: 1900 - DNA, 37 bp, Artificial Sequence; identical to SEQ ID NO: 1538
  Synthetic oligonucleotide

SEQ ID NO: 1901 - DNA, 35 bp, Artificial Sequence
  Synthetic oligonucleotide
gagtacaggtccggcgccctatcgagaaaggaaaa

SEQ ID NO: 1902 - DNA, 38 bp, Artificial Sequence
  Synthetic oligonucleotide
gagtactgccatgaggccagaggtaagaagccgaatga

SEQ ID NO: 1903 - DNA, 35 bp, Artificial Sequence
  Synthetic oligonucleotide
gagtacagttggattccgcccttgtatctgtacga

SEQ ID NO: 1904 - DNA, 37 bp, Artificial Sequence
  Synthetic oligonucleotide
gagtacctacccgtcgaatattgagattcgggaacga

SEQ ID NO: 1905 - DNA, 35 bp, Artificial Sequence
  Synthetic oligonucleotide
gagtctcatacccctgaatatgtttttatgctttc

SEQ ID NO: 1906 - DNA, 36 bp, Artificial Sequence
  Synthetic oligonucleotide
gagtggctcaaccagggtccagaattacaaaaaata

SEQ ID NO: 1907 - DNA, 36 bp, Artificial Sequence
  Synthetic oligonucleotide
gcaatgtcccctgttttctactaactctgatcttga

SEQ ID NO: 1908 - DNA, 36 bp, Artificial Sequence
  Synthetic oligonucleotide
gcagttctaaaggtggaagaatccaaatgacccaga

SEQ ID NO: 1909 - DNA, 35 bp, Artificial Sequence
  Synthetic oligonucleotide
gcaccttctcctttaattcccagccaataaccatc

SEQ ID NO: 1910 - DNA, 36 bp, Artificial Sequence
  Synthetic oligonucleotide
gatgtaacgggtctgcggggagtttgtcatgcggga

SEQ ID NO: 1911 - DNA, 35 bp, Artificial Sequence
  Synthetic oligonucleotide
gccatcatattcattattccatgcctccccatccc

SEQ ID NO: 1912 - DNA, 35 bp, Artificial Sequence; identical to SEQ ID NO: 1785
  Synthetic oligonucleotide

SEQ ID NO: 1913 - DNA, 36 bp, Artificial Sequence
  Synthetic oligonucleotide
gcaatgaacacctacacatacctgccttcacgatta

SEQ ID NO: 1914 - DNA, 36 bp, Artificial Sequence
  Synthetic oligonucleotide
gccctcacttcaacgtttcataactctacattaata

SEQ ID NO: 1915 - DNA, 38 bp, Artificial Sequence
  Synthetic oligonucleotide
gcgccgatggggcatcggtcgcgacagtcccgccgtga

SEQ ID NO: 1916 - DNA, 36 bp, Artificial Sequence
  Synthetic oligonucleotide
gcgttccccttggacaatatcactttcttatcgtaa

SEQ ID NO: 1917 - DNA, 35 bp, Artificial Sequence; identical to SEQ ID NO: 1371
  Synthetic oligonucleotide

SEQ ID NO: 1918 - DNA, 36 bp, Artificial Sequence
  Synthetic oligonucleotide
gcctctgccaagcaattcatcttaacgacctctcta

SEQ ID NO: 1919 - DNA, 35 bp, Artificial Sequence
  Synthetic oligonucleotide
gccgccggagcacggctgtctttatacgcactgta

SEQ ID NO: 1920 - DNA, 36 bp, Artificial Sequence; identical to SEQ ID NO: 1812
  Synthetic oligonucleotide

SEQ ID NO: 1921 - DNA, 38 bp, Artificial Sequence
  Synthetic oligonucleotide
gcgtacatagatctaggctttccatccaggatatgtga

SEQ ID NO: 1922 - DNA, 36 bp, Artificial Sequence
  Synthetic oligonucleotide
gcgccggcatactccttatattccactatccctgta

SEQ ID NO: 1923 - DNA, 38 bp, Artificial Sequence
  Synthetic oligonucleotide
gctaacgtactctttttttcaacttcactgactattga

SEQ ID NO: 1924 - DNA, 38 bp, Artificial Sequence
  Synthetic oligonucleotide
gctcccgaattgttttcctattaatcgttttcccatga

SEQ ID NO: 1925 - DNA, 36 bp, Artificial Sequence
  Synthetic oligonucleotide
gctgaacaggtcacggtcccccccacacgttaacta

SEQ ID NO: 1926 - DNA, 37 bp, Artificial Sequence
  Synthetic oligonucleotide
gctatacgactgcaagggtctgaccgcagggaattga

SEQ ID NO: 1927 - DNA, 36 bp, Artificial Sequence
  Synthetic oligonucleotide
gcttccgtatcaagagtggctcgcacccacagagta

SEQ ID NO: 1928 - DNA, 35 bp, Artificial Sequence
  Synthetic oligonucleotide
ggattacgtacccgactttttttctggttttcttt

SEQ ID NO: 1929 - DNA, 36 bp, Artificial Sequence
  Synthetic oligonucleotide
gggaccggaccctgtccttggtcgtttgatccacga

SEQ ID NO: 1930 - DNA, 38 bp, Artificial Sequence
  Synthetic oligonucleotide
ggtatttttttgtgctaatctcgccgaatcgtacctga

SEQ ID NO: 1931 - DNA, 36 bp, Artificial Sequence
  Synthetic oligonucleotide
ggctcaccgactccttactttgctggtactacctta

SEQ ID NO: 1932 - DNA, 37 bp, Artificial Sequence
  Synthetic oligonucleotide
gggaacgtaaggttttggtgaacagagggtagtaaga

SEQ ID NO: 1933 - DNA, 38 bp, Artificial Sequence
  Synthetic oligonucleotide
ggtgcttgtccctgtctctacgtaacttttgaagttga

SEQ ID NO: 1934 - DNA, 38 bp, Artificial Sequence; identical to SEQ ID NO: 1372
  Synthetic oligonucleotide

SEQ ID NO: 1935 - DNA, 35 bp, Artificial Sequence
  Synthetic oligonucleotide
ggggtccttttccatcacacatgtccagttccgta

SEQ ID NO: 1936 - DNA, 35 bp, Artificial Sequence
  Synthetic oligonucleotide
ggccttcttaccgactggggcttcgggttttacgt

SEQ ID NO: 1937 - DNA, 37 bp, Artificial Sequence
  Synthetic oligonucleotide
gtgggcccgcattgaaaccgcattcgtagagcctgga

SEQ ID NO: 1938 - DNA, 35 bp, Artificial Sequence; identical to SEQ ID NO: 1813
  Synthetic oligonucleotide

SEQ ID NO: 1939 - DNA, 37 bp, Artificial Sequence
  Synthetic oligonucleotide
gtacttgccgggttacgcagcgcgtccctcttcgcga

SEQ ID NO: 1940 - DNA, 37 bp, Artificial Sequence
  Synthetic oligonucleotide
gtgagctttacgtaatgcggtagttcgtactaacgga

SEQ ID NO: 1941 - DNA, 36 bp, Artificial Sequence; identical to SEQ ID NO: 1369
  Synthetic oligonucleotide

SEQ ID NO: 1942 - DNA, 38 bp, Artificial Sequence
  Synthetic oligonucleotide
gtcgcctatcccagtgcttcgaggggcgacgtgtctga

SEQ ID NO: 1943 - DNA, 37 bp, Artificial Sequence
  Synthetic oligonucleotide
gtgtacatttccgcgcaagctactcagttttttttga

SEQ ID NO: 1944 - DNA, 35 bp, Artificial Sequence
  Synthetic oligonucleotide
gtttactcctgtaccgtgaggtgaagggaaagcaa

SEQ ID NO: 1945 - DNA, 36 bp, Artificial Sequence; identical to SEQ ID NO: 1819
  Synthetic oligonucleotide

SEQ ID NO: 1946 - DNA, 37 bp, Artificial Sequence
  Synthetic oligonucleotide
gttttttactatggttcatctaggattccagtttaga

SEQ ID NO: 1947 - DNA, 36 bp, Artificial Sequence
  Synthetic oligonucleotide
gttctttcacggacggcctcctttccgatctattca

SEQ ID NO: 1948 - DNA, 36 bp, Artificial Sequence; identical to SEQ ID NO: 1373
  Synthetic oligonucleotide

SEQ ID NO: 1949 - DNA, 37 bp, Artificial Sequence
  Synthetic oligonucleotide
gttccgggctctttgtgtagtggtgagcacggcacga

SEQ ID NO: 1950 - DNA, 37 bp, Artificial Sequence
  Synthetic oligonucleotide
taaatgcccggttcattgaatcttcacaaagatggga

SEQ ID NO: 1951 - DNA, 36 bp, Artificial Sequence; identical to SEQ ID NO: 1374
  Synthetic oligonucleotide

SEQ ID NO: 1952 - DNA, 38 bp, Artificial Sequence
  Synthetic oligonucleotide
tacaccatgatacttacatctagcaaccttttttttga

SEQ ID NO: 1953 - DNA, 35 bp, Artificial Sequence
  Synthetic oligonucleotide
taaccgttcgctgggttccagtcccttgttaagcc

SEQ ID NO: 1954 - DNA, 36 bp, Artificial Sequence
  Synthetic oligonucleotide
tagtgttaaacgtgagtgcacttaatcaccctggta

SEQ ID NO: 1955 - DNA, 36 bp, Artificial Sequence
  Synthetic oligonucleotide
taccttgacctgcatcggttctcttcataatcctaa

SEQ ID NO: 1956 - DNA, 38 bp, Artificial Sequence
  Synthetic oligonucleotide
tagtcctgcactgttttacagttcttggtaatatttga

SEQ ID NO: 1957 - DNA, 35 bp, Artificial Sequence
  Synthetic oligonucleotide
tacttcaacacctcgctcgttacataccaatttct

SEQ ID NO: 1958 - DNA, 36 bp, Artificial Sequence; identical to SEQ ID NO: 1409
  Synthetic oligonucleotide

SEQ ID NO: 1959 - DNA, 35 bp, Artificial Sequence
  Synthetic oligonucleotide
tcatcgtcgcgtggccggtaggctgggaaatcctg

SEQ ID NO: 1960 - DNA, 37 bp, Artificial Sequence
  Synthetic oligonucleotide
tcacggatgcgaatcaaatgaactacctaagtccgga

SEQ ID NO: 1961 - DNA, 36 bp, Artificial Sequence; identical to SEQ ID NO: 1809
  Synthetic oligonucleotide

SEQ ID NO: 1962 - DNA, 35 bp, Artificial Sequence; identical to SEQ ID NO: 1548
  Synthetic oligonucleotide

SEQ ID NO: 1963 - DNA, 37 bp, Artificial Sequence
  Synthetic oligonucleotide
tccagccacatggatgaacagtgggccttttcacgga

SEQ ID NO: 1964 - DNA, 37 bp, Artificial Sequence; identical to SEQ ID NO: 1410
  Synthetic oligonucleotide

SEQ ID NO: 1965 - DNA, 38 bp, Artificial Sequence
  Synthetic oligonucleotide
tccttccgacgataacttacgtgtgacacgcgtactga

SEQ ID NO: 1966 - DNA, 38 bp, Artificial Sequence; identical to SEQ ID NO: 1379
  Synthetic oligonucleotide

SEQ ID NO: 1967 - DNA, 38 bp, Artificial Sequence
  Synthetic oligonucleotide
tcccgagtttgtcgatctcgagtggggcccttacctga

SEQ ID NO: 1968 - DNA, 36 bp, Artificial Sequence
  Synthetic oligonucleotide
tccctgtaacagggtctctctctttatatattctca

SEQ ID NO: 1969 - DNA, 37 bp, Artificial Sequence
  Synthetic oligonucleotide
tcgttcctcctttcgggtccgtgaggatccggaacga

SEQ ID NO: 1970 - DNA, 36 bp, Artificial Sequence; identical to SEQ ID NO: 1375
  Synthetic oligonucleotide

SEQ ID NO: 1971 - DNA, 37 bp, Artificial Sequence
  Synthetic oligonucleotide
tctcctttccaacgggacgctgtgttcccctcagtga

SEQ ID NO: 1972 - DNA, 35 bp, Artificial Sequence
  Synthetic oligonucleotide
tctgcactaccgtgaggtatggtgataggtggcga

SEQ ID NO: 1973 - DNA, 36 bp, Artificial Sequence
  Synthetic oligonucleotide
tcgggccagatcgcattcgtagttgctgtttccgta

SEQ ID NO: 1974 - DNA, 37 bp, Artificial Sequence
  Synthetic oligonucleotide
tgcacttaattccacttttccacccttttcactttga

SEQ ID NO: 1975 - DNA, 37 bp, Artificial Sequence
  Synthetic oligonucleotide
tgcacataattccacctttccacccttttcactttga

SEQ ID NO: 1976 - DNA, 38 bp, Artificial Sequence
  Synthetic oligonucleotide
tgagcatcttcacacgcatggctccacctcataaatga

SEQ ID NO: 1977 - DNA, 36 bp, Artificial Sequence; identical to SEQ ID NO: 1521
  Synthetic oligonucleotide

SEQ ID NO: 1978 - DNA, 37 bp, Artificial Sequence
  Synthetic oligonucleotide
tggtctgcacacgcacgtcgcctcttggggttatgga

SEQ ID NO: 1979 - DNA, 38 bp, Artificial Sequence
  Synthetic oligonucleotide
tgtagttttgcaatctatgggctaggaccatgtcatga

SEQ ID NO: 1980 - DNA, 37 bp, Artificial Sequence
  Synthetic oligonucleotide
tgctgttctcctggcgataggagattagccggacgga

SEQ ID NO: 1981 - DNA, 36 bp, Artificial Sequence
  Synthetic oligonucleotide
tgctaagagggctaaggccacacacttaataactta

SEQ ID NO: 1982 - DNA, 35 bp, Artificial Sequence; identical to SEQ ID NO: 1800
  Synthetic oligonucleotide

SEQ ID NO: 1983 - DNA, 38 bp, Artificial Sequence; identical to SEQ ID NO: 1380
  Synthetic oligonucleotide

SEQ ID NO: 1984 - DNA, 36 bp, Artificial Sequence
  Synthetic oligonucleotide
tggagtactagttccgaggacgtgagggaagactcg

SEQ ID NO: 1985 - DNA, 35 bp, Artificial Sequence
  Synthetic oligonucleotide
tggtccctggttccacttcattgagagcagagcat

SEQ ID NO: 1986 - DNA, 36 bp, Artificial Sequence
  Synthetic oligonucleotide
tgctcggatcttcgattcgtgccgcctgacaaatca

SEQ ID NO: 1987 - DNA, 35 bp, Artificial Sequence; identical to SEQ ID NO: 1415
  Synthetic oligonucleotide

SEQ ID NO: 1988 - DNA, 38 bp, Artificial Sequence
  Synthetic oligonucleotide
ttacgatgctcaagggtcccgttcgttcacagatatga

SEQ ID NO: 1989 - DNA, 38 bp, Artificial Sequence
  Synthetic oligonucleotide
ttacaaaccccggtgctctaaagttatcgatctcttga

SEQ ID NO: 1990 - DNA, 35 bp, Artificial Sequence
  Synthetic oligonucleotide
tgttggggggttagcacgggtttatgggttgcttc

SEQ ID NO: 1991 - DNA, 35 bp, Artificial Sequence
  Synthetic oligonucleotide
ttgcagtggagtaagccctgaccgaggagcgacga

SEQ ID NO: 1992 - DNA, 36 bp, Artificial Sequence
  Synthetic oligonucleotide
ttctcgcctacatctatctcaatattgtcctaccga

SEQ ID NO: 1993 - DNA, 36 bp, Artificial Sequence
  Synthetic oligonucleotide
ttgacatgcgatgtgcacagttagttaatttcaaca

SEQ ID NO: 1994 - DNA, 37 bp, Artificial Sequence
  Synthetic oligonucleotide
ttctatttactaaatacaacctttgtagcagacaaga

SEQ ID NO: 1995 - DNA, 36 bp, Artificial Sequence
  Synthetic oligonucleotide
ttccacacttcactgtacccactcttaccagccaca

SEQ ID NO: 1996 - DNA, 36 bp, Artificial Sequence
  Synthetic oligonucleotide
ttcctctagcctccgactggcgtgtgactctaaaga

SEQ ID NO: 1997 - DNA, 35 bp, Artificial Sequence
  Synthetic oligonucleotide
tttccgctatagtgcttctggtacgacgcgtacgg

SEQ ID NO: 1998 - DNA, 38 bp, Artificial Sequence
  Synthetic oligonucleotide
tttatactcatacccgaactgttccacaccgcaactga

SEQ ID NO: 1999 - DNA, 38 bp, Artificial Sequence
  Synthetic oligonucleotide
tttattcgccctttgttgacctacaccacatcacttga

SEQ ID NO: 2000 - DNA, 35 bp, Artificial Sequence; identical to SEQ ID NO: 1376
  Synthetic oligonucleotide

SEQ ID NO: 2001 - DNA, 38 bp, Artificial Sequence
  Synthetic oligonucleotide
ttgtagtttggccctttcgagggccgttgcctggttga

SEQ ID NO: 2002 - DNA, 38 bp, Artificial Sequence
  Synthetic oligonucleotide
tttttgttccataggtacggtctccggaggaatcgtga

SEQ ID NO: 2003 - DNA, 38 bp, Artificial Sequence
  Synthetic oligonucleotide
ttttgctaacgcgacggaggcgccgagagctatgctga

SEQ ID NO: 2004 - DNA, 35 bp, Artificial Sequence; identical to SEQ ID NO: 1370
  Synthetic oligonucleotide

SEQ ID NO: 2005 - DNA, 37 bp, Artificial Sequence; identical to SEQ ID NO: 1420
  Synthetic oligonucleotide

SEQ ID NO: 2006 - DNA, 36 bp, Artificial Sequence; identical to SEQ ID NO: 1422
  Synthetic oligonucleotide

SEQ ID NO: 2007 - DNA, 36 bp, Artificial Sequence; identical to SEQ ID NO: 1423
  Synthetic oligonucleotide

SEQ ID NO: 2008 - DNA, 37 bp, Artificial Sequence
  Synthetic oligonucleotide
aacgcctaactggacagaaaaatcgtacgctaccaga

SEQ ID NO: 2009 - DNA, 38 bp, Artificial Sequence; identical to SEQ ID NO: 1424
  Synthetic oligonucleotide

SEQ ID NO: 2010 - DNA, 38 bp, Artificial Sequence; identical to SEQ ID NO: 1563
  Synthetic oligonucleotide

SEQ ID NO: 2011 - DNA, 35 bp, Artificial Sequence
  Synthetic oligonucleotide
tggactggtcgtggggtgtgaacgaatccaatgtg

SEQ ID NO: 2012 - DNA, 38 bp, Artificial Sequence; identical to SEQ ID NO: 1502
  Synthetic oligonucleotide

SEQ ID NO: 2013 - DNA, 36 bp, Artificial Sequence
  Synthetic oligonucleotide
tgcaccctacccatttagatgtatcagccacgggca

SEQ ID NO: 2014 - DNA, 36 bp, Artificial Sequence
  Synthetic oligonucleotide
aacccgtagtagcacaccctgtctaacccaaatcaa

SEQ ID NO: 2015 - DNA, 35 bp, Artificial Sequence
  Synthetic oligonucleotide
aaacgcgatcttacatcattacaatccctcaaccc

SEQ ID NO: 2016 - DNA, 35 bp, Artificial Sequence
  Synthetic oligonucleotide
aaatcccatcgagcccttaacccagaccaactacg

SEQ ID NO: 2017 - DNA, 38 bp, Artificial Sequence
  Synthetic oligonucleotide
aagaacatgagactgaatatcgtacgcgagtaaaatga

SEQ ID NO: 2018 - DNA, 35 bp, Artificial Sequence
  Synthetic oligonucleotide
aagagtataggtccgagggaggacctactaattac

SEQ ID NO: 2019 - DNA, 38 bp, Artificial Sequence
  Synthetic oligonucleotide
aatttcggttacaccccgctctctatcactatacgtga

SEQ ID NO: 2020 - DNA, 37 bp, Artificial Sequence
  Synthetic oligonucleotide
accactagagtcctcaagaactcatccacccacctga

SEQ ID NO: 2021 - DNA, 35 bp, Artificial Sequence
  Synthetic oligonucleotide
acggtatttgttttttcgattgatggggaagtata

SEQ ID NO: 2022 - DNA, 37 bp, Artificial Sequence
  Synthetic oligonucleotide
accggcgaataacgccaaagcctgcgactggccttga

SEQ ID NO: 2023 - DNA, 35 bp, Artificial Sequence
  Synthetic oligonucleotide
acgcttttaaaaccatacactcgataactataccc

SEQ ID NO: 2024 - DNA, 36 bp, Artificial Sequence
  Synthetic oligonucleotide
accctactattaacccatcaaaagttcgctacccta

SEQ ID NO: 2025 - DNA, 36 bp, Artificial Sequence
  Synthetic oligonucleotide
acgcccatcgtttcgggcctttgtccatttcataca

SEQ ID NO: 2026 - DNA, 35 bp, Artificial Sequence
  Synthetic oligonucleotide
accttcccttcaacgggtgtattccggcgggtagc

SEQ ID NO: 2027 - DNA, 36 bp, Artificial Sequence
  Synthetic oligonucleotide
acttcacccacacaataccatcatcgataactcaaa

SEQ ID NO: 2028 - DNA, 35 bp, Artificial Sequence
  Synthetic oligonucleotide
agcggctaatcactgaagtagccccaggttttgaa

SEQ ID NO: 2029 - DNA, 37 bp, Artificial Sequence
  Synthetic oligonucleotide
agcaggcccaacggcctctgggttagtatccgcgtga

SEQ ID NO: 2030 - DNA, 36 bp, Artificial Sequence
  Synthetic oligonucleotide
agccgatccttgtccccgttgaaggccggatcgaaa

SEQ ID NO: 2031 - DNA, 38 bp, Artificial Sequence
  Synthetic oligonucleotide
aggcatctcaagcgctcggaggtacgcactatttctga

SEQ ID NO: 2032 - DNA, 35 bp, Artificial Sequence
  Synthetic oligonucleotide
agagacggcttcaacgcggctttcgggctctcttc

SEQ ID NO: 2033 - DNA, 35 bp, Artificial Sequence
  Synthetic oligonucleotide
agtacccccttatccctggggcctcccggggtacc

SEQ ID NO: 2034 - DNA, 36 bp, Artificial Sequence
  Synthetic oligonucleotide
atcaacaccattccctatatccaacactaaacgtaa

SEQ ID NO: 2035 - DNA, 37 bp, Artificial Sequence
  Synthetic oligonucleotide
agtttctcgacaggggcactctggccacgtggctgga

SEQ ID NO: 2036 - DNA, 35 bp, Artificial Sequence
  Synthetic oligonucleotide
aggggatactcagaacccgatgtaaatcttaagaa

SEQ ID NO: 2037 - DNA, 37 bp, Artificial Sequence
  Synthetic oligonucleotide
atcttcccaccacttgtgccttatcattgccccccga

SEQ ID NO: 2038 - DNA, 35 bp, Artificial Sequence; identical to SEQ ID NO: 1663
  Synthetic oligonucleotide

SEQ ID NO: 2039 - DNA, 35 bp, Artificial Sequence
  Synthetic oligonucleotide
ccagctagaccagacgaatgtggaactgaatctgc

SEQ ID NO: 2040 - DNA, 35 bp, Artificial Sequence
  Synthetic oligonucleotide
ccctaaaagcgacccactcagcggatttgacttgc

SEQ ID NO: 2041 - DNA, 35 bp, Artificial Sequence
  Synthetic oligonucleotide
ccaccccaccgagaggggctcatggcatacgctga

SEQ ID NO: 2042 - DNA, 36 bp, Artificial Sequence
  Synthetic oligonucleotide
cccgggaacacggtccgttcgtaggagaacgaccaa

SEQ ID NO: 2043 - DNA, 38 bp, Artificial Sequence
  Synthetic oligonucleotide
ccatgctctccggaggccgttttacggagggagcgtga

SEQ ID NO: 2044 - DNA, 36 bp, Artificial Sequence; identical to SEQ ID NO: 1422
  Synthetic oligonucleotide

SEQ ID NO: 2045 - DNA, 37 bp, Artificial Sequence
  Synthetic oligonucleotide
cgcttccgctacgtaccccccgggcgttcgccttgga

SEQ ID NO: 2046 - DNA, 37 bp, Artificial Sequence
  Synthetic oligonucleotide
ctcaaagcaacttgctggtgccagcaccgaagtccga

SEQ ID NO: 2047 - DNA, 38 bp, Artificial Sequence
  Synthetic oligonucleotide
ccttacatttatgttgaggcccccggtaattattgtga

SEQ ID NO: 2048 - DNA, 35 bp, Artificial Sequence
  Synthetic oligonucleotide
ctggtaccctgcgattcgggtctcgacttggttcc

SEQ ID NO: 2049 - DNA, 37 bp, Artificial Sequence
  Synthetic oligonucleotide
gaacgtacgccttcctcgtaataattggaaccttcta

SEQ ID NO: 2050 - DNA, 35 bp, Artificial Sequence
  Synthetic oligonucleotide
cttcgccatcttccggtcggcgaaaaacaggccac

SEQ ID NO: 2051 - DNA, 35 bp, Artificial Sequence; identical to SEQ ID NO: 1689
  Synthetic oligonucleotide

SEQ ID NO: 2052 - DNA, 37 bp, Artificial Sequence
  Synthetic oligonucleotide
gaggacattggaccgccccatacgaacgccactctga

SEQ ID NO: 2053 - DNA, 36 bp, Artificial Sequence
  Synthetic oligonucleotide
gagtacgactaattatcttaacaacatttatgaaca

SEQ ID NO: 2054 - DNA, 35 bp, Artificial Sequence
  Synthetic oligonucleotide
gagtagttgcatcgaagcggaggcttttccggatc

SEQ ID NO: 2055 - DNA, 36 bp, Artificial Sequence
  Synthetic oligonucleotide
gcactgtccccggttttctactaactctgatcttga

SEQ ID NO: 2056 - DNA, 38 bp, Artificial Sequence
  Synthetic oligonucleotide
gcgtcctgcactgttttacagttcttggtaatatttga

SEQ ID NO: 2057 - DNA, 37 bp, Artificial Sequence
  Synthetic oligonucleotide
ggcacacacctagcctgaaaggtcctttaacattgga

SEQ ID NO: 2058 - DNA, 37 bp, Artificial Sequence
  Synthetic oligonucleotide
ggcccagtactcacgctagaccctcgaggggactcga

SEQ ID NO: 2059 - DNA, 35 bp, Artificial Sequence
  Synthetic oligonucleotide
ggacccgtaccgacacctatagccttcccccagag

SEQ ID NO: 2060 - DNA, 37 bp, Artificial Sequence
  Synthetic oligonucleotide
ggtctagcgggtacaccttctggggttcggtttgtga

SEQ ID NO: 2061 - DNA, 37 bp, Artificial Sequence; identical to SEQ ID NO: 1710
  Synthetic oligonucleotide

SEQ ID NO: 2062 - DNA, 37 bp, Artificial Sequence
  Synthetic oligonucleotide
gggaactcgcaaaatttcttgaccccaaggtacccga

SEQ ID NO: 2063 - DNA, 37 bp, Artificial Sequence
  Synthetic oligonucleotide
ggtccttgagcatcaaatcgctaagggggtccgcaga

SEQ ID NO: 2064 - DNA, 37 bp, Artificial Sequence
  Synthetic oligonucleotide
gtctggtttttatattcagagccctgtttgggttaga

SEQ ID NO: 2065 - DNA, 35 bp, Artificial Sequence
  Synthetic oligonucleotide
taaggatagcgctcggcctttattgatacttgttt

SEQ ID NO: 2066 - DNA, 38 bp, Artificial Sequence
  Synthetic oligonucleotide
taaccgcatcactttcacttgacactaatacctcatga

SEQ ID NO: 2067 - DNA, 36 bp, Artificial Sequence
  Synthetic oligonucleotide
taatatccctgctctcgaacacttcgctttaaacta

SEQ ID NO: 2068 - DNA, 36 bp, Artificial Sequence; identical to SEQ ID NO: 1490
  Synthetic oligonucleotide

SEQ ID NO: 2069 - DNA, 36 bp, Artificial Sequence
  Synthetic oligonucleotide
gttccgctccagggaacagaggatcagggagttcga

SEQ ID NO: 2070 - DNA, 37 bp, Artificial Sequence
  Synthetic oligonucleotide
tatatccgcatcccgaagcatagatctcaagtactga

SEQ ID NO: 2071 - DNA, 38 bp, Artificial Sequence
  Synthetic oligonucleotide
tatacacccgaaaagcgggttatcaaaaattatcatga

SEQ ID NO: 2072 - DNA, 35 bp, Artificial Sequence
  Synthetic oligonucleotide
tactatcttctagttcaacagccacttatgaccca

SEQ ID NO: 2073 - DNA, 35 bp, Artificial Sequence
  Synthetic oligonucleotide
tacgccccttaacctctaaccagcgagggtagttc

SEQ ID NO: 2074 - DNA, 36 bp, Artificial Sequence
  Synthetic oligonucleotide
tcaacgaccgcgaggttgaacgacgtggggactgta

SEQ ID NO: 2075 - DNA, 38 bp, Artificial Sequence
  Synthetic oligonucleotide
tattatgttcacggccggaggggggccgggggatgcga

SEQ ID NO: 2076 - DNA, 36 bp, Artificial Sequence
  Synthetic oligonucleotide
tcgcatacaacaaaattacgcctaaccataacacca

SEQ ID NO: 2077 - DNA, 38 bp, Artificial Sequence
  Synthetic oligonucleotide
tgaagtactcgtaagttttatagtttttcattctatga

SEQ ID NO: 2078 - DNA, 36 bp, Artificial Sequence
  Synthetic oligonucleotide
tgacaaaagtcccctgaggggtggactcgtgaccca

SEQ ID NO: 2079 - DNA, 35 bp, Artificial Sequence
  Synthetic oligonucleotide
tgcgggtgcatgccgagtgagccgaacgacccatc

SEQ ID NO: 2080 - DNA, 38 bp, Artificial Sequence
  Synthetic oligonucleotide
tggccggggtttggccccagaaagatacgccggggtga

SEQ ID NO: 2081 - DNA, 36 bp, Artificial Sequence
  Synthetic oligonucleotide
tggacctactacgcttgggcaacgcgggggccccta

SEQ ID NO: 2082 - DNA, 38 bp, Artificial Sequence
  Synthetic oligonucleotide
tggacgattttgccaccgttagtacaacccgggggtga

SEQ ID NO: 2083 - DNA, 35 bp, Artificial Sequence
  Synthetic oligonucleotide
tgtagcccaggagaaaccctaccccaacggacgcg

SEQ ID NO: 2084 - DNA, 36 bp, Artificial Sequence
  Synthetic oligonucleotide
tgtggcgagggccgcctccaggcatgaaatgtatca

SEQ ID NO: 2085 - DNA, 38 bp, Artificial Sequence
  Synthetic oligonucleotide
tgtttgcttcatagtaacgttgagactgcataaactga

SEQ ID NO: 2086 - DNA, 35 bp, Artificial Sequence
  Synthetic oligonucleotide
tgttagttccactttccgataatccgcctccctta

SEQ ID NO: 2087 - DNA, 35 bp, Artificial Sequence
  Synthetic oligonucleotide
ttctcgacggccttccaggcgggagacaaagctgc

SEQ ID NO: 2088 - DNA, 38 bp, Artificial Sequence
  Synthetic oligonucleotide
ttcatggacgaaacgggcggcggacatttattcgctga

SEQ ID NO: 2089 - DNA, 38 bp, Artificial Sequence
  Synthetic oligonucleotide
tttgctccggtgtttgaccctcgcagtccggagagtga

SEQ ID NO: 2090 - DNA, 35 bp, Artificial Sequence; identical to SEQ ID NO: 1778
  Synthetic oligonucleotide

SEQ ID NO: 2091 - DNA, 36 bp, Artificial Sequence; identical to SEQ ID NO: 1361
  Synthetic oligonucleotide

SEQ ID NO: 2092 - DNA, 35 bp, Artificial Sequence; identical to SEQ ID NO: 1362
  Synthetic oligonucleotide

SEQ ID NO: 2093 - DNA, 38 bp, Artificial Sequence; identical to SEQ ID NO: 1787
  Synthetic oligonucleotide

SEQ ID NO: 2094 - DNA, 37 bp, Artificial Sequence
  Synthetic oligonucleotide
aacgcgctggtcttcgtgtattgtttcgcgctaagga

SEQ ID NO: 2095 - DNA, 35 bp, Artificial Sequence
  Synthetic oligonucleotide
aactatcattcatcttggtgtgatctacctttgtt

SEQ ID NO: 2096 - DNA, 37 bp, Artificial Sequence; identical to SEQ ID NO: 1776
  Synthetic oligonucleotide

SEQ ID NO: 2097 - DNA, 36 bp, Artificial Sequence
  Synthetic oligonucleotide
cttctatatatctcattcttccggtttattcaatca

SEQ ID NO: 2098 - DNA, 36 bp, Artificial Sequence; identical to SEQ ID NO: 1357
  Synthetic oligonucleotide

SEQ ID NO: 2099 - DNA, 37 bp, Artificial Sequence; identical to SEQ ID NO: 1366
  Synthetic oligonucleotide

SEQ ID NO: 2100 - DNA, 35 bp, Artificial Sequence; identical to SEQ ID NO: 1511
  Synthetic oligonucleotide

SEQ ID NO: 2101 - DNA, 35 bp, Artificial Sequence
  Synthetic oligonucleotide
acgcttcttttacttagctaaccattattcattgt

SEQ ID NO: 2102 - DNA, 37 bp, Artificial Sequence; identical to SEQ ID NO: 1358
  Synthetic oligonucleotide

SEQ ID NO: 2103 - DNA, 38 bp, Artificial Sequence; identical to SEQ ID NO: 1783
  Synthetic oligonucleotide

SEQ ID NO: 2104 - DNA, 35 bp, Artificial Sequence; identical to SEQ ID NO: 1785
  Synthetic oligonucleotide

SEQ ID NO: 2105 - DNA, 38 bp, Artificial Sequence; identical to SEQ ID NO: 1367
  Synthetic oligonucleotide

SEQ ID NO: 2106 - DNA, 35 bp, Artificial Sequence; identical to SEQ ID NO: 1799
  Synthetic oligonucleotide

SEQ ID NO: 2107 - DNA, 35 bp, Artificial Sequence; identical to SEQ ID NO: 1415
  Synthetic oligonucleotide

SEQ ID NO: 2108 - DNA, 36 bp, Artificial Sequence; identical to SEQ ID NO: 1409
  Synthetic oligonucleotide

SEQ ID NO: 2109 - DNA, 36 bp, Artificial Sequence; identical to SEQ ID NO: 1809
  Synthetic oligonucleotide

SEQ ID NO: 2110 - DNA, 35 bp, Artificial Sequence; identical to SEQ ID NO: 1377
  Synthetic oligonucleotide

SEQ ID NO: 2111 - DNA, 35 bp, Artificial Sequence; identical to SEQ ID NO: 1816
  Synthetic oligonucleotide

SEQ ID NO: 2112 - DNA, 38 bp, Artificial Sequence
  Synthetic oligonucleotide
ttctgccggtttttacggtcaaattctagatagtttga

SEQ ID NO: 2113 - DNA, 36 bp, Artificial Sequence; identical to SEQ ID NO: 1540
  Synthetic oligonucleotide

SEQ ID NO: 2114 - DNA, 38 bp, Artificial Sequence; identical to SEQ ID NO: 1372
  Synthetic oligonucleotide

SEQ ID NO: 2115 - DNA, 36 bp, Artificial Sequence; identical to SEQ ID NO: 1375
  Synthetic oligonucleotide

SEQ ID NO: 2116 - DNA, 35 bp, Artificial Sequence; identical to SEQ ID NO: 1376
  Synthetic oligonucleotide

SEQ ID NO: 2117 - DNA, 35 bp, Artificial Sequence; identical to SEQ ID NO: 1813
  Synthetic oligonucleotide

SEQ ID NO: 2118 - DNA, 36 bp, Artificial Sequence; identical to SEQ ID NO: 1814
  Synthetic oligonucleotide

SEQ ID NO: 2119 - DNA, 36 bp, Artificial Sequence; identical to SEQ ID NO: 1818
  Synthetic oligonucleotide

SEQ ID NO: 2120 - DNA, 36 bp, Artificial Sequence; identical to SEQ ID NO: 1382
  Synthetic oligonucleotide

SEQ ID NO: 2121 - DNA, 36 bp, Artificial Sequence; identical to SEQ ID NO: 1521
  Synthetic oligonucleotide

SEQ ID NO: 2122 - DNA, 36 bp, Artificial Sequence; identical to SEQ ID NO: 1369
  Synthetic oligonucleotide

SEQ ID NO: 2123 - DNA, 35 bp, Artificial Sequence; identical to SEQ ID NO: 1370
  Synthetic oligonucleotide

SEQ ID NO: 2124 - DNA, 37 bp, Artificial Sequence; identical to SEQ ID NO: 1420
  Synthetic oligonucleotide

SEQ ID NO: 2125 - DNA, 36 bp, Artificial Sequence; identical to SEQ ID NO: 1374
  Synthetic oligonucleotide

SEQ ID NO: 2126 - DNA, 36 bp, Artificial Sequence; identical to SEQ ID NO: 1819
  Synthetic oligonucleotide

SEQ ID NO: 2127 - DNA, 38 bp, Artificial Sequence; identical to SEQ ID NO: 1380
  Synthetic oligonucleotide

SEQ ID NO: 2128 - DNA, 35 bp, Artificial Sequence
  Synthetic oligonucleotide
aaatcccaacgagcccttaacccagaccaactaca

SEQ ID NO: 2129 - DNA, 37 bp, Artificial Sequence; identical to SEQ ID NO: 1826
  Synthetic oligonucleotide

SEQ ID NO: 2130 - DNA, 37 bp, Artificial Sequence
  Synthetic oligonucleotide
aacgtagtgaggtattccgcaccccctttattcgtga

SEQ ID NO: 2131 - DNA, 36 bp, Artificial Sequence
  Synthetic oligonucleotide
aacccaattcacatacactctcacccacactaaaca

SEQ ID NO: 2132 - DNA, 38 bp, Artificial Sequence
  Synthetic oligonucleotide
aaaaccgctcgcttaagctttctttgactttttgatga

SEQ ID NO: 2133 - DNA, 36 bp, Artificial Sequence
  Synthetic oligonucleotide
aatgcacaaccgcgctgaaaatcacctttatcgaaa

SEQ ID NO: 2134 - DNA, 37 bp, Artificial Sequence
  Synthetic oligonucleotide
aattgatctttttgtttacgaattcgtattccattga

SEQ ID NO: 2135 - DNA, 38 bp, Artificial Sequence
  Synthetic oligonucleotide
aatcaccacaaatactttcgcctatctcgcttatctga

SEQ ID NO: 2136 - DNA, 36 bp, Artificial Sequence
  Synthetic oligonucleotide
aacttgtcttatgctctccaccttacctattaacaa

SEQ ID NO: 2137 - DNA, 37 bp, Artificial Sequence
  Synthetic oligonucleotide
aactcctgatatcgtttcttcgtttccgccaattcta

SEQ ID NO: 2138 - DNA, 35 bp, Artificial Sequence; identical to SEQ ID NO: 1832
  Synthetic oligonucleotide

SEQ ID NO: 2139 - DNA, 38 bp, Artificial Sequence; identical to SEQ ID NO: 1795
  Synthetic oligonucleotide

SEQ ID NO: 2140 - DNA, 36 bp, Artificial Sequence
  Synthetic oligonucleotide
accgggaacatttctgttgtttcatttcatcactaa

SEQ ID NO: 2141 - DNA, 35 bp, Artificial Sequence; identical to SEQ ID NO: 2101
  Synthetic oligonucleotide

SEQ ID NO: 2142 - DNA, 37 bp, Artificial Sequence; identical to SEQ ID NO: 1838
  Synthetic oligonucleotide

SEQ ID NO: 2143 - DNA, 35 bp, Artificial Sequence
  Synthetic oligonucleotide
accgacgcactctcctttctaaaatctatctactt

SEQ ID NO: 2144 - DNA, 35 bp, Artificial Sequence
  Synthetic oligonucleotide
acgttaatttcccaaaaacgatcccactttgaaca

SEQ ID NO: 2145 - DNA, 36 bp, Artificial Sequence
  Synthetic oligonucleotide
actcgcccttcacgactttatcaaaatgtactttca

SEQ ID NO: 2146 - DNA, 38 bp, Artificial Sequence; identical to SEQ ID NO: 1842
  Synthetic oligonucleotide

SEQ ID NO: 2147 - DNA, 35 bp, Artificial Sequence; identical to SEQ ID NO: 1368
  Synthetic oligonucleotide

SEQ ID NO: 2148 - DNA, 36 bp, Artificial Sequence; identical to SEQ ID NO: 1388
  Synthetic oligonucleotide

SEQ ID NO: 2149 - DNA, 36 bp, Artificial Sequence
  Synthetic oligonucleotide
acttcgcccacacaataccattatcgataactcaaa

SEQ ID NO: 2150 - DNA, 35 bp, Artificial Sequence; identical to SEQ ID NO: 1362
  Synthetic oligonucleotide

SEQ ID NO: 2151 - DNA, 36 bp, Artificial Sequence; identical to SEQ ID NO: 1361
  Synthetic oligonucleotide

SEQ ID NO: 2152 - DNA, 38 bp, Artificial Sequence; identical to SEQ ID NO: 1794
  Synthetic oligonucleotide

SEQ ID NO: 2153 - DNA, 36 bp, Artificial Sequence; identical to SEQ ID NO: 1357
  Synthetic oligonucleotide

SEQ ID NO: 2154 - DNA, 35 bp, Artificial Sequence; identical to SEQ ID NO: 1391
  Synthetic oligonucleotide

SEQ ID NO: 2155 - DNA, 35 bp, Artificial Sequence
  Synthetic oligonucleotide
atatgcccgctccctactcaatatcttcccataca

SEQ ID NO: 2156 - DNA, 35 bp, Artificial Sequence; identical to SEQ ID NO: 1365
  Synthetic oligonucleotide

SEQ ID NO: 2157 - DNA, 37 bp, Artificial Sequence
  Synthetic oligonucleotide
atgcattatcccagctttaaacgctctacccaccgaa

SEQ ID NO: 2158 - DNA, 36 bp, Artificial Sequence; identical to SEQ ID NO: 1863
  Synthetic oligonucleotide

SEQ ID NO: 2159 - DNA, 35 bp, Artificial Sequence
  Synthetic oligonucleotide
atctgcttgtaagtccccgtgtatacctgttcagt

SEQ ID NO: 2160 - DNA, 35 bp, Artificial Sequence
  Synthetic oligonucleotide
atcactggagtgatagtctgggccctgaaactcct

SEQ ID NO: 2161 - DNA, 36 bp, Artificial Sequence
  Synthetic oligonucleotide
atcaccgtccttatcatacccacttcgttttttata

SEQ ID NO: 2162 - DNA, 35 bp, Artificial Sequence; identical to SEQ ID NO: 1511
  Synthetic oligonucleotide

SEQ ID NO: 2163 - DNA, 37 bp, Artificial Sequence; identical to SEQ ID NO: 1865
  Synthetic oligonucleotide

SEQ ID NO: 2164 - DNA, 36 bp, Artificial Sequence; identical to SEQ ID NO: 1869
  Synthetic oligonucleotide

SEQ ID NO: 2165 - DNA, 37 bp, Artificial Sequence; identical to SEQ ID NO: 1358
  Synthetic oligonucleotide

SEQ ID NO: 2166 - DNA, 38 bp, Artificial Sequence; identical to SEQ ID NO: 1871
  Synthetic oligonucleotide

SEQ ID NO: 2167 - DNA, 35 bp, Artificial Sequence
  Synthetic oligonucleotide
ccagcacactgacttttccttacccacctcctttc

SEQ ID NO: 2168 - DNA, 38 bp, Artificial Sequence
  Synthetic oligonucleotide
ccccgccatggtttcaaatggctgaagctatctattga

SEQ ID NO: 2169 - DNA, 38 bp, Artificial Sequence
  Synthetic oligonucleotide
ccggtatctgcactcgtttggaatcgaccaacccctga

SEQ ID NO: 2170 - DNA, 37 bp, Artificial Sequence
  Synthetic oligonucleotide
ccgtctactgcaacaggaggccaccacggtcttccga

SEQ ID NO: 2171 - DNA, 37 bp, Artificial Sequence
  Synthetic oligonucleotide
cgctcttcttactttattcaatatggtcataaattga

SEQ ID NO: 2172 - DNA, 37 bp, Artificial Sequence
  Synthetic oligonucleotide
cgtttctttatcccaaagtcattcgcatgccctttga

SEQ ID NO: 2173 - DNA, 38 bp, Artificial Sequence; identical to SEQ ID NO: 1367
  Synthetic oligonucleotide

SEQ ID NO: 2174 - DNA, 35 bp, Artificial Sequence
  Synthetic oligonucleotide
cgcgcctccttccccgatgatatgccactgccgca

SEQ ID NO: 2175 - DNA, 35 bp, Artificial Sequence; identical to SEQ ID NO: 1885
  Synthetic oligonucleotide

SEQ ID NO: 2176 - DNA, 37 bp, Artificial Sequence
  Synthetic oligonucleotide
cgcttcttgggcaggaggcgacacaggttcatattga

SEQ ID NO: 2177 - DNA, 35 bp, Artificial Sequence; identical to SEQ ID NO: 1891
  Synthetic oligonucleotide

SEQ ID NO: 2178 - DNA, 37 bp, Artificial Sequence
  Synthetic oligonucleotide
ctgtcccttgtaaggattattcgtaggtatttagtga

SEQ ID NO: 2179 - DNA, 37 bp, Artificial Sequence
  Synthetic oligonucleotide
ctgcggtcacctgcatagtaattaataatatacgtga

SEQ ID NO: 2180 - DNA, 37 bp, Artificial Sequence
  Synthetic oligonucleotide
cttcgctaaatggctgggggaatcatactgccggaga

SEQ ID NO: 2181 - DNA, 35 bp, Artificial Sequence
  Synthetic oligonucleotide
ctcctgcagatcttggtacctcttgttctttcata

SEQ ID NO: 2182 - DNA, 37 bp, Artificial Sequence; identical to SEQ ID NO: 1366
  Synthetic oligonucleotide

SEQ ID NO: 2183 - DNA, 35 bp, Artificial Sequence
  Synthetic oligonucleotide
gaggacttttacttatcaaccccacctttcgaaca

SEQ ID NO: 2184 - DNA, 35 bp, Artificial Sequence
  Synthetic oligonucleotide
gagtacttgactcttgtatattttttctccccctt

SEQ ID NO: 2185 - DNA, 37 bp, Artificial Sequence
  Synthetic oligonucleotide
gatcccgttccttttttaacgatctattttcttttga

SEQ ID NO: 2186 - DNA, 35 bp, Artificial Sequence; identical to SEQ ID NO: 1911
  Synthetic oligonucleotide

SEQ ID NO: 2187 - DNA, 35 bp, Artificial Sequence; identical to SEQ ID NO: 1785
  Synthetic oligonucleotide

SEQ ID NO: 2188 - DNA, 35 bp, Artificial Sequence; identical to SEQ ID NO: 1371
  Synthetic oligonucleotide

SEQ ID NO: 2189 - DNA, 36 bp, Artificial Sequence; identical to SEQ ID NO: 1914
  Synthetic oligonucleotide

SEQ ID NO: 2190 - DNA, 36 bp, Artificial Sequence; identical to SEQ ID NO: 1918
  Synthetic oligonucleotide

SEQ ID NO: 2191 - DNA, 36 bp, Artificial Sequence; identical to SEQ ID NO: 1922
  Synthetic oligonucleotide

SEQ ID NO: 2192 - DNA, 37 bp, Artificial Sequence
  Synthetic oligonucleotide
gcggaatagtccacgggacgctaagcgtggagctcga

SEQ ID NO: 2193 - DNA, 36 bp, Artificial Sequence
  Synthetic oligonucleotide
gcgtccactctatccttgctttaatacatcgttaaa

SEQ ID NO: 2194 - DNA, 38 bp, Artificial Sequence
  Synthetic oligonucleotide
gcctttccaggttcttcttttcgaccgtttatttttga

SEQ ID NO: 2195 - DNA, 38 bp, Artificial Sequence
  Synthetic oligonucleotide
ggccctggtggcaccaagccgcgagcccactcaactga

SEQ ID NO: 2196 - DNA, 35 bp, Artificial Sequence
  Synthetic oligonucleotide
ggtgcccaactggtgcttctccttctttgagacgt

SEQ ID NO: 2197 - DNA, 38 bp, Artificial Sequence
  Synthetic oligonucleotide
gggagtttttatcctacaatgtaaattatcatacttga

SEQ ID NO: 2198 - DNA, 38 bp, Artificial Sequence; identical to SEQ ID NO: 1372
  Synthetic oligonucleotide

SEQ ID NO: 2199 - DNA, 36 bp, Artificial Sequence
  Synthetic oligonucleotide
ggtcccactctgaccatcaattcacctaacttgtaa

SEQ ID NO: 2200 - DNA, 35 bp, Artificial Sequence; identical to SEQ ID NO: 1377
  Synthetic oligonucleotide

SEQ ID NO: 2201 - DNA, 37 bp, Artificial Sequence; identical to SEQ ID NO: 1937
  Synthetic oligonucleotide

SEQ ID NO: 2202 - DNA, 36 bp, Artificial Sequence; identical to SEQ ID NO: 1369
  Synthetic oligonucleotide

SEQ ID NO: 2203 - DNA, 38 bp, Artificial Sequence; identical to SEQ ID NO: 1543
  Synthetic oligonucleotide

SEQ ID NO: 2204 - DNA, 35 bp, Artificial Sequence
  Synthetic oligonucleotide
gtcgaaagcggagcgactctccgcacaaccccaag

SEQ ID NO: 2205 - DNA, 36 bp, Artificial Sequence; identical to SEQ ID NO: 1373
  Synthetic oligonucleotide

SEQ ID NO: 2206 - DNA, 36 bp, Artificial Sequence; identical to SEQ ID NO: 1374
  Synthetic oligonucleotide

SEQ ID NO: 2207 - DNA, 35 bp, Artificial Sequence
  Synthetic oligonucleotide
gttcagattttgctttgtgacctggtgtggggtct

SEQ ID NO: 2208 - DNA, 37 bp, Artificial Sequence; identical to SEQ ID NO: 1949
  Synthetic oligonucleotide

SEQ ID NO: 2209 - DNA, 36 bp, Artificial Sequence; identical to SEQ ID NO: 1819
  Synthetic oligonucleotide

SEQ ID NO: 2210 - DNA, 35 bp, Artificial Sequence; identical to SEQ ID NO: 1378
  Synthetic oligonucleotide

SEQ ID NO: 2211 - DNA, 36 bp, Artificial Sequence
  Synthetic oligonucleotide
tactctagtcagaggatctcttgcgatcaatatgga

SEQ ID NO: 2212 - DNA, 35 bp, Artificial Sequence
  Synthetic oligonucleotide
tactgtccttttcaattcttgtcttggttttatta

SEQ ID NO: 2213 - DNA, 35 bp, Artificial Sequence
  Synthetic oligonucleotide
tactcggccctactacacgaactcttttcaaatca

SEQ ID NO: 2214 - DNA, 35 bp, Artificial Sequence; identical to SEQ ID NO: 1957
  Synthetic oligonucleotide

SEQ ID NO: 2215 - DNA, 38 bp, Artificial Sequence
  Synthetic oligonucleotide
tattgtagcctgtacggcggctgcacctcgtacgttga

SEQ ID NO: 2216 - DNA, 35 bp, Artificial Sequence
  Synthetic oligonucleotide
tcactttgcccttttgtttcttcattaattccttc

SEQ ID NO: 2217 - DNA, 38 bp, Artificial Sequence
  Synthetic oligonucleotide
tcacgctcccggggttctatctatttcgttattcttga

SEQ ID NO: 2218 - DNA, 36 bp, Artificial Sequence; identical to SEQ ID NO: 1409
  Synthetic oligonucleotide

SEQ ID NO: 2219 - DNA, 36 bp, Artificial Sequence; identical to SEQ ID NO: 1809
  Synthetic oligonucleotide

SEQ ID NO: 2220 - DNA, 38 bp, Artificial Sequence; identical to SEQ ID NO: 1379
  Synthetic oligonucleotide

SEQ ID NO: 2221 - DNA, 35 bp, Artificial Sequence
  Synthetic oligonucleotide
tccatcatattcattattccatgcctacccatccc

SEQ ID NO: 2222 - DNA, 37 bp, Artificial Sequence; identical to SEQ ID NO: 1410
  Synthetic oligonucleotide

SEQ ID NO: 2223 - DNA, 38 bp, Artificial Sequence
  Synthetic oligonucleotide
tccccataatctccgtcctcattgcttccaaaatttga

SEQ ID NO: 2224 - DNA, 38 bp, Artificial Sequence
  Synthetic oligonucleotide
tcccctcgccactgacccatctactcgccaaatcttga

SEQ ID NO: 2225 - DNA, 38 bp, Artificial Sequence
  Synthetic oligonucleotide
tcgggcaataccctttcccatattatcttctttcctta

SEQ ID NO: 2226 - DNA, 36 bp, Artificial Sequence
  Synthetic oligonucleotide
tctcgggattttccgcgactactcgagcgctactca

SEQ ID NO: 2227 - DNA, 36 bp, Artificial Sequence
  Synthetic oligonucleotide
tcgcttccttgtacttcctattcccttttcaccaca

SEQ ID NO: 2228 - DNA, 36 bp, Artificial Sequence; identical to SEQ ID NO: 1375
  Synthetic oligonucleotide

SEQ ID NO: 2229 - DNA, 36 bp, Artificial Sequence
  Synthetic oligonucleotide
tcttcacgatatgcagtgaaaacaccacccaactta

SEQ ID NO: 2230 - DNA, 37 bp, Artificial Sequence
  Synthetic oligonucleotide
tctgcttgatggtgctttcagtttcttacttctacga

SEQ ID NO: 2231 - DNA, 35 bp, Artificial Sequence
  Synthetic oligonucleotide
tcttctgtaaccattttgttccggtttttttattt

SEQ ID NO: 2232 - DNA, 36 bp, Artificial Sequence
  Synthetic oligonucleotide
tgaagctccgaaggggtgcacttgccgacagtagta

SEQ ID NO: 2233 - DNA, 35 bp, Artificial Sequence
  Synthetic oligonucleotide
tgacgtctcctgttcggttaaccctgtgtgcctgt

SEQ ID NO: 2234 - DNA, 37 bp, Artificial Sequence
  Synthetic oligonucleotide
tgcccttcttcgtttactcttatccacattaccttga

SEQ ID NO: 2235 - DNA, 36 bp, Artificial Sequence; identical to SEQ ID NO: 1521
  Synthetic oligonucleotide

SEQ ID NO: 2236 - DNA, 36 bp, Artificial Sequence
  Synthetic oligonucleotide
tgacatatcgctcttacatcccctcacacaatttca

SEQ ID NO: 2237 - DNA, 35 bp, Artificial Sequence
  Synthetic oligonucleotide
tgctccgagtaccataaactaatttgaagctctac

SEQ ID NO: 2238 - DNA, 37 bp, Artificial Sequence; identical to SEQ ID NO: 1980
  Synthetic oligonucleotide

SEQ ID NO: 2239 - DNA, 36 bp, Artificial Sequence
  Synthetic oligonucleotide
tggaccggtcaaaggatggcaccggttcctctcaca

SEQ ID NO: 2240 - DNA, 38 bp, Artificial Sequence; identical to SEQ ID NO: 1380
  Synthetic oligonucleotide

SEQ ID NO: 2241 - DNA, 38 bp, Artificial Sequence
  Synthetic oligonucleotide
tgctttgtacaacgttggtgtttggcatttgctgttga

SEQ ID NO: 2242 - DNA, 38 bp, Artificial Sequence; identical to SEQ ID NO: 1989
  Synthetic oligonucleotide

SEQ ID NO: 2243 - DNA, 35 bp, Artificial Sequence
  Synthetic oligonucleotide
tgtgccactcgtgttcgaatttctgttccttatct

SEQ ID NO: 2244 - DNA, 37 bp, Artificial Sequence
  Synthetic oligonucleotide
tgttacgcccgtcctctatacaccaattacgatatga

SEQ ID NO: 2245 - DNA, 36 bp, Artificial Sequence
  Synthetic oligonucleotide
tgttaggcctttatttccattatcttaattgtttta

SEQ ID NO: 2246 - DNA, 35 bp, Artificial Sequence; identical to SEQ ID NO: 1415
  Synthetic oligonucleotide

SEQ ID NO: 2247 - DNA, 36 bp, Artificial Sequence
  Synthetic oligonucleotide
ttctgccggatacatttgattcaataactacttgta

SEQ ID NO: 2248 - DNA, 35 bp, Artificial Sequence
  Synthetic oligonucleotide
ttctgcttgcgagccgtccagttagggccgccacc

SEQ ID NO: 2249 - DNA, 38 bp, Artificial Sequence; identical to SEQ ID NO: 2112
  Synthetic oligonucleotide

SEQ ID NO: 2250 - DNA, 36 bp, Artificial Sequence
  Synthetic oligonucleotide
ttgcacgccccaatacacctaatctttatccataca

SEQ ID NO: 2251 - DNA, 38 bp, Artificial Sequence
  Synthetic oligonucleotide
ttcgttccggaccacccatttcctcaatcatatattga

SEQ ID NO: 2252 - DNA, 37 bp, Artificial Sequence
  Synthetic oligonucleotide
ttctgcgttttacgatgctcgatgtctgtgacatgga

SEQ ID NO: 2253 - DNA, 36 bp, Artificial Sequence
  Synthetic oligonucleotide
ttgctccgacctagtttactaaatttcaaccattga

SEQ ID NO: 2254 - DNA, 36 bp, Artificial Sequence
  Synthetic oligonucleotide
tttcattataccccatcgactttctctctagttcca

SEQ ID NO: 2255 - DNA, 35 bp, Artificial Sequence
  Synthetic oligonucleotide
ttgtcccaggcagtttccacgagaacgcgtacggt

SEQ ID NO: 2256 - DNA, 38 bp, Artificial Sequence
  Synthetic oligonucleotide
tttggacgtatcactccctaaccatttttttaccctga

SEQ ID NO: 2257 - DNA, 36 bp, Artificial Sequence; identical to SEQ ID NO: 1382
  Synthetic oligonucleotide

SEQ ID NO: 2258 - DNA, 35 bp, Artificial Sequence
  Synthetic oligonucleotide
tttcctgtttcttctttgtgtgtccatataatcga

SEQ ID NO: 2259 - DNA, 35 bp, Artificial Sequence; identical to SEQ ID NO: 1376
  Synthetic oligonucleotide

SEQ ID NO: 2260 - DNA, 36 bp, Artificial Sequence
  Synthetic oligonucleotide
tttaaacgtacgatattacttccgatccatacatta

SEQ ID NO: 2261 - DNA, 37 bp, Artificial Sequence; identical to SEQ ID NO: 1420
  Synthetic oligonucleotide

SEQ ID NO: 2262 - DNA, 35 bp, Artificial Sequence; identical to SEQ ID NO: 1370
  Synthetic oligonucleotide

SEQ ID NO: 2263 - DNA, 36 bp, Artificial Sequence; identical to SEQ ID NO: 1422
  Synthetic oligonucleotide

SEQ ID NO: 2264 - DNA, 36 bp, Artificial Sequence; identical to SEQ ID NO: 1423
  Synthetic oligonucleotide

SEQ ID NO: 2265 - DNA, 37 bp, Artificial Sequence; identical to SEQ ID NO: 2008
  Synthetic oligonucleotide

SEQ ID NO: 2266 - DNA, 38 bp, Artificial Sequence; identical to SEQ ID NO: 1424
  Synthetic oligonucleotide

SEQ ID NO: 2267 - DNA, 37 bp, Artificial Sequence
  Synthetic oligonucleotide
acaactatcaaataaacctgcgccctctatgaatgga

SEQ ID NO: 2268 - DNA, 36 bp, Artificial Sequence
  Synthetic oligonucleotide
gaccaatagacccggccaagactggagatgaaagta

SEQ ID NO: 2269 - DNA, 38 bp, Artificial Sequence; identical to SEQ ID NO: 1563
  Synthetic oligonucleotide

SEQ ID NO: 2270 - DNA, 36 bp, Artificial Sequence; identical to SEQ ID NO: 1432
  Synthetic oligonucleotide

SEQ ID NO: 2271 - DNA, 35 bp, Artificial Sequence
  Synthetic oligonucleotide
acggtatttgttttttcgattgatggggaagtaga

SEQ ID NO: 2272 - DNA, 38 bp, Artificial Sequence
  Synthetic oligonucleotide
ccacccgtacgaagccgcgttttctgagtgcctattga

SEQ ID NO: 2273 - DNA, 38 bp, Artificial Sequence; identical to SEQ ID NO: 1502
  Synthetic oligonucleotide

SEQ ID NO: 2274 - DNA, 35 bp, Artificial Sequence
  Synthetic oligonucleotide
ggccaatttgaatgagggttgtgaattatttaaga

SEQ ID NO: 2275 - DNA, 37 bp, Artificial Sequence
  Synthetic oligonucleotide
ggcctaaccatggggggtggtgattattatgaaggga

SEQ ID NO: 2276 - DNA, 36 bp, Artificial Sequence
  Synthetic oligonucleotide
ttcatcgcggggccgaggtaagcctaatcttccgta

SEQ ID NO: 2277 - DNA, 37 bp, Artificial Sequence
  Synthetic oligonucleotide
gtaactggtatcctaaaagaataggttcgtaccccga

SEQ ID NO: 2278 - DNA, 36 bp, Artificial Sequence; identical to SEQ ID NO: 2013
  Synthetic oligonucleotide

SEQ ID NO: 2279 - DNA, 36 bp, Artificial Sequence; identical to SEQ ID NO: 2014
  Synthetic oligonucleotide

SEQ ID NO: 2280 - DNA, 35 bp, Artificial Sequence; identical to SEQ ID NO: 2015
  Synthetic oligonucleotide

SEQ ID NO: 2281 - DNA, 35 bp, Artificial Sequence; identical to SEQ ID NO: 2016
  Synthetic oligonucleotide

SEQ ID NO: 2282 - DNA, 38 bp, Artificial Sequence; identical to SEQ ID NO: 2017
  Synthetic oligonucleotide

SEQ ID NO: 2283 - DNA, 35 bp, Artificial Sequence; identical to SEQ ID NO: 2018
  Synthetic oligonucleotide

SEQ ID NO: 2284 - DNA, 38 bp, Artificial Sequence; identical to SEQ ID NO: 2019
  Synthetic oligonucleotide

SEQ ID NO: 2285 - DNA, 37 bp, Artificial Sequence; identical to SEQ ID NO: 2020
  Synthetic oligonucleotide

SEQ ID NO: 2286 - DNA, 35 bp, Artificial Sequence; identical to SEQ ID NO: 2021
  Synthetic oligonucleotide

SEQ ID NO: 2287 - DNA, 37 bp, Artificial Sequence; identical to SEQ ID NO: 2022
  Synthetic oligonucleotide

SEQ ID NO: 2288 - DNA, 35 bp, Artificial Sequence; identical to SEQ ID NO: 2023
  Synthetic oligonucleotide

SEQ ID NO: 2289 - DNA, 36 bp, Artificial Sequence; identical to SEQ ID NO: 2024
  Synthetic oligonucleotide

SEQ ID NO: 2290 - DNA, 36 bp, Artificial Sequence; identical to SEQ ID NO: 2025
  Synthetic oligonucleotide

SEQ ID NO: 2291 - DNA, 35 bp, Artificial Sequence; identical to SEQ ID NO: 2026
  Synthetic oligonucleotide

SEQ ID NO: 2292 - DNA, 36 bp, Artificial Sequence; identical to SEQ ID NO: 2027
  Synthetic oligonucleotide

SEQ ID NO: 2293 - DNA, 35 bp, Artificial Sequence; identical to SEQ ID NO: 2028
  Synthetic oligonucleotide

SEQ ID NO: 2294 - DNA, 37 bp, Artificial Sequence; identical to SEQ ID NO: 2029
  Synthetic oligonucleotide

SEQ ID NO: 2295 - DNA, 36 bp, Artificial Sequence; identical to SEQ ID NO: 2030
  Synthetic oligonucleotide

SEQ ID NO: 2296 - DNA, 38 bp, Artificial Sequence; identical to SEQ ID NO: 2031
  Synthetic oligonucleotide

SEQ ID NO: 2297 - DNA, 35 bp, Artificial Sequence; identical to SEQ ID NO: 2032
  Synthetic oligonucleotide

SEQ ID NO: 2298 - DNA, 35 bp, Artificial Sequence; identical to SEQ ID NO: 2033
  Synthetic oligonucleotide

SEQ ID NO: 2299 - DNA, 36 bp, Artificial Sequence; identical to SEQ ID NO: 2034
  Synthetic oligonucleotide

SEQ ID NO: 2300 - DNA, 37 bp, Artificial Sequence; identical to SEQ ID NO: 2035
  Synthetic oligonucleotide

SEQ ID NO: 2301 - DNA, 35 bp, Artificial Sequence; identical to SEQ ID NO: 2036
  Synthetic oligonucleotide

SEQ ID NO: 2302 - DNA, 37 bp, Artificial Sequence; identical to SEQ ID NO: 2037
  Synthetic oligonucleotide

SEQ ID NO: 2303 - DNA, 35 bp, Artificial Sequence; identical to SEQ ID NO: 1663
  Synthetic oligonucleotide

SEQ ID NO: 2304 - DNA, 35 bp, Artificial Sequence; identical to SEQ ID NO: 2039
  Synthetic oligonucleotide

SEQ ID NO: 2305 - DNA, 35 bp, Artificial Sequence; identical to SEQ ID NO: 2040
  Synthetic oligonucleotide

SEQ ID NO: 2306 - DNA, 35 bp, Artificial Sequence; identical to SEQ ID NO: 2041
  Synthetic oligonucleotide

SEQ ID NO: 2307 - DNA, 36 bp, Artificial Sequence; identical to SEQ ID NO: 2042
  Synthetic oligonucleotide

SEQ ID NO: 2308 - DNA, 38 bp, Artificial Sequence; identical to SEQ ID NO: 2043
  Synthetic oligonucleotide

SEQ ID NO: 2309 - DNA, 36 bp, Artificial Sequence; identical to SEQ ID NO: 1422
  Synthetic oligonucleotide

SEQ ID NO: 2310 - DNA, 37 bp, Artificial Sequence; identical to SEQ ID NO: 2045
  Synthetic oligonucleotide

SEQ ID NO: 2311 - DNA, 37 bp, Artificial Sequence; identical to SEQ ID NO: 2046
  Synthetic oligonucleotide

SEQ ID NO: 2312 - DNA, 38 bp, Artificial Sequence; identical to SEQ ID NO: 2047
  Synthetic oligonucleotide

SEQ ID NO: 2313 - DNA, 35 bp, Artificial Sequence; identical to SEQ ID NO: 2048
  Synthetic oligonucleotide

SEQ ID NO: 2314 - DNA, 37 bp, Artificial Sequence; identical to SEQ ID NO: 2049
  Synthetic oligonucleotide

SEQ ID NO: 2315 - DNA, 35 bp, Artificial Sequence; identical to SEQ ID NO: 2050
  Synthetic oligonucleotide

SEQ ID NO: 2316 - DNA, 35 bp, Artificial Sequence; identical to SEQ ID NO: 1689
  Synthetic oligonucleotide

SEQ ID NO: 2317 - DNA, 37 bp, Artificial Sequence; identical to SEQ ID NO: 2052
  Synthetic oligonucleotide

SEQ ID NO: 2318 - DNA, 36 bp, Artificial Sequence; identical to SEQ ID NO: 2053
  Synthetic oligonucleotide

SEQ ID NO: 2319 - DNA, 35 bp, Artificial Sequence; identical to SEQ ID NO: 2054
  Synthetic oligonucleotide

SEQ ID NO: 2320 - DNA, 36 bp, Artificial Sequence; identical to SEQ ID NO: 2055
  Synthetic oligonucleotide

SEQ ID NO: 2321 - DNA, 38 bp, Artificial Sequence; identical to SEQ ID NO: 2056
  Synthetic oligonucleotide

SEQ ID NO: 2322 - DNA, 37 bp, Artificial Sequence; identical to SEQ ID NO: 2057
  Synthetic oligonucleotide

SEQ ID NO: 2323 - DNA, 37 bp, Artificial Sequence; identical to SEQ ID NO: 2058
  Synthetic oligonucleotide

SEQ ID NO: 2324 - DNA, 35 bp, Artificial Sequence; identical to SEQ ID NO: 2059
  Synthetic oligonucleotide

SEQ ID NO: 2325 - DNA, 37 bp, Artificial Sequence; identical to SEQ ID NO: 2060
  Synthetic oligonucleotide

SEQ ID NO: 2326 - DNA, 37 bp, Artificial Sequence; identical to SEQ ID NO: 1710
  Synthetic oligonucleotide

SEQ ID NO: 2327 - DNA, 37 bp, Artificial Sequence; identical to SEQ ID NO: 2062
  Synthetic oligonucleotide

SEQ ID NO: 2328 - DNA, 37 bp, Artificial Sequence; identical to SEQ ID NO: 2063
  Synthetic oligonucleotide

SEQ ID NO: 2329 - DNA, 37 bp, Artificial Sequence; identical to SEQ ID NO: 2064
  Synthetic oligonucleotide

SEQ ID NO: 2330 - DNA, 35 bp, Artificial Sequence; identical to SEQ ID NO: 2065
  Synthetic oligonucleotide

SEQ ID NO: 2331 - DNA, 38 bp, Artificial Sequence; identical to SEQ ID NO: 2066
  Synthetic oligonucleotide

SEQ ID NO: 2332 - DNA, 36 bp, Artificial Sequence; identical to SEQ ID NO: 2067
  Synthetic oligonucleotide

SEQ ID NO: 2333 - DNA, 36 bp, Artificial Sequence; identical to SEQ ID NO: 1490
  Synthetic oligonucleotide

SEQ ID NO: 2334 - DNA, 36 bp, Artificial Sequence; identical to SEQ ID NO: 2069
  Synthetic oligonucleotide

SEQ ID NO: 2335 - DNA, 37 bp, Artificial Sequence; identical to SEQ ID NO: 2070
  Synthetic oligonucleotide

SEQ ID NO: 2336 - DNA, 38 bp, Artificial Sequence; identical to SEQ ID NO: 2071
  Synthetic oligonucleotide

SEQ ID NO: 2337 - DNA, 35 bp, Artificial Sequence; identical to SEQ ID NO: 2072
  Synthetic oligonucleotide

SEQ ID NO: 2338 - DNA, 35 bp, Artificial Sequence; identical to SEQ ID NO: 2073
  Synthetic oligonucleotide

SEQ ID NO: 2339 - DNA, 36 bp, Artificial Sequence; identical to SEQ ID NO: 2074
  Synthetic oligonucleotide

SEQ ID NO: 2340 - DNA, 38 bp, Artificial Sequence; identical to SEQ ID NO: 2075
  Synthetic oligonucleotide

SEQ ID NO: 2341 - DNA, 36 bp, Artificial Sequence; identical to SEQ ID NO: 2076
  Synthetic oligonucleotide

SEQ ID NO: 2342 - DNA, 38 bp, Artificial Sequence; identical to SEQ ID NO: 2077
  Synthetic oligonucleotide

SEQ ID NO: 2343 - DNA, 36 bp, Artificial Sequence; identical to SEQ ID NO: 2078
  Synthetic oligonucleotide

SEQ ID NO: 2344 - DNA, 35 bp, Artificial Sequence; identical to SEQ ID NO: 2079
  Synthetic oligonucleotide

SEQ ID NO: 2345 - DNA, 38 bp, Artificial Sequence; identical to SEQ ID NO: 2080
  Synthetic oligonucleotide

SEQ ID NO: 2346 - DNA, 36 bp, Artificial Sequence; identical to SEQ ID NO: 2081
  Synthetic oligonucleotide

SEQ ID NO: 2347 - DNA, 38 bp, Artificial Sequence; identical to SEQ ID NO: 2082
  Synthetic oligonucleotide

SEQ ID NO: 2348 - DNA, 35 bp, Artificial Sequence; identical to SEQ ID NO: 2083
  Synthetic oligonucleotide

SEQ ID NO: 2349 - DNA, 36 bp, Artificial Sequence; identical to SEQ ID NO: 2084
  Synthetic oligonucleotide

SEQ ID NO: 2350 - DNA, 38 bp, Artificial Sequence; identical to SEQ ID NO: 2085
  Synthetic oligonucleotide

SEQ ID NO: 2351 - DNA, 35 bp, Artificial Sequence; identical to SEQ ID NO: 2086
  Synthetic oligonucleotide

SEQ ID NO: 2352 - DNA, 35 bp, Artificial Sequence; identical to SEQ ID NO: 2087
  Synthetic oligonucleotide

SEQ ID NO: 2353 - DNA, 38 bp, Artificial Sequence; identical to SEQ ID NO: 2088
  Synthetic oligonucleotide

SEQ ID NO: 2354 - DNA, 38 bp, Artificial Sequence; identical to SEQ ID NO: 2089
  Synthetic oligonucleotide

SEQ ID NO: 2355 - DNA, 38 bp, Artificial Sequence
  Synthetic oligonucleotide
atctatcgcctatcgctacaacccgtattcgcttctta

SEQ ID NO: 2356 - DNA, 38 bp, Artificial Sequence; identical to SEQ ID NO: 1314
  Synthetic oligonucleotide

SEQ ID NO: 2357 - DNA, 38 bp, Artificial Sequence; identical to SEQ ID NO: 1587
  Synthetic oligonucleotide

SEQ ID NO: 2358 - DNA, 38 bp, Artificial Sequence
  Synthetic oligonucleotide
attctctttattttatcgctttcatccagtgcatatga

SEQ ID NO: 2359 - DNA, 38 bp, Artificial Sequence; identical to SEQ ID NO: 1588
  Synthetic oligonucleotide

SEQ ID NO: 2360 - DNA, 35 bp, Artificial Sequence
  Synthetic oligonucleotide
ggcttcttatttgcttgaatatccgcttcctctct

SEQ ID NO: 2361 - DNA, 35 bp, Artificial Sequence; identical to SEQ ID NO: 1321
  Synthetic oligonucleotide

SEQ ID NO: 2362 - DNA, 35 bp, Artificial Sequence; identical to SEQ ID NO: 1322
  Synthetic oligonucleotide

SEQ ID NO: 2363 - DNA, 38 bp, Artificial Sequence; identical to SEQ ID NO: 1575
  Synthetic oligonucleotide

SEQ ID NO: 2364 - DNA, 37 bp, Artificial Sequence; identical to SEQ ID NO: 1591
  Synthetic oligonucleotide

SEQ ID NO: 2365 - DNA, 35 bp, Artificial Sequence; identical to SEQ ID NO: 2128
  Synthetic oligonucleotide

SEQ ID NO: 2366 - DNA, 37 bp, Artificial Sequence; identical to SEQ ID NO: 1826
  Synthetic oligonucleotide

SEQ ID NO: 2367 - DNA, 37 bp, Artificial Sequence; identical to SEQ ID NO: 2130
  Synthetic oligonucleotide

SEQ ID NO: 2368 - DNA, 36 bp, Artificial Sequence; identical to SEQ ID NO: 2131
  Synthetic oligonucleotide

SEQ ID NO: 2369 - DNA, 38 bp, Artificial Sequence; identical to SEQ ID NO: 2132
  Synthetic oligonucleotide

SEQ ID NO: 2370 - DNA, 36 bp, Artificial Sequence; identical to SEQ ID NO: 2133
  Synthetic oligonucleotide

SEQ ID NO: 2371 - DNA, 37 bp, Artificial Sequence; identical to SEQ ID NO: 2134
  Synthetic oligonucleotide

SEQ ID NO: 2372 - DNA, 38 bp, Artificial Sequence; identical to SEQ ID NO: 2135
  Synthetic oligonucleotide

SEQ ID NO: 2373 - DNA, 36 bp, Artificial Sequence; identical to SEQ ID NO: 2136
  Synthetic oligonucleotide

SEQ ID NO: 2374 - DNA, 37 bp, Artificial Sequence; identical to SEQ ID NO: 2137
  Synthetic oligonucleotide

SEQ ID NO: 2375 - DNA, 35 bp, Artificial Sequence; identical to SEQ ID NO: 1832
  Synthetic oligonucleotide

SEQ ID NO: 2376 - DNA, 38 bp, Artificial Sequence; identical to SEQ ID NO: 1795
  Synthetic oligonucleotide

SEQ ID NO: 2377 - DNA, 36 bp, Artificial Sequence; identical to SEQ ID NO: 2140
  Synthetic oligonucleotide

SEQ ID NO: 2378 - DNA, 35 bp, Artificial Sequence; identical to SEQ ID NO: 2101
  Synthetic oligonucleotide

SEQ ID NO: 2379 - DNA, 37 bp, Artificial Sequence; identical to SEQ ID NO: 1838
  Synthetic oligonucleotide

SEQ ID NO: 2380 - DNA, 35 bp, Artificial Sequence; identical to SEQ ID NO: 2143
  Synthetic oligonucleotide

SEQ ID NO: 2381 - DNA, 35 bp, Artificial Sequence; identical to SEQ ID NO: 2144
  Synthetic oligonucleotide

SEQ ID NO: 2382 - DNA, 36 bp, Artificial Sequence; identical to SEQ ID NO: 2145
  Synthetic oligonucleotide

SEQ ID NO: 2383 - DNA, 38 bp, Artificial Sequence; identical to SEQ ID NO: 1842
  Synthetic oligonucleotide

SEQ ID NO: 2384 - DNA, 35 bp, Artificial Sequence; identical to SEQ ID NO: 1368
  Synthetic oligonucleotide

SEQ ID NO: 2385 - DNA, 36 bp, Artificial Sequence; identical to SEQ ID NO: 1388
  Synthetic oligonucleotide

SEQ ID NO: 2386 - DNA, 36 bp, Artificial Sequence; identical to SEQ ID NO: 2149
  Synthetic oligonucleotide

SEQ ID NO: 2387 - DNA, 35 bp, Artificial Sequence; identical to SEQ ID NO: 1362
  Synthetic oligonucleotide

SEQ ID NO: 2388 - DNA, 36 bp, Artificial Sequence; identical to SEQ ID NO: 1361
  Synthetic oligonucleotide

SEQ ID NO: 2389 - DNA, 38 bp, Artificial Sequence; identical to SEQ ID NO: 1794
  Synthetic oligonucleotide

SEQ ID NO: 2390 - DNA, 36 bp, Artificial Sequence; identical to SEQ ID NO: 1357
  Synthetic oligonucleotide

SEQ ID NO: 2391 - DNA, 35 bp, Artificial Sequence; identical to SEQ ID NO: 1391
  Synthetic oligonucleotide

SEQ ID NO: 2392 - DNA, 35 bp, Artificial Sequence; identical to SEQ ID NO: 2155
  Synthetic oligonucleotide

SEQ ID NO: 2393 - DNA, 35 bp, Artificial Sequence; identical to SEQ ID NO: 1365
  Synthetic oligonucleotide

SEQ ID NO: 2394 - DNA, 37 bp, Artificial Sequence; identical to SEQ ID NO: 2157
  Synthetic oligonucleotide

SEQ ID NO: 2395 - DNA, 36 bp, Artificial Sequence; identical to SEQ ID NO: 1863
  Synthetic oligonucleotide

SEQ ID NO: 2396 - DNA, 35 bp, Artificial Sequence; identical to SEQ ID NO: 2159
  Synthetic oligonucleotide

SEQ ID NO: 2397 - DNA, 35 bp, Artificial Sequence; identical to SEQ ID NO: 2160
  Synthetic oligonucleotide

SEQ ID NO: 2398 - DNA, 36 bp, Artificial Sequence; identical to SEQ ID NO: 2161
  Synthetic oligonucleotide

SEQ ID NO: 2399 - DNA, 35 bp, Artificial Sequence; identical to SEQ ID NO: 1511
  Synthetic oligonucleotide

SEQ ID NO: 2400 - DNA, 37 bp, Artificial Sequence; identical to SEQ ID NO: 1865
  Synthetic oligonucleotide

SEQ ID NO: 2401 - DNA, 36 bp, Artificial Sequence; identical to SEQ ID NO: 1869
  Synthetic oligonucleotide

SEQ ID NO: 2402 - DNA, 37 bp, Artificial Sequence; identical to SEQ ID NO: 1358
  Synthetic oligonucleotide

SEQ ID NO: 2403 - DNA, 38 bp, Artificial Sequence; identical to SEQ ID NO: 1871
  Synthetic oligonucleotide

SEQ ID NO: 2404 - DNA, 35 bp, Artificial Sequence; identical to SEQ ID NO: 2167
  Synthetic oligonucleotide

SEQ ID NO: 2405 - DNA, 38 bp, Artificial Sequence; identical to SEQ ID NO: 2168
  Synthetic oligonucleotide

SEQ ID NO: 2406 - DNA, 38 bp, Artificial Sequence; identical to SEQ ID NO: 2169
  Synthetic oligonucleotide

SEQ ID NO: 2407 - DNA, 37 bp, Artificial Sequence; identical to SEQ ID NO: 2170
  Synthetic oligonucleotide

SEQ ID NO: 2408 - DNA, 37 bp, Artificial Sequence; identical to SEQ ID NO: 2171
  Synthetic oligonucleotide

SEQ ID NO: 2409 - DNA, 37 bp, Artificial Sequence; identical to SEQ ID NO: 2172
  Synthetic oligonucleotide

SEQ ID NO: 2410 - DNA, 38 bp, Artificial Sequence; identical to SEQ ID NO: 1367
  Synthetic oligonucleotide

SEQ ID NO: 2411 - DNA, 35 bp, Artificial Sequence; identical to SEQ ID NO: 2174
  Synthetic oligonucleotide

SEQ ID NO: 2412 - DNA, 35 bp, Artificial Sequence; identical to SEQ ID NO: 1885
  Synthetic oligonucleotide

SEQ ID NO: 2413 - DNA, 37 bp, Artificial Sequence; identical to SEQ ID NO: 2176
  Synthetic oligonucleotide

SEQ ID NO: 2414 - DNA, 35 bp, Artificial Sequence; identical to SEQ ID NO: 1891
  Synthetic oligonucleotide

SEQ ID NO: 2415 - DNA, 37 bp, Artificial Sequence; identical to SEQ ID NO: 2178
  Synthetic oligonucleotide

SEQ ID NO: 2416 - DNA, 37 bp, Artificial Sequence; identical to SEQ ID NO: 2179
  Synthetic oligonucleotide

SEQ ID NO: 2417 - DNA, 37 bp, Artificial Sequence; identical to SEQ ID NO: 2180
  Synthetic oligonucleotide

SEQ ID NO: 2418 - DNA, 35 bp, Artificial Sequence; identical to SEQ ID NO: 2181
  Synthetic oligonucleotide

SEQ ID NO: 2419 - DNA, 37 bp, Artificial Sequence; identical to SEQ ID NO: 1366
  Synthetic oligonucleotide

SEQ ID NO: 2420 - DNA, 35 bp, Artificial Sequence; identical to SEQ ID NO: 2183
  Synthetic oligonucleotide

SEQ ID NO: 2421 - DNA, 35 bp, Artificial Sequence; identical to SEQ ID NO: 2184
  Synthetic oligonucleotide

SEQ ID NO: 2422 - DNA, 37 bp, Artificial Sequence; identical to SEQ ID NO: 2185
  Synthetic oligonucleotide

SEQ ID NO: 2423 - DNA, 35 bp, Artificial Sequence; identical to SEQ ID NO: 1911
  Synthetic oligonucleotide

SEQ ID NO: 2424 - DNA, 35 bp, Artificial Sequence; identical to SEQ ID NO: 1785
  Synthetic oligonucleotide

SEQ ID NO: 2425 - DNA, 35 bp, Artificial Sequence; identical to SEQ ID NO: 1371
  Synthetic oligonucleotide

SEQ ID NO: 2426 - DNA, 36 bp, Artificial Sequence; identical to SEQ ID NO: 1914
  Synthetic oligonucleotide

SEQ ID NO: 2427 - DNA, 36 bp, Artificial Sequence; identical to SEQ ID NO: 1918
  Synthetic oligonucleotide

SEQ ID NO: 2428 - DNA, 36 bp, Artificial Sequence; identical to SEQ ID NO: 1922
  Synthetic oligonucleotide

SEQ ID NO: 2429 - DNA, 37 bp, Artificial Sequence; identical to SEQ ID NO: 2192
  Synthetic oligonucleotide

SEQ ID NO: 2430 - DNA, 36 bp, Artificial Sequence; identical to SEQ ID NO: 2193
  Synthetic oligonucleotide

SEQ ID NO: 2431 - DNA, 38 bp, Artificial Sequence; identical to SEQ ID NO: 2194
  Synthetic oligonucleotide

SEQ ID NO: 2432 - DNA, 38 bp, Artificial Sequence; identical to SEQ ID NO: 2195
  Synthetic oligonucleotide

SEQ ID NO: 2433 - DNA, 35 bp, Artificial Sequence; identical to SEQ ID NO: 2196
  Synthetic oligonucleotide

SEQ ID NO: 2434 - DNA, 38 bp, Artificial Sequence; identical to SEQ ID NO: 2197
  Synthetic oligonucleotide

SEQ ID NO: 2435 - DNA, 38 bp, Artificial Sequence; identical to SEQ ID NO: 1372
  Synthetic oligonucleotide

SEQ ID NO: 2436 - DNA, 36 bp, Artificial Sequence; identical to SEQ ID NO: 2199
  Synthetic oligonucleotide

SEQ ID NO: 2437 - DNA, 35 bp, Artificial Sequence; identical to SEQ ID NO: 1377
  Synthetic oligonucleotide

SEQ ID NO: 2438 - DNA, 37 bp, Artificial Sequence; identical to SEQ ID NO: 1937
  Synthetic oligonucleotide

SEQ ID NO: 2439 - DNA, 36 bp, Artificial Sequence; identical to SEQ ID NO: 1369
  Synthetic oligonucleotide

SEQ ID NO: 2440 - DNA, 38 bp, Artificial Sequence; identical to SEQ ID NO: 1543
  Synthetic oligonucleotide

SEQ ID NO: 2441 - DNA, 35 bp, Artificial Sequence; identical to SEQ ID NO: 2204
  Synthetic oligonucleotide

SEQ ID NO: 2442 - DNA, 36 bp, Artificial Sequence; identical to SEQ ID NO: 1373
  Synthetic oligonucleotide

SEQ ID NO: 2443 - DNA, 36 bp, Artificial Sequence; identical to SEQ ID NO: 1374
  Synthetic oligonucleotide

SEQ ID NO: 2444 - DNA, 35 bp, Artificial Sequence; identical to SEQ ID NO: 2207
  Synthetic oligonucleotide

SEQ ID NO: 2445 - DNA, 37 bp, Artificial Sequence; identical to SEQ ID NO: 1949
  Synthetic oligonucleotide

SEQ ID NO: 2446 - DNA, 36 bp, Artificial Sequence; identical to SEQ ID NO: 1819
  Synthetic oligonucleotide

SEQ ID NO: 2447 - DNA, 35 bp, Artificial Sequence; identical to SEQ ID NO: 1378
  Synthetic oligonucleotide

SEQ ID NO: 2448 - DNA, 36 bp, Artificial Sequence; identical to SEQ ID NO: 2211
  Synthetic oligonucleotide

SEQ ID NO: 2449 - DNA, 35 bp, Artificial Sequence; identical to SEQ ID NO: 2212
  Synthetic oligonucleotide

SEQ ID NO: 2450 - DNA, 35 bp, Artificial Sequence; identical to SEQ ID NO: 2213
  Synthetic oligonucleotide

SEQ ID NO: 2451 - DNA, 35 bp, Artificial Sequence; identical to SEQ ID NO: 1957
  Synthetic oligonucleotide

SEQ ID NO: 2452 - DNA, 38 bp, Artificial Sequence; identical to SEQ ID NO: 2215
  Synthetic oligonucleotide

SEQ ID NO: 2453 - DNA, 35 bp, Artificial Sequence; identical to SEQ ID NO: 2216
  Synthetic oligonucleotide

SEQ ID NO: 2454 - DNA, 38 bp, Artificial Sequence; identical to SEQ ID NO: 2217
  Synthetic oligonucleotide

SEQ ID NO: 2455 - DNA, 36 bp, Artificial Sequence; identical to SEQ ID NO: 1409
  Synthetic oligonucleotide

SEQ ID NO: 2456 - DNA, 36 bp, Artificial Sequence; identical to SEQ ID NO: 1809
  Synthetic oligonucleotide

SEQ ID NO: 2457 - DNA, 38 bp, Artificial Sequence; identical to SEQ ID NO: 1379
  Synthetic oligonucleotide

SEQ ID NO: 2458 - DNA, 35 bp, Artificial Sequence; identical to SEQ ID NO: 2221
  Synthetic oligonucleotide

SEQ ID NO: 2459 - DNA, 37 bp, Artificial Sequence; identical to SEQ ID NO: 1410
  Synthetic oligonucleotide

SEQ ID NO: 2460 - DNA, 38 bp, Artificial Sequence; identical to SEQ ID NO: 2223
  Synthetic oligonucleotide

SEQ ID NO: 2461 - DNA, 38 bp, Artificial Sequence; identical to SEQ ID NO: 2224
  Synthetic oligonucleotide

SEQ ID NO: 2462 - DNA, 38 bp, Artificial Sequence; identical to SEQ ID NO: 2225
  Synthetic oligonucleotide

SEQ ID NO: 2463 - DNA, 36 bp, Artificial Sequence; identical to SEQ ID NO: 2226
  Synthetic oligonucleotide

SEQ ID NO: 2464 - DNA, 36 bp, Artificial Sequence; identical to SEQ ID NO: 2227
  Synthetic oligonucleotide

SEQ ID NO: 2465 - DNA, 36 bp, Artificial Sequence; identical to SEQ ID NO: 1375
  Synthetic oligonucleotide

SEQ ID NO: 2466 - DNA, 36 bp, Artificial Sequence; identical to SEQ ID NO: 2229
  Synthetic oligonucleotide

SEQ ID NO: 2467 - DNA, 37 bp, Artificial Sequence; identical to SEQ ID NO: 2230
  Synthetic oligonucleotide

SEQ ID NO: 2468 - DNA, 35 bp, Artificial Sequence; identical to SEQ ID NO: 2231
  Synthetic oligonucleotide

SEQ ID NO: 2469 - DNA, 36 bp, Artificial Sequence; identical to SEQ ID NO: 2232
  Synthetic oligonucleotide

SEQ ID NO: 2470 - DNA, 35 bp, Artificial Sequence; identical to SEQ ID NO: 2233
  Synthetic oligonucleotide

SEQ ID NO: 2471 - DNA, 37 bp, Artificial Sequence; identical to SEQ ID NO: 2234
  Synthetic oligonucleotide

SEQ ID NO: 2472 - DNA, 36 bp, Artificial Sequence; identical to SEQ ID NO: 1521
  Synthetic oligonucleotide

SEQ ID NO: 2473 - DNA, 36 bp, Artificial Sequence; identical to SEQ ID NO: 2236
  Synthetic oligonucleotide

SEQ ID NO: 2474 - DNA, 35 bp, Artificial Sequence; identical to SEQ ID NO: 2237
  Synthetic oligonucleotide

SEQ ID NO: 2475 - DNA, 37 bp, Artificial Sequence; identical to SEQ ID NO: 1980
  Synthetic oligonucleotide

SEQ ID NO: 2476 - DNA, 36 bp, Artificial Sequence; identical to SEQ ID NO: 2239
  Synthetic oligonucleotide

SEQ ID NO: 2477 - DNA, 38 bp, Artificial Sequence; identical to SEQ ID NO: 1380
  Synthetic oligonucleotide

SEQ ID NO: 2478 - DNA, 38 bp, Artificial Sequence; identical to SEQ ID NO: 2241
  Synthetic oligonucleotide

SEQ ID NO: 2479 - DNA, 38 bp, Artificial Sequence; identical to SEQ ID NO: 1989
  Synthetic oligonucleotide

SEQ ID NO: 2480 - DNA, 35 bp, Artificial Sequence; identical to SEQ ID NO: 2243
  Synthetic oligonucleotide

SEQ ID NO: 2481 - DNA, 37 bp, Artificial Sequence; identical to SEQ ID NO: 2244
  Synthetic oligonucleotide

SEQ ID NO: 2482 - DNA, 36 bp, Artificial Sequence; identical to SEQ ID NO: 2245
  Synthetic oligonucleotide

SEQ ID NO: 2483 - DNA, 35 bp, Artificial Sequence; identical to SEQ ID NO: 1415
  Synthetic oligonucleotide

SEQ ID NO: 2484 - DNA, 36 bp, Artificial Sequence; identical to SEQ ID NO: 2247
  Synthetic oligonucleotide

SEQ ID NO: 2485 - DNA, 35 bp, Artificial Sequence; identical to SEQ ID NO: 2248
  Synthetic oligonucleotide

SEQ ID NO: 2486 - DNA, 38 bp, Artificial Sequence; identical to SEQ ID NO: 2112
  Synthetic oligonucleotide

SEQ ID NO: 2487 - DNA, 36 bp, Artificial Sequence; identical to SEQ ID NO: 2250
  Synthetic oligonucleotide

SEQ ID NO: 2488 - DNA, 38 bp, Artificial Sequence; identical to SEQ ID NO: 2251
  Synthetic oligonucleotide

SEQ ID NO: 2489 - DNA, 37 bp, Artificial Sequence; identical to SEQ ID NO: 2252
  Synthetic oligonucleotide

SEQ ID NO: 2490 - DNA, 36 bp, Artificial Sequence; identical to SEQ ID NO: 2253
  Synthetic oligonucleotide

SEQ ID NO: 2491 - DNA, 36 bp, Artificial Sequence; identical to SEQ ID NO: 2254
  Synthetic oligonucleotide

SEQ ID NO: 2492 - DNA, 35 bp, Artificial Sequence; identical to SEQ ID NO: 2255
  Synthetic oligonucleotide

SEQ ID NO: 2493 - DNA, 38 bp, Artificial Sequence; identical to SEQ ID NO: 2256
  Synthetic oligonucleotide

SEQ ID NO: 2494 - DNA, 36 bp, Artificial Sequence; identical to SEQ ID NO: 1382
  Synthetic oligonucleotide

SEQ ID NO: 2495 - DNA, 35 bp, Artificial Sequence; identical to SEQ ID NO: 2258
  Synthetic oligonucleotide

SEQ ID NO: 2496 - DNA, 35 bp, Artificial Sequence; identical to SEQ ID NO: 1376
  Synthetic oligonucleotide

SEQ ID NO: 2497 - DNA, 36 bp, Artificial Sequence; identical to SEQ ID NO: 2260
  Synthetic oligonucleotide

SEQ ID NO: 2498 - DNA, 37 bp, Artificial Sequence; identical to SEQ ID NO: 1420
  Synthetic oligonucleotide

SEQ ID NO: 2499 - DNA, 35 bp, Artificial Sequence; identical to SEQ ID NO: 1370
  Synthetic oligonucleotide

SEQ ID NO: 2500 - DNA, 36 bp, Artificial Sequence
  Synthetic oligonucleotide
aattgtgaatcacaactcctggtatataggctttga

SEQ ID NO: 2501 - DNA, 36 bp, Artificial Sequence
  Synthetic oligonucleotide
cggcatacgaacctgtctcaaatcctagtaaggtaa

SEQ ID NO: 2502 - DNA, 36 bp, Artificial Sequence
  Synthetic oligonucleotide
agttgtgaaacacaactcctggtatataggctttga

SEQ ID NO: 2503 - DNA, 36 bp, Artificial Sequence
  Synthetic oligonucleotide
gagcttgatatcatcttccacttcttcgctattcta

SEQ ID NO: 2504 - DNA, 38 bp, Artificial Sequence
  Synthetic oligonucleotide
ggtcataatgtgaatcatgaatagtactaatttactga

SEQ ID NO: 2505 - DNA, 36 bp, Artificial Sequence
  Synthetic oligonucleotide
tggcggctcacgtattctgaaagttagtggtgcgga

SEQ ID NO: 2506 - DNA, 37 bp, Artificial Sequence
  Synthetic oligonucleotide
tagctcatgggttgcatcctcaggataactccgctga

SEQ ID NO: 2507 - DNA, 35 bp, Artificial Sequence
  Synthetic oligonucleotide
tcttattttcgcaagatcttttatctaaatacaat

SEQ ID NO: 2508 - DNA, 38 bp, Artificial Sequence
  Synthetic oligonucleotide
tttcgaccattgtgggatttccggcggtccaattatga

SEQ ID NO: 2509 - DNA, 38 bp, Artificial Sequence
  Synthetic oligonucleotide
actaggaagaacaggtacgtagggacacctgacagtga

SEQ ID NO: 2510 - DNA, 37 bp, Artificial Sequence
  Synthetic oligonucleotide
gacagctatcaacgaccgacaacggaaattggtgtga

SEQ ID NO: 2511 - DNA, 37 bp, Artificial Sequence
  Synthetic oligonucleotide
gggcgtcccttgcgttctctcaacgaatgtgtcgcga

SEQ ID NO: 2512 - DNA, 38 bp, Artificial Sequence
  Synthetic oligonucleotide
tggcgggcgtgggtgttgccgagacgtcagtaccgtga

SEQ ID NO: 2513 - DNA, 37 bp, Artificial Sequence
  Synthetic oligonucleotide
tggagcggcgagttggaatcctgatgtgggctcatga

SEQ ID NO: 2514 - DNA, 38 bp, Artificial Sequence
  Synthetic oligonucleotide
atagataaatggggaggtcgcgcattgaatgatggtga

SEQ ID NO: 2515 - DNA, 38 bp, Artificial Sequence
  Synthetic oligonucleotide
gccgtatgattaagcgatctctggcatatggcatctga

SEQ ID NO: 2516 - DNA, 38 bp, Artificial Sequence
  Synthetic oligonucleotide
tctcgaagttccgtttagccccaaggtcgcgggcgtga

SEQ ID NO: 2517 - DNA, 37 bp, Artificial Sequence
  Synthetic oligonucleotide
aaccgggtgtccaaaccgtaatttaatgtttctggga

SEQ ID NO: 2518 - DNA, 37 bp, Artificial Sequence
  Synthetic oligonucleotide
aaccgggcgtccaaaccgtaatttaatgtttctggga

SEQ ID NO: 2519 - DNA, 35 bp, Artificial Sequence
  Synthetic oligonucleotide
ataattcgcgtccggtccttggaaataaacggcgt

SEQ ID NO: 2520 - DNA, 35 bp, Artificial Sequence
  Synthetic oligonucleotide
gggcggcctcgttttatcgggaaaaggaacaaagt

SEQ ID NO: 2521 - DNA, 35 bp, Artificial Sequence
  Synthetic oligonucleotide
gggcggcctcgttttatcgggaaaaggaacaatat

SEQ ID NO: 2522 - DNA, 35 bp, Artificial Sequence
  Synthetic oligonucleotide
gggcggcctcgttttatcgggaaaaggaacaatct

SEQ ID NO: 2523 - DNA, 36 bp, Artificial Sequence
  Synthetic oligonucleotide
tggctgctggacgcgtcttacagccgaccacatcaa

SEQ ID NO: 2524 - DNA, 38 bp, Artificial Sequence
  Synthetic oligonucleotide
tagccctaattgcgcttcttagcagggctcgtggttga

SEQ ID NO: 2525 - DNA, 35 bp, Artificial Sequence
  Synthetic oligonucleotide
tttaggctttagggtacgacagcaataggtacaaa

SEQ ID NO: 2526 - DNA, 38 bp, Artificial Sequence
  Synthetic oligonucleotide
atagataaatggggagagcgcgcattgaatgatggtga

SEQ ID NO: 2527 - DNA, 35 bp, Artificial Sequence
  Synthetic oligonucleotide
gagagaagtatttgttaagccacatagttttcata

SEQ ID NO: 2528 - DNA, 35 bp, Artificial Sequence
  Synthetic oligonucleotide
gagagaagtatttgttaagccacatagttttcatc

SEQ ID NO: 2529 - DNA, 36 bp, Artificial Sequence; identical to SEQ ID NO: 2503
  Synthetic oligonucleotide

SEQ ID NO: 2530 - DNA, 35 bp, Artificial Sequence
  Synthetic oligonucleotide
tcttattttagcaagatcttttatctaaataaact

SEQ ID NO: 2531 - DNA, 35 bp, Artificial Sequence
  Synthetic oligonucleotide
tcttattttagcaagatcttttatctaaatacctt

SEQ ID NO: 2532 - DNA, 35 bp, Artificial Sequence
  Synthetic oligonucleotide
tcttattttagcaagatcttttatctaaatactaa

SEQ ID NO: 2533 - DNA, 35 bp, Artificial Sequence
  Synthetic oligonucleotide
tcttattttagcaagatcttttatctaaatactag

SEQ ID NO: 2534 - DNA, 37 bp, Artificial Sequence
  Synthetic oligonucleotide
tgggaggttcagaagtctttggccttgatctgcagga

SEQ ID NO: 2535 - DNA, 36 bp, Artificial Sequence
  Synthetic oligonucleotide
accaccaaatccccaaccacttttccgcttatccca

SEQ ID NO: 2536 - DNA, 35 bp, Artificial Sequence
  Synthetic oligonucleotide
catgcagccccacaccgcttttatattgttttctc

SEQ ID NO: 2537 - DNA, 35 bp, Artificial Sequence
  Synthetic oligonucleotide
catgcataggctcactcctggaacactacctttat

SEQ ID NO: 2538 - DNA, 36 bp, Artificial Sequence
  Synthetic oligonucleotide
caacagtcatgtcaccctattatttgctttcattca

SEQ ID NO: 2539 - DNA, 36 bp, Artificial Sequence
  Synthetic oligonucleotide
catgccatatgtcccatcacttacctaccatcccta

SEQ ID NO: 2540 - DNA, 35 bp, Artificial Sequence
  Synthetic oligonucleotide
catgcgatccaatcctatagtccttggaccttata

SEQ ID NO: 2541 - DNA, 35 bp, Artificial Sequence
  Synthetic oligonucleotide
catgcgatccctcacacaactttcatcccaatacc

SEQ ID NO: 2542 - DNA, 35 bp, Artificial Sequence
  Synthetic oligonucleotide
cttgcgatattaactttccatcactttccttcttt

SEQ ID NO: 2543 - DNA, 35 bp, Artificial Sequence
  Synthetic oligonucleotide
catgcgccgatacccatttcccaattcctcttcaa

SEQ ID NO: 2544 - DNA, 35 bp, Artificial Sequence
  Synthetic oligonucleotide
cactgccacgtcaaatgcctctttcatttccattt

SEQ ID NO: 2545 - DNA, 36 bp, Artificial Sequence
  Synthetic oligonucleotide
cactgcggtcgagcctcctaattgttctcaccctta

SEQ ID NO: 2546 - DNA, 38 bp, Artificial Sequence
  Synthetic oligonucleotide
cgaacagtggtacacgacgtagtgcactctttttatga

SEQ ID NO: 2547 - DNA, 35 bp, Artificial Sequence
  Synthetic oligonucleotide
attgatctgcatgtgccattttcccacctttgttt

SEQ ID NO: 2548 - DNA, 35 bp, Artificial Sequence
  Synthetic oligonucleotide
gcacatgcgtactctcattaacttcattaccatcc

SEQ ID NO: 2549 - DNA, 35 bp, Artificial Sequence
  Synthetic oligonucleotide
gcgattacccactcttgtaaactaatttgcccatt

SEQ ID NO: 2550 - DNA, 38 bp, Artificial Sequence
  Synthetic oligonucleotide
gagacacgccactctcacgacacgttccttatttctga

SEQ ID NO: 2551 - DNA, 35 bp, Artificial Sequence; identical to SEQ ID NO: 325
  Synthetic oligonucleotide

SEQ ID NO: 2552 - DNA, 34 bp, Artificial Sequence
  Synthetic oligonucleotide
gccacaacacaattcttccgccatcactgcccaa

SEQ ID NO: 2553 - DNA, 35 bp, Artificial Sequence
  Synthetic oligonucleotide
gcctgaccacccgtataatttaccgcctaaacctt

SEQ ID NO: 2554 - DNA, 34 bp, Artificial Sequence; identical to SEQ ID NO: 34
  Synthetic oligonucleotide

SEQ ID NO: 2555 - DNA, 36 bp, Artificial Sequence
  Synthetic oligonucleotide
tacgactcatacttccattccgcctaaccttttcca

SEQ ID NO: 2556 - DNA, 35 bp, Artificial Sequence
  Synthetic oligonucleotide
gcgtatcaccatggctcacttttcctatctccttt

SEQ ID NO: 2557 - DNA, 35 bp, Artificial Sequence
  Synthetic oligonucleotide
ggccacgtaacagctactcaacgcgcaacactaac

SEQ ID NO: 2558 - DNA, 36 bp, Artificial Sequence
  Synthetic oligonucleotide
gcggccacactttgccttcttattcgttaattccta

SEQ ID NO: 2559 - DNA, 35 bp, Artificial Sequence
  Synthetic oligonucleotide
tgctgtcaacgcgaagatctttctcttttattctt

SEQ ID NO: 2560 - DNA, 35 bp, Artificial Sequence
  Synthetic oligonucleotide
tatgcggcgaacgccttctatttcctggttctctt

SEQ ID NO: 2561 - DNA, 35 bp, Artificial Sequence
  Synthetic oligonucleotide
tatgccccacgataatttcctctttttgcatattt

SEQ ID NO: 2562 - DNA, 36 bp, Artificial Sequence; identical to SEQ ID NO: 443
  Synthetic oligonucleotide

SEQ ID NO: 2563 - DNA, 36 bp, Artificial Sequence
  Synthetic oligonucleotide
acaccacgcctctgccggtggacgtactgcccatta

SEQ ID NO: 2564 - DNA, 38 bp, Artificial Sequence
  Synthetic oligonucleotide
gccacgtagaacacccatcctgatccatacaatactga

SEQ ID NO: 2565 - DNA, 35 bp, Artificial Sequence; identical to SEQ ID NO: 651
  Synthetic oligonucleotide

SEQ ID NO: 2566 - DNA, 36 bp, Artificial Sequence
  Synthetic oligonucleotide
acgcacgtgcagtcgtatcccgtttcttgcgcttta

SEQ ID NO: 2567 - DNA, 35 bp, Artificial Sequence
  Synthetic oligonucleotide
gacctagaagagggcgcttaaaattgggagtggtt

SEQ ID NO: 2568 - DNA, 35 bp, Artificial Sequence
  Synthetic oligonucleotide
atgcactacgcagatgcaaactatctttcgccttc

SEQ ID NO: 2569 - DNA, 35 bp, Artificial Sequence; identical to SEQ ID NO: 302
  Synthetic oligonucleotide

SEQ ID NO: 2570 - DNA, 38 bp, Artificial Sequence
  Synthetic oligonucleotide
gatgtagctgccacgagtgcgtatactcctttatctga

SEQ ID NO: 2571 - DNA, 36 bp, Artificial Sequence
  Synthetic oligonucleotide
gcccagctgcggtcacttgcccagccattccaccaa

SEQ ID NO: 2572 - DNA, 35 bp, Artificial Sequence; identical to SEQ ID NO: 325
  Synthetic oligonucleotide

SEQ ID NO: 2573 - DNA, 34 bp, Artificial Sequence; identical to SEQ ID NO: 34
  Synthetic oligonucleotide

SEQ ID NO: 2574 - DNA, 35 bp, Artificial Sequence
  Synthetic oligonucleotide
gccgagtcaatcaagctcggattacagtgtttacc

SEQ ID NO: 2575 - DNA, 35 bp, Artificial Sequence
  Synthetic oligonucleotide
tactgcaggtacagagtatcttcatccacctccat

SEQ ID NO: 2576 - DNA, 36 bp, Artificial Sequence
  Synthetic oligonucleotide
ggtgccgttgaggtatacggaccgtgcaggccatca

SEQ ID NO: 2577 - DNA, 36 bp, Artificial Sequence; identical to SEQ ID NO: 579
  Synthetic oligonucleotide

SEQ ID NO: 2578 - DNA, 35 bp, Artificial Sequence
  Synthetic oligonucleotide
gtcgtgcgaggtcaagtactcctattctctctaaa

SEQ ID NO: 2579 - DNA, 38 bp, Artificial Sequence
  Synthetic oligonucleotide
tggagggccgagtggtgggggtttgagaagcattatga

SEQ ID NO: 2580 - DNA, 37 bp, Artificial Sequence
  Synthetic oligonucleotide
tcacgacgtacaaaggttggcgtacttaccttactga

SEQ ID NO: 2581 - DNA, 35 bp, Artificial Sequence
  Synthetic oligonucleotide
tgcactgtaggtcatttcgtttacttgccaccatc

SEQ ID NO: 2582 - DNA, 36 bp, Artificial Sequence
  Synthetic oligonucleotide
tgtaacagcagtcgcggggaattattggctcttgaa

SEQ ID NO: 2583 - DNA, 36 bp, Artificial Sequence
  Synthetic oligonucleotide
tgtacaagtcagacgcgcccaaccctgtttacacta

SEQ ID NO: 2584 - DNA, 38 bp, Artificial Sequence
  Synthetic oligonucleotide
tgtacacctgcaatgcgtggtattactttgttccttga

SEQ ID NO: 2585 - DNA, 38 bp, Artificial Sequence
  Synthetic oligonucleotide
tccacatgccgttgaactctttattccctttaccttga

SEQ ID NO: 2586 - DNA, 35 bp, Artificial Sequence
  Synthetic oligonucleotide
ttggtacccgatagaatctagtttttgtagccaag

SEQ ID NO: 2587 - DNA, 35 bp, Artificial Sequence
  Synthetic oligonucleotide
acggacatgcgagcaacaatgaacgtctttttttc

SEQ ID NO: 2588 - DNA, 36 bp, Artificial Sequence
  Synthetic oligonucleotide
aaccacgaaggtacggacacactttacataccctta

SEQ ID NO: 2589 - DNA, 38 bp, Artificial Sequence
  Synthetic oligonucleotide
atgtacgcggtacccatcacacactatgtgtcccttga

SEQ ID NO: 2590 - DNA, 35 bp, Artificial Sequence
  Synthetic oligonucleotide
agtcacacaagcctccgattcattcttctaaacat

SEQ ID NO: 2591 - DNA, 38 bp, Artificial Sequence
  Synthetic oligonucleotide
catgcgcaggtatcttgctacactattctcccgtttga

SEQ ID NO: 2592 - DNA, 36 bp, Artificial Sequence
  Synthetic oligonucleotide
atgcgcacccgctatctacccgtgacacacgcctta

SEQ ID NO: 2593 - DNA, 35 bp, Artificial Sequence
  Synthetic oligonucleotide
atctcgaaccaccaccttccatcccttatgttgtc

SEQ ID NO: 2594 - DNA, 35 bp, Artificial Sequence
  Synthetic oligonucleotide
gcgaaccggaacttaatatccttgtaaccgctatc

SEQ ID NO: 2595 - DNA, 36 bp, Artificial Sequence
  Synthetic oligonucleotide
gcaacccgacctcgctccaaccgcttacgactccta

SEQ ID NO: 2596 - DNA, 36 bp, Artificial Sequence
  Synthetic oligonucleotide
gcaccccacatcccacgatcccatggatacccgcca

SEQ ID NO: 2597 - DNA, 36 bp, Artificial Sequence
  Synthetic oligonucleotide
gccaacctcaccaccggtacgccttatcgctaatta

SEQ ID NO: 2598 - DNA, 35 bp, Artificial Sequence
  Synthetic oligonucleotide
tcagtaccgccattcccaaaaatttttccccaaca

SEQ ID NO: 2599 - DNA, 35 bp, Artificial Sequence
  Synthetic oligonucleotide
tgaagccagctgacgtacatccacatattccctac

SEQ ID NO: 2600 - DNA, 36 bp, Artificial Sequence
  Synthetic oligonucleotide
tcaaccaactcaccctcatttactcgcataacatta

SEQ ID NO: 2601 - DNA, 35 bp, Artificial Sequence
  Synthetic oligonucleotide
tatgcccgcctgactctcttattactggttccgac

SEQ ID NO: 2602 - DNA, 36 bp, Artificial Sequence
  Synthetic oligonucleotide
actgctggcaccgcaatctacctaaagtttccgtta

SEQ ID NO: 2603 - DNA, 35 bp, Artificial Sequence
  Synthetic oligonucleotide
accacgcactcaggttcatgcatcttgaactttac

SEQ ID NO: 2604 - DNA, 36 bp, Artificial Sequence
  Synthetic oligonucleotide
gaccgtcgcaggccgtggctagcaggacgttggcta

SEQ ID NO: 2605 - DNA, 38 bp, Artificial Sequence
  Synthetic oligonucleotide
gacgaacgtgctgttggtattttttgaactcttattga

SEQ ID NO: 2606 - DNA, 37 bp, Artificial Sequence
  Synthetic oligonucleotide
gacatcctggaggtcctaactgcggtctcacacttga

SEQ ID NO: 2607 - DNA, 35 bp, Artificial Sequence
  Synthetic oligonucleotide
atgccggggtcacgacgttaccgcactccatctat

SEQ ID NO: 2608 - DNA, 35 bp, Artificial Sequence
  Synthetic oligonucleotide
atcagcaacgcccagtggtgcaagctttacccttt

SEQ ID NO: 2609 - DNA, 36 bp, Artificial Sequence
  Synthetic oligonucleotide
gactaccgtacgtgcatggcccccagttacacaata

SEQ ID NO: 2610 - DNA, 35 bp, Artificial Sequence
  Synthetic oligonucleotide
tacctcaaccgcgaactttgctacgttttgtaggg

SEQ ID NO: 2611 - DNA, 35 bp, Artificial Sequence
  Synthetic oligonucleotide
tacgctgtcgtgtgaggccctaccgctcccctatc

SEQ ID NO: 2612 - DNA, 35 bp, Artificial Sequence
  Synthetic oligonucleotide
gtcacggaagcagttacgaacgatgcccttccatc

SEQ ID NO: 2613 - DNA, 36 bp, Artificial Sequence; identical to SEQ ID NO: 2582
  Synthetic oligonucleotide

SEQ ID NO: 2614 - DNA, 35 bp, Artificial Sequence
  Synthetic oligonucleotide
ttgtgacgtctcgtgcgcattaccggttaatattt

SEQ ID NO: 2615 - DNA, 35 bp, Artificial Sequence; identical to SEQ ID NO: 2586
  Synthetic oligonucleotide

SEQ ID NO: 2616 - DNA, 35 bp, Artificial Sequence
  Synthetic oligonucleotide
tttaacgtagtgagtcaccattgatcctttaattt

SEQ ID NO: 2617 - DNA, 35 bp, Artificial Sequence
  Synthetic oligonucleotide
acccacgcctaccctaatccttgtctgttattttc

SEQ ID NO: 2618 - DNA, 36 bp, Artificial Sequence
  Synthetic oligonucleotide
catgccgaataatctctttcgttcctggtcctttta

SEQ ID NO: 2619 - DNA, 37 bp, Artificial Sequence
  Synthetic oligonucleotide
catgccgccaaaccacactgttccgtcttacttatga

SEQ ID NO: 2620 - DNA, 35 bp, Artificial Sequence
  Synthetic oligonucleotide
catgcgaacaacctttaccattcactagcacccct

SEQ ID NO: 2621 - DNA, 38 bp, Artificial Sequence
  Synthetic oligonucleotide
catgcgacacgctctatcgctttcacatcttcgcttga

SEQ ID NO: 2622 - DNA, 35 bp, Artificial Sequence; identical to SEQ ID NO: 2541
  Synthetic oligonucleotide

SEQ ID NO: 2623 - DNA, 35 bp, Artificial Sequence
  Synthetic oligonucleotide
catgcgcactttcctcacatgataccctgcatgac

SEQ ID NO: 2624 - DNA, 35 bp, Artificial Sequence
  Synthetic oligonucleotide
catgcgcatccaatcacactttttaatttcatttc

SEQ ID NO: 2625 - DNA, 35 bp, Artificial Sequence
  Synthetic oligonucleotide
atgcctagcagccaagcaatgcctttcatttattc

SEQ ID NO: 2626 - DNA, 36 bp, Artificial Sequence
  Synthetic oligonucleotide
gccgcagccatcatctacgcttcacactcatcacca

SEQ ID NO: 2627 - DNA, 36 bp, Artificial Sequence
  Synthetic oligonucleotide
ggtacgcaggcgcgatttgtacatttttgatcctga

SEQ ID NO: 2628 - DNA, 38 bp, Artificial Sequence
  Synthetic oligonucleotide
tctaacgtactatcatgtgccacgccttcatttcctga

SEQ ID NO: 2629 - DNA, 35 bp, Artificial Sequence
  Synthetic oligonucleotide
tcaactgccaccgaccccaacccgcgacccatcct

SEQ ID NO: 2630 - DNA, 36 bp, Artificial Sequence; identical to SEQ ID NO: 241
  Synthetic oligonucleotide

SEQ ID NO: 2631 - DNA, 36 bp, Artificial Sequence
  Synthetic oligonucleotide
cgcgagccagggtactgcctgcggtctaaacaataa

SEQ ID NO: 2632 - DNA, 36 bp, Artificial Sequence; identical to SEQ ID NO: 24
  Synthetic oligonucleotide

SEQ ID NO: 2633 - DNA, 35 bp, Artificial Sequence; identical to SEQ ID NO: 199
  Synthetic oligonucleotide

SEQ ID NO: 2634 - DNA, 35 bp, Artificial Sequence; identical to SEQ ID NO: 54
  Synthetic oligonucleotide

SEQ ID NO: 2635 - DNA, 38 bp, Artificial Sequence; identical to SEQ ID NO: 725
  Synthetic oligonucleotide

SEQ ID NO: 2636 - DNA, 36 bp, Artificial Sequence; identical to SEQ ID NO: 57
  Synthetic oligonucleotide

SEQ ID NO: 2637 - DNA, 36 bp, Artificial Sequence
  Synthetic oligonucleotide
tgggtgtcgtactggtaccaaggagtgcgaaatcta

SEQ ID NO: 2638 - DNA, 35 bp, Artificial Sequence; identical to SEQ ID NO: 145
  Synthetic oligonucleotide

SEQ ID NO: 2639 - DNA, 35 bp, Artificial Sequence
  Synthetic oligonucleotide
acgcgcataaaccaatcactaccgaccacttattc

SEQ ID NO: 2640 - DNA, 35 bp, Artificial Sequence
  Synthetic oligonucleotide
acgtcaggcataaattcttcaaactcttactatca

SEQ ID NO: 2641 - DNA, 36 bp, Artificial Sequence
  Synthetic oligonucleotide
catgcccggaccattattattcgcttaccattccca

SEQ ID NO: 2642 - DNA, 37 bp, Artificial Sequence
  Synthetic oligonucleotide
catgccgaccactgttccttttacctcttatacctga

SEQ ID NO: 2643 - DNA, 35 bp, Artificial Sequence
  Synthetic oligonucleotide
catgcgaacagacgaatgattcttacaaccgcaac

SEQ ID NO: 2644 - DNA, 35 bp, Artificial Sequence
  Synthetic oligonucleotide
cccgtccgcaggcatccacgtttatgccttttatc

SEQ ID NO: 2645 - DNA, 36 bp, Artificial Sequence
  Synthetic oligonucleotide
cacgcgaccctcattaacatcatctaacccaatcca

SEQ ID NO: 2646 - DNA, 35 bp, Artificial Sequence
  Synthetic oligonucleotide
catgcgccaattttactgtacatttctttttttat

SEQ ID NO: 2647 - DNA, 35 bp, Artificial Sequence
  Synthetic oligonucleotide
catgcgcgccgacctactcgcttaatctcacgttt

SEQ ID NO: 2648 - DNA, 35 bp, Artificial Sequence
  Synthetic oligonucleotide
catggcgaccctcaatctcacattttacctcttct

SEQ ID NO: 2649 - DNA, 35 bp, Artificial Sequence
  Synthetic oligonucleotide
gacggactgcgtatcgcatagtttatccttttttt

SEQ ID NO: 2650 - DNA, 35 bp, Artificial Sequence
  Synthetic oligonucleotide
gcccaccatatcgcaatcatattcctcgccttgtt

SEQ ID NO: 2651 - DNA, 35 bp, Artificial Sequence
  Synthetic oligonucleotide
gcgcatgtcaaccttacctctattggcccttattc

SEQ ID NO: 2652 - DNA, 35 bp, Artificial Sequence
  Synthetic oligonucleotide
gcatccagtccataactcaatctcacctgtaattc

SEQ ID NO: 2653 - DNA, 35 bp, Artificial Sequence
  Synthetic oligonucleotide
gccgcatacccctgtaatttcgtaacctacaccca

SEQ ID NO: 2654 - DNA, 34 bp, Artificial Sequence
  Synthetic oligonucleotide
gcgcaactccgactatcactgccttaccaatcac

SEQ ID NO: 2655 - DNA, 36 bp, Artificial Sequence
  Synthetic oligonucleotide
gcgacgcctctgacctacatataactttgatagtaa

SEQ ID NO: 2656 - DNA, 35 bp, Artificial Sequence
  Synthetic oligonucleotide
gcgacgcgtgaacacccttattctgtaatcttttt

SEQ ID NO: 2657 - DNA, 35 bp, Artificial Sequence
  Synthetic oligonucleotide
gtactgtcaacccgatctttgtttgtatttatttt

SEQ ID NO: 2658 - DNA, 38 bp, Artificial Sequence
  Synthetic oligonucleotide
gcgcggtactcattatccttatatcatcttacatttga

SEQ ID NO: 2659 - DNA, 37 bp, Artificial Sequence
  Synthetic oligonucleotide
tatgcgagcccatttttcacctttgctatttcttaga

SEQ ID NO: 2660 - DNA, 35 bp, Artificial Sequence
  Synthetic oligonucleotide
tcctccagcacattctaccacactaccacattcat

SEQ ID NO: 2661 - DNA, 35 bp, Artificial Sequence
  Synthetic oligonucleotide
tatgcggtgccacttctctattacttctattactt

SEQ ID NO: 2662 - DNA, 36 bp, Artificial Sequence
  Synthetic oligonucleotide
tcatgcagcctagtatctatcctaccatattattca

SEQ ID NO: 2663 - DNA, 35 bp, Artificial Sequence
  Synthetic oligonucleotide
tgacggacagtgcatgcgttatacttattctctat

SEQ ID NO: 2664 - DNA, 38 bp, Artificial Sequence
  Synthetic oligonucleotide
aagcctggccgtggtgctgcagtttattccgttagtga

SEQ ID NO: 2665 - DNA, 36 bp, Artificial Sequence; identical to SEQ ID NO: 2631
  Synthetic oligonucleotide

SEQ ID NO: 2666 - DNA, 36 bp, Artificial Sequence; identical to SEQ ID NO: 24
  Synthetic oligonucleotide

SEQ ID NO: 2667 - DNA, 36 bp, Artificial Sequence
  Synthetic oligonucleotide
gcattcgcgtactgtggacaacctatatccgggtaa

SEQ ID NO: 2668 - DNA, 36 bp, Artificial Sequence
  Synthetic oligonucleotide
gcaactatcgcgagcgccttcaagattagcgtgtca

SEQ ID NO: 2669 - DNA, 38 bp, Artificial Sequence; identical to SEQ ID NO: 42
  Synthetic oligonucleotide

SEQ ID NO: 2670 - DNA, 38 bp, Artificial Sequence
  Synthetic oligonucleotide
gtgcggggccacaggtgatagcaatgcatgccctatga

SEQ ID NO: 2671 - DNA, 37 bp, Artificial Sequence
  Synthetic oligonucleotide
tcaccccaagcagtcattgcctacaggagtctggtga

SEQ ID NO: 2672 - DNA, 37 bp, Artificial Sequence
  Synthetic oligonucleotide
tgcagttagtgcaatgaatatctcggacacgcggaga

SEQ ID NO: 2673 - DNA, 35 bp, Artificial Sequence
  Synthetic oligonucleotide
tccgcagacagccgggggtcaggactacggctacg

SEQ ID NO: 2674 - DNA, 37 bp, Artificial Sequence
  Synthetic oligonucleotide
ttacagctactctgcgctccaagtggacactttacga

SEQ ID NO: 2675 - DNA, 36 bp, Artificial Sequence
  Synthetic oligonucleotide
ttagcatcactgacttggatacatacagcatgtcga

SEQ ID NO: 2676 - DNA, 35 bp, Artificial Sequence
  Synthetic oligonucleotide
agcacgactgcaatccacatccgttcttattcctt

SEQ ID NO: 2677 - DNA, 37 bp, Artificial Sequence
  Synthetic oligonucleotide
aatgcgcacatctgtttttgtaccttagaatgtttga

SEQ ID NO: 2678 - DNA, 35 bp, Artificial Sequence; identical to SEQ ID NO: 2640
  Synthetic oligonucleotide

SEQ ID NO: 2679 - DNA, 36 bp, Artificial Sequence
  Synthetic oligonucleotide
catgcaccactcgcacattccaccacaatctataca

SEQ ID NO: 2680 - DNA, 35 bp, Artificial Sequence
  Synthetic oligonucleotide
ctgccactagccgcccatactatccacaccataat

SEQ ID NO: 2681 - DNA, 35 bp, Artificial Sequence
  Synthetic oligonucleotide
ccatgcgcggtcacacataccagtccttaccattt

SEQ ID NO: 2682 - DNA, 35 bp, Artificial Sequence
  Synthetic oligonucleotide
catgccgacacaccacttttttccgaccgacttcc

SEQ ID NO: 2683 - DNA, 35 bp, Artificial Sequence
  Synthetic oligonucleotide
catgccgcctttcgacttccatatcccaacacgac

SEQ ID NO: 2684 - DNA, 35 bp, Artificial Sequence; identical to SEQ ID NO: 67
  Synthetic oligonucleotide

SEQ ID NO: 2685 - DNA, 35 bp, Artificial Sequence; identical to SEQ ID NO: 68
  Synthetic oligonucleotide

SEQ ID NO: 2686 - DNA, 35 bp, Artificial Sequence
  Synthetic oligonucleotide
cttgccgatcccgctccctagttcccttgcccact

SEQ ID NO: 2687 - DNA, 36 bp, Artificial Sequence
  Synthetic oligonucleotide
cacgcatgtctgcgctcgtatcttttcaccctatga

SEQ ID NO: 2688 - DNA, 38 bp, Artificial Sequence
  Synthetic oligonucleotide
cactgcggtcaacacccaccaacctccgaccttactga

SEQ ID NO: 2689 - DNA, 38 bp, Artificial Sequence
  Synthetic oligonucleotide
catgcgtacgccactttcgcctactctaacatatctga

SEQ ID NO: 2690 - DNA, 35 bp, Artificial Sequence
  Synthetic oligonucleotide
cagtctgcgcgaccctttctgttccttcatcccca

SEQ ID NO: 2691 - DNA, 35 bp, Artificial Sequence
  Synthetic oligonucleotide
cattgcgccttctattttattttccttatatttgt

SEQ ID NO: 2692 - DNA, 38 bp, Artificial Sequence
  Synthetic oligonucleotide
cattgcggccattacccctctaccgttaccctttttga

SEQ ID NO: 2693 - DNA, 35 bp, Artificial Sequence
  Synthetic oligonucleotide
gcacacacctgcggagcaccactccaaattaccca

SEQ ID NO: 2694 - DNA, 35 bp, Artificial Sequence
  Synthetic oligonucleotide
gcacactacgtttaccctggcccttctaattgttt

SEQ ID NO: 2695 - DNA, 35 bp, Artificial Sequence
  Synthetic oligonucleotide
gcactgccattgatttcttcccacttcacactctt

SEQ ID NO: 2696 - DNA, 36 bp, Artificial Sequence
  Synthetic oligonucleotide
gcgaacactgatcttaactaacgcccgcccaattta

SEQ ID NO: 2697 - DNA, 36 bp, Artificial Sequence
  Synthetic oligonucleotide
gcacccccaatgaccgccatcaaaccatatattcca

SEQ ID NO: 2698 - DNA, 36 bp, Artificial Sequence
  Synthetic oligonucleotide
gcgcaaccatcactataacccatttacctgttttca

SEQ ID NO: 2699 - DNA, 38 bp, Artificial Sequence
  Synthetic oligonucleotide
gcgcaccacacttgagttctttaactttccctttatga

SEQ ID NO: 2700 - DNA, 35 bp, Artificial Sequence
  Synthetic oligonucleotide
gccgacgtacctgctgggtctctctattcattttt

SEQ ID NO: 2701 - DNA, 35 bp, Artificial Sequence
  Synthetic oligonucleotide
tacgccgtccaccatcctcttctatatacctaacc

SEQ ID NO: 2702 - DNA, 35 bp, Artificial Sequence
  Synthetic oligonucleotide
tactacgaaccatcccactctttgcacctgttttc

SEQ ID NO: 2703 - DNA, 34 bp, Artificial Sequence
  Synthetic oligonucleotide
tcatgcgcggtacacatttcttaatcacttttct

SEQ ID NO: 2704 - DNA, 35 bp, Artificial Sequence
  Synthetic oligonucleotide
tgcgggcattggtgcaatcttaacttattctttat

SEQ ID NO: 2705 - DNA, 35 bp, Artificial Sequence
  Synthetic oligonucleotide
tggtagtgctgcatcaccgatcatccttttacatt

SEQ ID NO: 2706 - DNA, 37 bp, Artificial Sequence
  Synthetic oligonucleotide
tccgcgactgttcatcccccatcccaacataacccga

SEQ ID NO: 2707 - DNA, 38 bp, Artificial Sequence
  Synthetic oligonucleotide
tgtgaacgtcactgcaccctaaactaatattcccttga

SEQ ID NO: 2708 - DNA, 36 bp, Artificial Sequence
  Synthetic oligonucleotide
ttgacaactgccactaccaactgaacccgctactta

SEQ ID NO: 2709 - DNA, 38 bp, Artificial Sequence
  Synthetic oligonucleotide
ttgtcaagcgctatccaccatttctcttttatctatga

SEQ ID NO: 2710 - DNA, 35 bp, Artificial Sequence
  Synthetic oligonucleotide
caatgcgacgaggcttctatgtcatgaactaagct

SEQ ID NO: 2711 - DNA, 37 bp, Artificial Sequence
  Synthetic oligonucleotide
ccgaacggtcgcaaagtggtgtagcctctaatccgga

SEQ ID NO: 2712 - DNA, 35 bp, Artificial Sequence; identical to SEQ ID NO: 2648
  Synthetic oligonucleotide

SEQ ID NO: 2713 - DNA, 38 bp, Artificial Sequence
  Synthetic oligonucleotide
accggaatgtacatgccctggtttttgttattatttga

SEQ ID NO: 2714 - DNA, 35 bp, Artificial Sequence
  Synthetic oligonucleotide
accatgcgcccaccactattttttccacttcctta

SEQ ID NO: 2715 - DNA, 37 bp, Artificial Sequence
  Synthetic oligonucleotide
acggagtaccctgcccactatataacttaaaccttga

SEQ ID NO: 2716 - DNA, 35 bp, Artificial Sequence
  Synthetic oligonucleotide
acgggcgtgtcgcactgtctgtcactggcttattc

SEQ ID NO: 2717 - DNA, 35 bp, Artificial Sequence
  Synthetic oligonucleotide
agacggtgggtgggtgggtggtgctgcagtctacc

SEQ ID NO: 2718 - DNA, 35 bp, Artificial Sequence
  Synthetic oligonucleotide
catgccgcaccccaacacgtaccatttcattattt

SEQ ID NO: 2719 - DNA, 36 bp, Artificial Sequence
  Synthetic oligonucleotide
catgcgggcatccttagcttaacctcaattccatta

SEQ ID NO: 2720 - DNA, 35 bp, Artificial Sequence
  Synthetic oligonucleotide
catggccattctaccctccattccattccttgcct

SEQ ID NO: 2721 - DNA, 35 bp, Artificial Sequence
  Synthetic oligonucleotide
cgttcggtacgcagtcatttcactctatcttgttc

SEQ ID NO: 2722 - DNA, 37 bp, Artificial Sequence
  Synthetic oligonucleotide
aacccacgagttgttggtccacgcctcgttatcacga

SEQ ID NO: 2723 - DNA, 36 bp, Artificial Sequence
  Synthetic oligonucleotide
aacccatgcctgccccatgtgcattcaggcagagca

SEQ ID NO: 2724 - DNA, 36 bp, Artificial Sequence
  Synthetic oligonucleotide
accgccacagtcatcaacccacctggccgacgacga

SEQ ID NO: 2725 - DNA, 36 bp, Artificial Sequence
  Synthetic oligonucleotide
gacaacgcaaccgcaggctcatggagccaatatgta

SEQ ID NO: 2726 - DNA, 37 bp, Artificial Sequence
  Synthetic oligonucleotide
gacaacacgtcgcatgatcttaaaagaggacctagga

SEQ ID NO: 2727 - DNA, 38 bp, Artificial Sequence
  Synthetic oligonucleotide
gagtggtcgccactcacaacgatgcggtatccccttga

SEQ ID NO: 2728 - DNA, 37 bp, Artificial Sequence
  Synthetic oligonucleotide
gcgtggtggtccgccggtggtgagtcgatgaactgga

SEQ ID NO: 2729 - DNA, 36 bp, Artificial Sequence
  Synthetic oligonucleotide
gtgatcgatagcgagtgttgagctgtcgagagtgga

SEQ ID NO: 2730 - DNA, 36 bp, Artificial Sequence
  Synthetic oligonucleotide
tcacacaccgcgtggctcggacgacaagtagtccta

SEQ ID NO: 2731 - DNA, 35 bp, Artificial Sequence
  Synthetic oligonucleotide
tgaacctgcacagctgttaagaggtggcttacgta

SEQ ID NO: 2732 - DNA, 35 bp, Artificial Sequence
  Synthetic oligonucleotide
actgaccacagctacgtaagcaataaccgatcgtt

SEQ ID NO: 2733 - DNA, 35 bp, Artificial Sequence
  Synthetic oligonucleotide
aagagtacgggcatgagtaataagggagtagccgt

SEQ ID NO: 2734 - DNA, 35 bp, Artificial Sequence
  Synthetic oligonucleotide
agatcgcggtcaatcggtgggtagttaggatcggg

SEQ ID NO: 2735 - DNA, 35 bp, Artificial Sequence
  Synthetic oligonucleotide
gaacacacgtcgatcgccactgagagcagatgtca

SEQ ID NO: 2736 - DNA, 35 bp, Artificial Sequence
  Synthetic oligonucleotide
atcggaggccgtatcaccatatcccaccaccactt

SEQ ID NO: 2737 - DNA, 34 bp, Artificial Sequence
  Synthetic oligonucleotide
cttattttagcaagatcttttatctaaatacaat

SEQ ID NO: 2738 - DNA, 36 bp, Artificial Sequence
  Synthetic oligonucleotide
gacaaacgtagtgctgaacatggcgttctggtccaa

SEQ ID NO: 2739 - DNA, 35 bp, Artificial Sequence
  Synthetic oligonucleotide
ataccgggacaggcgacagaagggtgaaccaatgt

SEQ ID NO: 2740 - DNA, 37 bp, Artificial Sequence
  Synthetic oligonucleotide
gagtggacgtggacgcgaaacgggtcaggcataacga

SEQ ID NO: 2741 - DNA, 36 bp, Artificial Sequence
  Synthetic oligonucleotide
taccacgtggcgcctgacgacttacgcaactgggga

SEQ ID NO: 2742 - DNA, 36 bp, Artificial Sequence
  Synthetic oligonucleotide
tacagccgacatgaacatcccttaatcccaccctaa

SEQ ID NO: 2743 - DNA, 37 bp, Artificial Sequence
  Synthetic oligonucleotide
tgataccgcgcaacgagacttaccacgtcaggatgga

SEQ ID NO: 2744 - DNA, 36 bp, Artificial Sequence
  Synthetic oligonucleotide
atggtgggagcaccgacgtaggaggcctatggcgta

SEQ ID NO: 2745 - DNA, 37 bp, Artificial Sequence; identical to SEQ ID NO: 2726
  Synthetic oligonucleotide

SEQ ID NO: 2746 - DNA, 38 bp, Artificial Sequence
  Synthetic oligonucleotide
gtgaacgtcgctagaaacgatggtgtaaatagtcttga

SEQ ID NO: 2747 - DNA, 36 bp, Artificial Sequence; identical to SEQ ID NO: 2729
  Synthetic oligonucleotide

SEQ ID NO: 2748 - DNA, 37 bp, Artificial Sequence
  Synthetic oligonucleotide
aacacgcaacacacaactctcggcaaatccagcgcga

SEQ ID NO: 2749 - DNA, 37 bp, Artificial Sequence
  Synthetic oligonucleotide
acgacgcaccctgccactatcgtagatactccgacta

SEQ ID NO: 2750 - DNA, 36 bp, Artificial Sequence
  Synthetic oligonucleotide
gaccaatggaccggggactactctgagaaagcgcga

SEQ ID NO: 2751 - DNA, 36 bp, Artificial Sequence
  Synthetic oligonucleotide
agtggaacgcaccgaagttacctacctgagatggga

SEQ ID NO: 2752 - DNA, 37 bp, Artificial Sequence
  Synthetic oligonucleotide
gacgacggggatcctgacaattcctgactaagcgcga

SEQ ID NO: 2753 - DNA, 35 bp, Artificial Sequence
  Synthetic oligonucleotide
gacccgcccagtaagcacacacacagcccaaattt

SEQ ID NO: 2754 - DNA, 37 bp, Artificial Sequence
  Synthetic oligonucleotide
gagcggactcgaatagaactccgcaacaccagcgcga

SEQ ID NO: 2755 - DNA, 37 bp, Artificial Sequence
  Synthetic oligonucleotide
gagacgaggccgggatcatgctagggatcggacagga

SEQ ID NO: 2756 - DNA, 36 bp, Artificial Sequence
  Synthetic oligonucleotide
taccgacaccctcgtgttcccaaacaaggagacgga

SEQ ID NO: 2757 - DNA, 37 bp, Artificial Sequence
  Synthetic oligonucleotide
ggatacgcaccttaaggagggacgaataaaagcgcga

SEQ ID NO: 2758 - DNA, 36 bp, Artificial Sequence
  Synthetic oligonucleotide
tagcacagtggtgcttacggaacatcaccagcgcga

SEQ ID NO: 2759 - DNA, 37 bp, Artificial Sequence
  Synthetic oligonucleotide
tagtcggtcggcctgccgatgcgtcaaggtagcgcga

SEQ ID NO: 2760 - DNA, 37 bp, Artificial Sequence
  Synthetic oligonucleotide
taggaatcaccggctcgggcgaggccgggaagcgcga

SEQ ID NO: 2761 - DNA, 37 bp, Artificial Sequence
  Synthetic oligonucleotide
tgagccgcaaccggcaaacaaggcttcaacagcgcga

SEQ ID NO: 2762 - DNA, 36 bp, Artificial Sequence
  Synthetic oligonucleotide
aacaccacaccgccgctgatccggatggaacctcga

SEQ ID NO: 2763 - DNA, 35 bp, Artificial Sequence; identical to SEQ ID NO: 2733
  Synthetic oligonucleotide

SEQ ID NO: 2764 - DNA, 36 bp, Artificial Sequence
  Synthetic oligonucleotide
acacgtgccccaccaatatgcgataagactttgtta

SEQ ID NO: 2765 - DNA, 36 bp, Artificial Sequence
  Synthetic oligonucleotide
gacaccgaagacgaggctaaagagagaagtgccata

SEQ ID NO: 2766 - DNA, 35 bp, Artificial Sequence
  Synthetic oligonucleotide
atcgccgcacacctgccactcactcttccatcgct

SEQ ID NO: 2767 - DNA, 34 bp, Artificial Sequence; identical to SEQ ID NO: 2737
  Synthetic oligonucleotide

SEQ ID NO: 2768 - DNA, 36 bp, Artificial Sequence
  Synthetic oligonucleotide
gactaacgccgcttatcctcaacgcctaaccttgtt

SEQ ID NO: 2769 - DNA, 37 bp, Artificial Sequence
  Synthetic oligonucleotide
gagtggtcgcctgcaggtgcattccatccagctccga

SEQ ID NO: 2770 - DNA, 35 bp, Artificial Sequence
  Synthetic oligonucleotide
gtggaggctgcaatacggtgcaagagagcttaggg

SEQ ID NO: 2771 - DNA, 37 bp, Artificial Sequence
  Synthetic oligonucleotide
gtcaccgcatgcgggtcaagccctcaactttacttga

SEQ ID NO: 2772 - DNA, 37 bp, Artificial Sequence
  Synthetic oligonucleotide
taagtcgcgccccagtcagtgattgatacagatagga

SEQ ID NO: 2773 - DNA, 36 bp, Artificial Sequence
  Synthetic oligonucleotide
tcaacatgcgtgcaagtggcaccgttctcgtttcga

SEQ ID NO: 2774 - DNA, 34 bp, Artificial Sequence
  Synthetic oligonucleotide
tcttatttagcaagatcttttatctaaatacaat

SEQ ID NO: 2775 - DNA, 37 bp, Artificial Sequence; identical to SEQ ID NO: 2748
  Synthetic oligonucleotide

SEQ ID NO: 2776 - DNA, 37 bp, Artificial Sequence; identical to SEQ ID NO: 2749
  Synthetic oligonucleotide

SEQ ID NO: 2777 - DNA, 36 bp, Artificial Sequence; identical to SEQ ID NO: 2750
  Synthetic oligonucleotide

SEQ ID NO: 2778 - DNA, 37 bp, Artificial Sequence; identical to SEQ ID NO: 2752
  Synthetic oligonucleotide

SEQ ID NO: 2779 - DNA, 37 bp, Artificial Sequence; identical to SEQ ID NO: 2754
  Synthetic oligonucleotide

SEQ ID NO: 2780 - DNA, 37 bp, Artificial Sequence; identical to SEQ ID NO: 2755
  Synthetic oligonucleotide

SEQ ID NO: 2781 - DNA, 36 bp, Artificial Sequence
  Synthetic oligonucleotide
tacgcgggtggtcgaccccactagtagtcatccata

SEQ ID NO: 2782 - DNA, 36 bp, Artificial Sequence; identical to SEQ ID NO: 2756
  Synthetic oligonucleotide

SEQ ID NO: 2783 - DNA, 37 bp, Artificial Sequence; identical to SEQ ID NO: 2757
  Synthetic oligonucleotide

SEQ ID NO: 2784 - DNA, 36 bp, Artificial Sequence; identical to SEQ ID NO: 2758
  Synthetic oligonucleotide

SEQ ID NO: 2785 - DNA, 37 bp, Artificial Sequence; identical to SEQ ID NO: 2759
  Synthetic oligonucleotide

SEQ ID NO: 2786 - DNA, 37 bp, Artificial Sequence; identical to SEQ ID NO: 2760
  Synthetic oligonucleotide

SEQ ID NO: 2787 - DNA, 38 bp, Artificial Sequence
  Synthetic oligonucleotide
tccgaacgggacgtacaccaagccgagctctatcctga

SEQ ID NO: 2788 - DNA, 37 bp, Artificial Sequence; identical to SEQ ID NO: 2761
  Synthetic oligonucleotide

SEQ ID NO: 2789 - DNA, 36 bp, Artificial Sequence
  Synthetic oligonucleotide
accatcgggtcacgtaaaagcggttctaatttctaa

SEQ ID NO: 2790 - DNA, 35 bp, Artificial Sequence; identical to SEQ ID NO: 594
  Synthetic oligonucleotide

SEQ ID NO: 2791 - DNA, 36 bp, Artificial Sequence
  Synthetic oligonucleotide
gaacaggcgttccctactgatttatctgtccccata

SEQ ID NO: 2792 - DNA, 36 bp, Artificial Sequence
  Synthetic oligonucleotide
gaccatgcgagcggcaaagcacggaaaatgtttgaa

SEQ ID NO: 2793 - DNA, 38 bp, Artificial Sequence
  Synthetic oligonucleotide
gagtcatgtccgcctttaacccgacttaagaactttga

SEQ ID NO: 2794 - DNA, 38 bp, Artificial Sequence
  Synthetic oligonucleotide
gcaagatgaagttggtactttcctctctattcttttga

SEQ ID NO: 2795 - DNA, 37 bp, Artificial Sequence
  Synthetic oligonucleotide
gccacaccgcccgtacatacttcctcaccaacattga

SEQ ID NO: 2796 - DNA, 35 bp, Artificial Sequence
  Synthetic oligonucleotide
gcgcgcccaccagtatcttttggtctagataggca

SEQ ID NO: 2797 - DNA, 35 bp, Artificial Sequence
  Synthetic oligonucleotide
gggcccacgccaccgtttgtccacaggaaggatac

SEQ ID NO: 2798 - DNA, 37 bp, Artificial Sequence
  Synthetic oligonucleotide
gtgcggtcatggaattcttttaagcatgataatacga

SEQ ID NO: 2799 - DNA, 35 bp, Artificial Sequence
  Synthetic oligonucleotide
ttgcaaagcgcaccgtccgagccggtggcaccgaa

SEQ ID NO: 2800 - DNA, 37 bp, Artificial Sequence
  Synthetic oligonucleotide
ttcacgccacattcacgggaactgagagtgacgacga

SEQ ID NO: 2801 - DNA, 37 bp, Artificial Sequence
  Synthetic oligonucleotide
tttgcggtcattaacttgcgtgtaggacaccggtgga

SEQ ID NO: 2802 - DNA, 35 bp, Artificial Sequence
  Synthetic oligonucleotide
acgcagtgccgccgaatcctgatcccctaactttc

SEQ ID NO: 2803 - DNA, 35 bp, Artificial Sequence
  Synthetic oligonucleotide
aatgcgtccgacctaactgttgcgattcttctttt

SEQ ID NO: 2804 - DNA, 38 bp, Artificial Sequence
  Synthetic oligonucleotide
acacacaagtccatgcgggcctcacttttcgcctatga

SEQ ID NO: 2805 - DNA, 36 bp, Artificial Sequence
  Synthetic oligonucleotide
agtcccaactgcagggtttatacctctggttctctc

SEQ ID NO: 2806 - DNA, 36 bp, Artificial Sequence
  Synthetic oligonucleotide
gcacacgcccacattgtcctactagctattttatta

SEQ ID NO: 2807 - DNA, 38 bp, Artificial Sequence
  Synthetic oligonucleotide
gccgcccctgagtagttttcgtttttcttgtcctctga

SEQ ID NO: 2808 - DNA, 35 bp, Artificial Sequence
  Synthetic oligonucleotide
gcgatcgatatgttgcctatcctcttacgacatct

SEQ ID NO: 2809 - DNA, 35 bp, Artificial Sequence
  Synthetic oligonucleotide
gcgttgtccgtgtccatccatcttgtcatttgttt

SEQ ID NO: 2810 - DNA, 35 bp, Artificial Sequence
  Synthetic oligonucleotide
taacgtacaaccgggcgcacaggccattcttctac

SEQ ID NO: 2811 - DNA, 35 bp, Artificial Sequence
  Synthetic oligonucleotide
gttcggggtgcatgtcgtgaagccgctaacctctt

SEQ ID NO: 2812 - DNA, 38 bp, Artificial Sequence
  Synthetic oligonucleotide
tgctcagtcaagcgagtaccactacgcctattccgtga

SEQ ID NO: 2813 - DNA, 38 bp, Artificial Sequence
  Synthetic oligonucleotide
tgctaaacgtactggggcttcctcagatctttgcttga

SEQ ID NO: 2814 - DNA, 36 bp, Artificial Sequence
  Synthetic oligonucleotide
tgtacccccgccgtaatcatctatcttgtccccgaa

SEQ ID NO: 2815 - DNA, 35 bp, Artificial Sequence
  Synthetic oligonucleotide
accactgaactcatggtactaatcacacaccaatt

SEQ ID NO: 2816 - DNA, 37 bp, Artificial Sequence
  Synthetic oligonucleotide
actgtacagtagtccacgaacatatcgctttctatga

SEQ ID NO: 2817 - DNA, 38 bp, Artificial Sequence
  Synthetic oligonucleotide
accgcgcgctgcagtatatcccacttcgttctatatga

SEQ ID NO: 2818 - DNA, 35 bp, Artificial Sequence
  Synthetic oligonucleotide
agtggatcactgggcggagtgcgttaggaagacgg

SEQ ID NO: 2819 - DNA, 35 bp, Artificial Sequence
  Synthetic oligonucleotide
gattacgccttaagtggtactcagttatgaggaga

SEQ ID NO: 2820 - DNA, 37 bp, Artificial Sequence
  Synthetic oligonucleotide
gcgtaggtcatgcgacgtataaccttcccacaaatga

SEQ ID NO: 2821 - DNA, 37 bp, Artificial Sequence
  Synthetic oligonucleotide
tacaccaaaaagatcggtgattaccatgcaacaagga

SEQ ID NO: 2822 - DNA, 35 bp, Artificial Sequence
  Synthetic oligonucleotide
taccagacgtaccgcacacctttcatctgcctaac

SEQ ID NO: 2823 - DNA, 35 bp, Artificial Sequence
  Synthetic oligonucleotide
tttgagactgcgggctgtgcgttgctttgatatcc

SEQ ID NO: 2824 - DNA, 35 bp, Artificial Sequence
  Synthetic oligonucleotide
actgactgcatacatccgcatattaaacccgtatt

SEQ ID NO: 2825 - DNA, 36 bp, Artificial Sequence
  Synthetic oligonucleotide
acatctccaggattccccttcagccatggccctaca

SEQ ID NO: 2826 - DNA, 38 bp, Artificial Sequence
  Synthetic oligonucleotide
acgctcagctggcatgtaccccccctctctacacttga

SEQ ID NO: 2827 - DNA, 36 bp, Artificial Sequence
  Synthetic oligonucleotide
actcgcgtgtccaacacggactgcagtagcaatcca

SEQ ID NO: 2828 - DNA, 37 bp, Artificial Sequence
  Synthetic oligonucleotide
gcaggtggtgcaggttattcatgcgaaagggtactga

SEQ ID NO: 2829 - DNA, 36 bp, Artificial Sequence
  Synthetic oligonucleotide
gcggtggaaacgtaatcggacactgcgcatgcgaca

SEQ ID NO: 2830 - DNA, 36 bp, Artificial Sequence
  Synthetic oligonucleotide
tgaacctgcgatggtccgtgcgaacccgatctcaca

SEQ ID NO: 2831 - DNA, 35 bp, Artificial Sequence
  Synthetic oligonucleotide
tcacgtccccaacaacccggagtaattccctgcca

SEQ ID NO: 2832 - DNA, 35 bp, Artificial Sequence
  Synthetic oligonucleotide
tgggtacacatccggcatgccaataacgcttaagt

SEQ ID NO: 2833 - DNA, 35 bp, Artificial Sequence
  Synthetic oligonucleotide
acgcctgtacgatgtcctcggtctcattttatttc

SEQ ID NO: 2834 - DNA, 35 bp, Artificial Sequence
  Synthetic oligonucleotide
aaacgtcaagggaaagcgtagtctcctcgaccctt

SEQ ID NO: 2835 - DNA, 36 bp, Artificial Sequence
  Synthetic oligonucleotide
actgggaagtacgctgtcaggcatttgctaactaaa

SEQ ID NO: 2836 - DNA, 35 bp, Artificial Sequence
  Synthetic oligonucleotide
aatcattgcaggtatatgcgagcgaactacgattc

SEQ ID NO: 2837 - DNA, 35 bp, Artificial Sequence
  Synthetic oligonucleotide
atacgttccggccaactgaaacggagttcgggtct

SEQ ID NO: 2838 - DNA, 36 bp, Artificial Sequence
  Synthetic oligonucleotide
atgcatagctgcccttcttatccgtttccaactaca

SEQ ID NO: 2839 - DNA, 38 bp, Artificial Sequence
  Synthetic oligonucleotide
atgcgaaactgtaagcacccttccaccttgtaccatga

SEQ ID NO: 2840 - DNA, 38 bp, Artificial Sequence
  Synthetic oligonucleotide
gacgccgaaacactaagcttttaacacttacgatatga

SEQ ID NO: 2841 - DNA, 35 bp, Artificial Sequence
  Synthetic oligonucleotide
attatcccagcgatcccgagtcccggcatttactg

SEQ ID NO: 2842 - DNA, 36 bp, Artificial Sequence
  Synthetic oligonucleotide
catgcgcatatcgctccgttcgttcctcaatttcca

SEQ ID NO: 2843 - DNA, 38 bp, Artificial Sequence
  Synthetic oligonucleotide
gcccgaacccgaaaaccgatcgcctgaatcccaattga

SEQ ID NO: 2844 - DNA, 35 bp, Artificial Sequence
  Synthetic oligonucleotide
gcaggctcgcgtagcttcaaactagcagaccacgt

SEQ ID NO: 2845 - DNA, 38 bp, Artificial Sequence
  Synthetic oligonucleotide
gcacgggacgcaagctagactacacaccgactttttga

SEQ ID NO: 2846 - DNA, 38 bp, Artificial Sequence
  Synthetic oligonucleotide
gctggcactgcgaatatcgatctacactatcccactga

SEQ ID NO: 2847 - DNA, 36 bp, Artificial Sequence
  Synthetic oligonucleotide
gctagcacacaggatccctctttattagcacttcaa

SEQ ID NO: 2848 - DNA, 35 bp, Artificial Sequence
  Synthetic oligonucleotide
tatgcgacccgttaaacccgtactcttcctaaact

SEQ ID NO: 2849 - DNA, 38 bp, Artificial Sequence
  Synthetic oligonucleotide
tagtcatgcgcgcatctcaaaatttacttctcaaatga

SEQ ID NO: 2850 - DNA, 38 bp, Artificial Sequence
  Synthetic oligonucleotide
tctacactccgctccttgacctaatttaaagaccttga

SEQ ID NO: 2851 - DNA, 35 bp, Artificial Sequence
  Synthetic oligonucleotide
tcgcggaaacctgcccctgcatcgtagccatccac

SEQ ID NO: 2852 - DNA, 36 bp, Artificial Sequence
  Synthetic oligonucleotide
ttcaccaccacccctttggacccttttaccgagaga

SEQ ID NO: 2853 - DNA, 36 bp, Artificial Sequence
  Synthetic oligonucleotide
ttgcagacctcatttacgcacttgggacttctgcca

SEQ ID NO: 2854 - DNA, 37 bp, Artificial Sequence
  Synthetic oligonucleotide
ttggcacctccactgcttgttctcgattcatgtgcga

SEQ ID NO: 2855 - DNA, 35 bp, Artificial Sequence
  Synthetic oligonucleotide
actgcggtcatcgagttactggctattgcctgacc

SEQ ID NO: 2856 - DNA, 36 bp, Artificial Sequence
  Synthetic oligonucleotide
cccgcggtaatagtgcgggcggacgcggtcatgaca

SEQ ID NO: 2857 - DNA, 36 bp, Artificial Sequence
  Synthetic oligonucleotide
gaacgtagactgactacggtccacacgcccattgta

SEQ ID NO: 2858 - DNA, 35 bp, Artificial Sequence
  Synthetic oligonucleotide
ccaacgacagatatggacgtgctgcgggggcaatc

SEQ ID NO: 2859 - DNA, 35 bp, Artificial Sequence
  Synthetic oligonucleotide
atgcgatgtcacgtgacgtgagtaaccgcccaccc

SEQ ID NO: 2860 - DNA, 35 bp, Artificial Sequence
  Synthetic oligonucleotide
gcccacccttgccagcatgtatgcttgcatgtaac

SEQ ID NO: 2861 - DNA, 35 bp, Artificial Sequence
  Synthetic oligonucleotide
gccggtcatgcggtttgcacaccactccattctac

SEQ ID NO: 2862 - DNA, 36 bp, Artificial Sequence
  Synthetic oligonucleotide
gccaggcccattccttgcgggaggttaacaccagca

SEQ ID NO: 2863 - DNA, 36 bp, Artificial Sequence; identical to SEQ ID NO: 2829
  Synthetic oligonucleotide

SEQ ID NO: 2864 - DNA, 37 bp, Artificial Sequence
  Synthetic oligonucleotide
gtttcaccccggctgggctagttctgttaatgcgaga

SEQ ID NO: 2865 - DNA, 36 bp, Artificial Sequence
  Synthetic oligonucleotide
tgtaccgcggttgcgactatttccttactgcccata

SEQ ID NO: 2866 - DNA, 35 bp, Artificial Sequence
  Synthetic oligonucleotide
ttcgcgacgataactagttgcatgtctgaattcac

SEQ ID NO: 2867 - DNA, 37 bp, Artificial Sequence
  Synthetic oligonucleotide
tgtcactgcacgatgagactttcggcgaatatactga

SEQ ID NO: 2868 - DNA, 36 bp, Artificial Sequence
  Synthetic oligonucleotide
aatgcattgcgttatttcaattgaggcgtcctaaaa

SEQ ID NO: 2869 - DNA, 38 bp, Artificial Sequence
  Synthetic oligonucleotide
gcactgccaactttcttctggggactatttagctttga

SEQ ID NO: 2870 - DNA, 36 bp, Artificial Sequence
  Synthetic oligonucleotide
ggtaccaaaagtactgccatgagagccacttcccaa

SEQ ID NO: 2871 - DNA, 35 bp, Artificial Sequence
  Synthetic oligonucleotide
catacgcacggtcctctactataattgtccaccaa

SEQ ID NO: 2872 - DNA, 35 bp, Artificial Sequence
  Synthetic oligonucleotide
atgctgcggtaatggagccggttcttaaactgcct

SEQ ID NO: 2873 - DNA, 36 bp, Artificial Sequence
  Synthetic oligonucleotide
agttactgacaggcgcgtctttcgcaacactttata

SEQ ID NO: 2874 - DNA, 35 bp, Artificial Sequence
  Synthetic oligonucleotide
gcacccgagcctaatagtcctctattccccttcca

SEQ ID NO: 2875 - DNA, 36 bp, Artificial Sequence
  Synthetic oligonucleotide
gcgagcagtccatggcccatcctcgacttaacctca

SEQ ID NO: 2876 - DNA, 36 bp, Artificial Sequence
  Synthetic oligonucleotide
ggtagcaggcataccctacggaacagttctgtggca

SEQ ID NO: 2877 - DNA, 36 bp, Artificial Sequence
  Synthetic oligonucleotide
taggcacgtgcatcaggcgttctttgcccctgttta

SEQ ID NO: 2878 - DNA, 35 bp, Artificial Sequence
  Synthetic oligonucleotide
tgtgcagtcagtgaacggtgacctagttatgattt

SEQ ID NO: 2879 - DNA, 38 bp, Artificial Sequence
  Synthetic oligonucleotide
agcccgttgctacgttgcagtaggtgtaacttcactga

SEQ ID NO: 2880 - DNA, 38 bp, Artificial Sequence
  Synthetic oligonucleotide
actaactgcaagcgcccttggcccgatttgacctttga

SEQ ID NO: 2881 - DNA, 35 bp, Artificial Sequence
  Synthetic oligonucleotide
actaccgcaaactgcactgtttaaaactccttgaa

SEQ ID NO: 2882 - DNA, 35 bp, Artificial Sequence
  Synthetic oligonucleotide
acgactatcgtacatgtgcgtagtttagattccaa

SEQ ID NO: 2883 - DNA, 37 bp, Artificial Sequence
  Synthetic oligonucleotide
agttgaccacggagtgtactgcaatggagtgtaccga

SEQ ID NO: 2884 - DNA, 36 bp, Artificial Sequence
  Synthetic oligonucleotide
gaacgagcccggatgttaggatcctcgatttgcgta

SEQ ID NO: 2885 - DNA, 35 bp, Artificial Sequence
  Synthetic oligonucleotide
agtgctgccactaagctagaaaagttttcatgccc

SEQ ID NO: 2886 - DNA, 36 bp, Artificial Sequence
  Synthetic oligonucleotide
atcgtaacggactgctatttgtacggatccctataa

SEQ ID NO: 2887 - DNA, 38 bp, Artificial Sequence
  Synthetic oligonucleotide
gcagtctagcgcccgcttgtaccacatcctcgctttga

SEQ ID NO: 2888 - DNA, 35 bp, Artificial Sequence
  Synthetic oligonucleotide
tgtactgagtgcacaacacgtgatgatgatatctt

SEQ ID NO: 2889 - DNA, 36 bp, Artificial Sequence
  Synthetic oligonucleotide
agcggtcaccgcctatggttattcatttttctctta

SEQ ID NO: 2890 - DNA, 35 bp, Artificial Sequence
  Synthetic oligonucleotide
actcagcgatgccctaacttggacgttcggctact

SEQ ID NO: 2891 - DNA, 35 bp, Artificial Sequence
  Synthetic oligonucleotide
cacaccgacgaaactgtcctcgcctactacctatc

SEQ ID NO: 2892 - DNA, 35 bp, Artificial Sequence
  Synthetic oligonucleotide
agtgaggcgtcacggctattactccgtgctaattt

SEQ ID NO: 2893 - DNA, 35 bp, Artificial Sequence; identical to SEQ ID NO: 2871
  Synthetic oligonucleotide

SEQ ID NO: 2894 - DNA, 35 bp, Artificial Sequence
  Synthetic oligonucleotide
gaaacggccatgaaccttttaatctttccaccttt

SEQ ID NO: 2895 - DNA, 36 bp, Artificial Sequence
  Synthetic oligonucleotide
gcgagaggatcaccgtgaggcttcccaactatttta

SEQ ID NO: 2896 - DNA, 35 bp, Artificial Sequence
  Synthetic oligonucleotide
gcgaggcgccctccaacccaacccattcaatggta

SEQ ID NO: 2897 - DNA, 35 bp, Artificial Sequence
  Synthetic oligonucleotide
gcgcagtccgtccacatttggtctactgctttcct

SEQ ID NO: 2898 - DNA, 35 bp, Artificial Sequence
  Synthetic oligonucleotide
gtgcgcctacatatatctcggttacaacctttttc

SEQ ID NO: 2899 - DNA, 35 bp, Artificial Sequence
  Synthetic oligonucleotide
tgcatcccaccactatgatatacctaatgccctct

SEQ ID NO: 2900 - DNA, 36 bp, Artificial Sequence
  Synthetic oligonucleotide
tgcaggccgcatcacctcttgtgccggttcatcaaa

SEQ ID NO: 2901 - DNA, 38 bp, Artificial Sequence
  Synthetic oligonucleotide
tgcgaggctagcttgttgccactatttggtccttatga

SEQ ID NO: 2902 - DNA, 38 bp, Artificial Sequence; identical to SEQ ID NO: 2879
  Synthetic oligonucleotide

SEQ ID NO: 2903 - DNA, 35 bp, Artificial Sequence
  Synthetic oligonucleotide
agggcaacgaacgcaggaatccctcattcctacgg

SEQ ID NO: 2904 - DNA, 35 bp, Artificial Sequence; identical to SEQ ID NO: 2885
  Synthetic oligonucleotide

SEQ ID NO: 2905 - DNA, 35 bp, Artificial Sequence
  Synthetic oligonucleotide
atcctcgttacgtgcacggacttctcatgcgaact

SEQ ID NO: 2906 - DNA, 36 bp, Artificial Sequence
  Synthetic oligonucleotide
gcccaggtttgacgactgccgtgcgctcggtcttaa

SEQ ID NO: 2907 - DNA, 37 bp, Artificial Sequence
  Synthetic oligonucleotide
ggtcatggcgcaacttcatcttttcacacctgattga

SEQ ID NO: 2908 - DNA, 36 bp, Artificial Sequence; identical to SEQ ID NO: 2876
  Synthetic oligonucleotide

SEQ ID NO: 2909 - DNA, 35 bp, Artificial Sequence
  Synthetic oligonucleotide
tcccgcaattacgcagaccgactacgattccaaaa

SEQ ID NO: 2910 - DNA, 38 bp, Artificial Sequence
  Synthetic oligonucleotide
tgtacgtaggtaagcgatacacactgcacccctactga

SEQ ID NO: 2911 - DNA, 35 bp, Artificial Sequence
  Synthetic oligonucleotide
tgacctctgcagtggccagcccattctttagcttc

SEQ ID NO: 2912 - DNA, 35 bp, Artificial Sequence
  Synthetic oligonucleotide
ttactgcaggtgcgatcgcgttctccaacatctct

SEQ ID NO: 2913 - DNA, 37 bp, Artificial Sequence
  Synthetic oligonucleotide
accacgttggttattgccctgctttgaagtcttacga

SEQ ID NO: 2914 - DNA, 36 bp, Artificial Sequence
  Synthetic oligonucleotide
aacacactgcgcctttactttaattttcgattatta

SEQ ID NO: 2915 - DNA, 35 bp, Artificial Sequence
  Synthetic oligonucleotide
agcaccgacgtgataggactgtaatgccctcctct

SEQ ID NO: 2916 - DNA, 35 bp, Artificial Sequence
  Synthetic oligonucleotide
atgcgcgagtcataaggcgtttcttttcactggct

SEQ ID NO: 2917 - DNA, 35 bp, Artificial Sequence
  Synthetic oligonucleotide
atgcgacatgcgttacaataatccgcgcaagccgc

SEQ ID NO: 2918 - DNA, 35 bp, Artificial Sequence
  Synthetic oligonucleotide
gagtgcgcgtacaatttgtcctcttgccgcttttt

SEQ ID NO: 2919 - DNA, 35 bp, Artificial Sequence
  Synthetic oligonucleotide
taagtcatgggcctcatctatacctgatcgatctc

SEQ ID NO: 2920 - DNA, 36 bp, Artificial Sequence
  Synthetic oligonucleotide
tcaggcgggatatgcgctcagggaagcggggagcaa

SEQ ID NO: 2921 - DNA, 37 bp, Artificial Sequence
  Synthetic oligonucleotide
tgagctcgacctgccgtcgtacaatttcccttactga

SEQ ID NO: 2922 - DNA, 35 bp, Artificial Sequence
  Synthetic oligonucleotide
ctcaaaatctccttaacttcctcttcccacgacga

SEQ ID NO: 2923 - DNA, 35 bp, Artificial Sequence
  Synthetic oligonucleotide
ctcaaaatctccttaacttcctcttcactcgacga

SEQ ID NO: 2924 - DNA, 36 bp, Artificial Sequence
  Synthetic oligonucleotide
gcgcacctaaacttcctctcctctccggcttcggga

SEQ ID NO: 2925 - DNA, 35 bp, Artificial Sequence
  Synthetic oligonucleotide
ctcaaaatctccttaacttcctcttcacccgacga

SEQ ID NO: 2926 - DNA, 35 bp, Artificial Sequence
  Synthetic oligonucleotide
gaccaagaggtaccgcctcgcaagctgctttggcc

SEQ ID NO: 2927 - DNA, 35 bp, Artificial Sequence
  Synthetic oligonucleotide
gtttgctttttagaactcgataaattacagaatat

SEQ ID NO: 2928 - DNA, 35 bp, Artificial Sequence
  Synthetic oligonucleotide
catacatggcttgtcccgtcatacatgaagtagtg

SEQ ID NO: 2929 - DNA, 35 bp, Artificial Sequence
  Synthetic oligonucleotide
gtattgttcgacggtggacagaacatacaggtagc

SEQ ID NO: 2930 - DNA, 36 bp, Artificial Sequence
  Synthetic oligonucleotide
gcaattcgataatccgcctctcaccggttcgacgga

SEQ ID NO: 2931 - DNA, 36 bp, Artificial Sequence
  Synthetic oligonucleotide
gaaaacaagcataggatcgtacggaagtgtacctaa

SEQ ID NO: 2932 - DNA, 35 bp, Artificial Sequence
  Synthetic oligonucleotide
gaacaggcgagggctggccctacgttgggccgtgc

SEQ ID NO: 2933 - DNA, 35 bp, Artificial Sequence
  Synthetic oligonucleotide
gcgatcgtctagattgggtgtggatgtggcttaaa

SEQ ID NO: 2934 - DNA, 37 bp, Artificial Sequence
  Synthetic oligonucleotide
ttggcgtaggcagtaccgatcacttcctccaacatga

SEQ ID NO: 2935 - DNA, 38 bp, Artificial Sequence
  Synthetic oligonucleotide
acttggcacttatcgacaacattggagacctgtcttga

SEQ ID NO: 2936 - DNA, 36 bp, Artificial Sequence
  Synthetic oligonucleotide
gtaattttgacccccgtcgacgagcatgagggcgga

SEQ ID NO: 2937 - DNA, 35 bp, Artificial Sequence
  Synthetic oligonucleotide
gttgctgagctgactgatacgtattcagctgatat

SEQ ID NO: 2938 - DNA, 36 bp, Artificial Sequence
  Synthetic oligonucleotide
cgtgctccccagctctcccgctctggccctgtcgga

SEQ ID NO: 2939 - DNA, 36 bp, Artificial Sequence
  Synthetic oligonucleotide
tctacccaatccaaccagcgccccccctgtctgtca

SEQ ID NO: 2940 - DNA, 37 bp, Artificial Sequence
  Synthetic oligonucleotide
acgtcatggccgcctgacagtgttttcctccctccga

SEQ ID NO: 2941 - DNA, 35 bp, Artificial Sequence
  Synthetic oligonucleotide
agctaaggatctgacctcgtactctacgtaatggt

SEQ ID NO: 2942 - DNA, 35 bp, Artificial Sequence
  Synthetic oligonucleotide
ttcggatacctggacgagcttataccccccctgtc

SEQ ID NO: 2943 - DNA, 36 bp, Artificial Sequence
  Synthetic oligonucleotide
gcccctgcccttccgtcttcgtactactattgacca

SEQ ID NO: 2944 - DNA, 35 bp, Artificial Sequence
  Synthetic oligonucleotide
ggtcattaagcacgagtcgatacagactacttcct

SEQ ID NO: 2945 - DNA, 37 bp, Artificial Sequence
  Synthetic oligonucleotide
tcagtccagctgggcgcctgggaagtctgccccccga

SEQ ID NO: 2946 - DNA, 35 bp, Artificial Sequence
  Synthetic oligonucleotide
ctggtgtatcaataacttcctctctataacacaaa

SEQ ID NO: 2947 - DNA, 36 bp, Artificial Sequence
  Synthetic oligonucleotide
agggaccgcggtttgctgaaccaaagacatttgaca

SEQ ID NO: 2948 - DNA, 37 bp, Artificial Sequence
  Synthetic oligonucleotide
ggcaatacgagctcccccgctccttagaagctttcga

SEQ ID NO: 2949 - DNA, 36 bp, Artificial Sequence
  Synthetic oligonucleotide
gttaaattgacggtctcccccacgccctcctttaga

SEQ ID NO: 2950 - DNA, 36 bp, Artificial Sequence
  Synthetic oligonucleotide
tcccccgcgtgcactgtcagcaaagtttcgcttaga

SEQ ID NO: 2951 - DNA, 37 bp, Artificial Sequence
  Synthetic oligonucleotide
agacccataaggtcgagacctgagtcactagatttga

SEQ ID NO: 2952 - DNA, 35 bp, Artificial Sequence
  Synthetic oligonucleotide
ttgcttgattgccatcccccgttcatcaagtgcga

SEQ ID NO: 2953 - DNA, 35 bp, Artificial Sequence
  Synthetic oligonucleotide
gttggcggaagagagatggccgaaaccccccgtcc

SEQ ID NO: 2954 - DNA, 38 bp, Artificial Sequence
  Synthetic oligonucleotide
ctcgctgcaacttcgtgccgccgctccctctctattga

SEQ ID NO: 2955 - DNA, 35 bp, Artificial Sequence
  Synthetic oligonucleotide
gacgctgatccccccgtaagtggagttcttgcctc

SEQ ID NO: 2956 - DNA, 36 bp, Artificial Sequence
  Synthetic oligonucleotide
gtcccccctgaagagattccaagtggtacgcttcca

SEQ ID NO: 2957 - DNA, 37 bp, Artificial Sequence
  Synthetic oligonucleotide
ggttatgtagcaagttaccccccgctaaagagctcga

SEQ ID NO: 2958 - DNA, 36 bp, Artificial Sequence
  Synthetic oligonucleotide
gagagtacgaacttactggcgggcattttaatttga

SEQ ID NO: 2959 - DNA, 35 bp, Artificial Sequence
  Synthetic oligonucleotide
atgatcgtgtggatccctccccggccgctgatctc

SEQ ID NO: 2960 - DNA, 35 bp, Artificial Sequence
  Synthetic oligonucleotide
acaccggtttagtacaggctggccgggataaccaa

SEQ ID NO: 2961 - DNA, 37 bp, Artificial Sequence
  Synthetic oligonucleotide
ggtggtcgaaggcttcgtagattcttccccccgctga

SEQ ID NO: 2962 - DNA, 35 bp, Artificial Sequence
  Synthetic oligonucleotide
gttctaagtactatgattaccccccgcataactaa

SEQ ID NO: 2963 - DNA, 38 bp, Artificial Sequence
  Synthetic oligonucleotide
actgggggggcgcaatttcgaggtggacgtacaactga

SEQ ID NO: 2964 - DNA, 36 bp, Artificial Sequence
  Synthetic oligonucleotide
gggatgggggacgttgcaattgagcccccccgcaaa

SEQ ID NO: 2965 - DNA, 38 bp, Artificial Sequence
  Synthetic oligonucleotide
gtgacccccccctatacctcgcgtataacatgtgatga

SEQ ID NO: 2966 - DNA, 38 bp, Artificial Sequence
  Synthetic oligonucleotide
gcacgtgaagactagtctatgatgaggggagggggtga

SEQ ID NO: 2967 - DNA, 38 bp, Artificial Sequence
  Synthetic oligonucleotide
agtgggtggtgggttcggtttgcttggttccctgttga

SEQ ID NO: 2968 - DNA, 38 bp, Artificial Sequence
  Synthetic oligonucleotide
atatggggtttatggggatggtgttatgggtggaatgt

SEQ ID NO: 2969 - DNA, 35 bp, Artificial Sequence
  Synthetic oligonucleotide
tgccattactaaggttcgatcttttagcatttcca

SEQ ID NO: 2970 - DNA, 35 bp, Artificial Sequence
  Synthetic oligonucleotide
attgaggtggttttgaggtgggctatctgagggat

SEQ ID NO: 2971 - DNA, 35 bp, Artificial Sequence
  Synthetic oligonucleotide
cagatgctccatccggagtaaacgctaattcagga

SEQ ID NO: 2972 - DNA, 36 bp, Artificial Sequence
  Synthetic oligonucleotide
gagctcctccgaccggcacccgcagacgtgccttaa

SEQ ID NO: 2973 - DNA, 35 bp, Artificial Sequence
  Synthetic oligonucleotide
acagcagaggtgttcagctctgattgaaggctcag

SEQ ID NO: 2974 - DNA, 35 bp, Artificial Sequence
  Synthetic oligonucleotide
tgagggatggttctagtctataactttcgattaaa

SEQ ID NO: 2975 - DNA, 35 bp, Artificial Sequence
  Synthetic oligonucleotide
ttcccgacgtggcataccaaggtcgggtcttaggt

SEQ ID NO: 2976 - DNA, 35 bp, Artificial Sequence
  Synthetic oligonucleotide
gagtctgtggaccagtaggacaagaattagcatgg

SEQ ID NO: 2977 - DNA, 35 bp, Artificial Sequence
  Synthetic oligonucleotide
tgagggcctttagctttatctgcctcgagctcccc

SEQ ID NO: 2978 - DNA, 35 bp, Artificial Sequence
  Synthetic oligonucleotide
cacagtcgatctcggtatactatgcgcaggcaatg

SEQ ID NO: 2979 - DNA, 38 bp, Artificial Sequence
  Synthetic oligonucleotide
tgtttgacactattcccccgcctaaactagactgctga

SEQ ID NO: 2980 - DNA, 35 bp, Artificial Sequence
  Synthetic oligonucleotide
gctacgtactcgtcagtatgatatgcaatagtgcc

SEQ ID NO: 2981 - DNA, 37 bp, Artificial Sequence
  Synthetic oligonucleotide
tttaggggtcgcactaccatcgtgaggtggcccagta

SEQ ID NO: 2982 - DNA, 36 bp, Artificial Sequence
  Synthetic oligonucleotide
caccgggatgagccgggtagatttaacacagtcgaa

SEQ ID NO: 2983 - DNA, 35 bp, Artificial Sequence
  Synthetic oligonucleotide
ggaaaccgcaggggcttaagaacaagtacgcggtt

SEQ ID NO: 2984 - DNA, 38 bp, Artificial Sequence
  Synthetic oligonucleotide
ttagttacgcgtgactgtcccgccgccacacattttga

SEQ ID NO: 2985 - DNA, 37 bp, Artificial Sequence
  Synthetic oligonucleotide
ttatagcgtgctgtcatagtgcaaggacgcgacaaga

SEQ ID NO: 2986 - DNA, 35 bp, Artificial Sequence
  Synthetic oligonucleotide
gaggagatcccttgtctgccaatgatgctaatccc

SEQ ID NO: 2987 - DNA, 32 bp, Artificial Sequence
  Synthetic oligonucleotide
gcactaacgatagtagagcacgttgaaagtta

SEQ ID NO: 2988 - DNA, 37 bp, Artificial Sequence
  Synthetic oligonucleotide
tacgctctcccccccagcctagcgagtacaggcaaga

SEQ ID NO: 2989 - DNA, 36 bp, Artificial Sequence
  Synthetic oligonucleotide
gactacgggtcacgatacaatcgggaccgatgtaca

SEQ ID NO: 2990 - DNA, 35 bp, Artificial Sequence
  Synthetic oligonucleotide
ccctgccttccttgcggccttggggattggttgct

SEQ ID NO: 2991 - DNA, 36 bp, Artificial Sequence
  Synthetic oligonucleotide
tcagcacacaattcgtcagtgcgagtatcgaggtta

SEQ ID NO: 2992 - DNA, 35 bp, Artificial Sequence
  Synthetic oligonucleotide
atcgcctgtcagcaagtttcatgttgactgatcgg

SEQ ID NO: 2993 - DNA, 35 bp, Artificial Sequence
  Synthetic oligonucleotide
acatgcgccctggcttaggcttacccccctcctgt

SEQ ID NO: 2994 - DNA, 35 bp, Artificial Sequence
  Synthetic oligonucleotide
gtatgataagagtggtcgtttcatgacagttaatg

SEQ ID NO: 2995 - DNA, 36 bp, Artificial Sequence
  Synthetic oligonucleotide
gagtgtgaaaacgcatcaactccccctccaccttaa

SEQ ID NO: 2996 - DNA, 35 bp, Artificial Sequence
  Synthetic oligonucleotide
atgtcgtgccagagggtatgacacttactctgacg

SEQ ID NO: 2997 - DNA, 36 bp, Artificial Sequence
  Synthetic oligonucleotide
tgcggtatgaaggcgcaattctatgcccgtaccgta

SEQ ID NO: 2998 - DNA, 37 bp, Artificial Sequence
  Synthetic oligonucleotide
tacttttgcacttgaggttccgtcgactgtccaatga

SEQ ID NO: 2999 - DNA, 36 bp, Artificial Sequence
  Synthetic oligonucleotide
acaaagccgaactgtacattcagtacttggcttgca

SEQ ID NO: 3000 - DNA, 36 bp, Artificial Sequence
  Synthetic oligonucleotide
atccccccggagtcagagcggtcagctattgttcaa

SEQ ID NO: 3001 - DNA, 35 bp, Artificial Sequence
  Synthetic oligonucleotide
tgcaaaggctatgaacgtacgcacttggttgtact

SEQ ID NO: 3002 - DNA, 37 bp, Artificial Sequence
  Synthetic oligonucleotide
ccattatcgtcgatggtctaaggccaacccccggaga

SEQ ID NO: 3003 - DNA, 36 bp, Artificial Sequence
  Synthetic oligonucleotide
agtgagcaagtcagtgattgtagattcactcctccc

SEQ ID NO: 3004 - DNA, 31 bp, Artificial Sequence
  Synthetic oligonucleotide
gagctggctaagattgccggatgttaccctg

SEQ ID NO: 3005 - DNA, 35 bp, Artificial Sequence
  Synthetic oligonucleotide
ggaccccccgccttctatgacgcggtctgtaggaa

SEQ ID NO: 3006 - DNA, 37 bp, Artificial Sequence
  Synthetic oligonucleotide
atgctaggtcggtatgtgattgcagtttgggaataga

SEQ ID NO: 3007 - DNA, 38 bp, Artificial Sequence
  Synthetic oligonucleotide
attaatgggtggggggtttagcttgatgtgggttgtga

SEQ ID NO: 3008 - DNA, 36 bp, Artificial Sequence
  Synthetic oligonucleotide
aacccagttcacatacactctcaccctcactaaaca

SEQ ID NO: 3009 - DNA, 35 bp, Artificial Sequence
  Synthetic oligonucleotide
gtattttctgttttgttctctctttcgattattgt

SEQ ID NO: 3010 - DNA, 35 bp, Artificial Sequence
  Synthetic oligonucleotide
gtggggtttcgcatgtgttgtggttcttattaggt

SEQ ID NO: 3011 - DNA, 35 bp, Artificial Sequence
  Synthetic oligonucleotide
atggggaggggggtaggctgtcttaattggtggtt

SEQ ID NO: 3012 - DNA, 35 bp, Artificial Sequence
  Synthetic oligonucleotide
tccctcttttttgccctacgatcttagttcccttc

SEQ ID NO: 3013 - DNA, 35 bp, Artificial Sequence
  Synthetic oligonucleotide
gtatggggggtttgttgggttggtgtttttgtttt

SEQ ID NO: 3014 - DNA, 35 bp, Artificial Sequence
  Synthetic oligonucleotide
tgggaaggggtttttcttggttttgtttttattcc

SEQ ID NO: 3015 - DNA, 35 bp, Artificial Sequence
  Synthetic oligonucleotide
tgttggtttccttggttccctttttgtttcctgtt

SEQ ID NO: 3016 - DNA, 37 bp, Artificial Sequence
  Synthetic oligonucleotide
acttttccggccgtttttctttttttcctattgtcta

SEQ ID NO: 3017 - DNA, 35 bp, Artificial Sequence
  Synthetic oligonucleotide
ttacctctttgtttgggttttatcctttcttagtt

SEQ ID NO: 3018 - DNA, 35 bp, Artificial Sequence
  Synthetic oligonucleotide
ggggtaactgggggttatttggtttttgggggggc

SEQ ID NO: 3019 - DNA, 35 bp, Artificial Sequence
  Synthetic oligonucleotide
tttaatcttgctatgtggggtcgccctaactttat

SEQ ID NO: 3020 - DNA, 36 bp, Artificial Sequence
  Synthetic oligonucleotide
gttttatttttggcttttacatgagctttgttccga

SEQ ID NO: 3021 - DNA, 37 bp, Artificial Sequence
  Synthetic oligonucleotide
taagcaatccgctgccctattttttctcttgtgagga

SEQ ID NO: 3022 - DNA, 35 bp, Artificial Sequence
  Synthetic oligonucleotide
ttctttcttatttggggttttttgtctctattctc

SEQ ID NO: 3023 - DNA, 35 bp, Artificial Sequence
  Synthetic oligonucleotide
ttcggggttgtaattctgttttgtttttttcgctt

SEQ ID NO: 3024 - DNA, 35 bp, Artificial Sequence
  Synthetic oligonucleotide
tctgacggtatttcgggtttttttgtttttcttgt

SEQ ID NO: 3025 - DNA, 35 bp, Artificial Sequence; identical to SEQ ID NO: 104
  Synthetic oligonucleotide

SEQ ID NO: 3026 - DNA, 33 bp, Artificial Sequence
  Synthetic oligonucleotide
gtggccgcccatgccttttcgttcacgactctc

SEQ ID NO: 3027 - DNA, 38 bp, Artificial Sequence; identical to SEQ ID NO: 2967
  Synthetic oligonucleotide

SEQ ID NO: 3028 - DNA, 38 bp, Artificial Sequence; identical to SEQ ID NO: 2968
  Synthetic oligonucleotide

SEQ ID NO: 3029 - DNA, 38 bp, Artificial Sequence
  Synthetic oligonucleotide
cattgcataactaggctaccccgtggaatgtgacttga

SEQ ID NO: 3030 - DNA, 35 bp, Artificial Sequence; identical to SEQ ID NO: 2970
  Synthetic oligonucleotide

SEQ ID NO: 3031 - DNA, 36 bp, Artificial Sequence
  Synthetic oligonucleotide
aatgctgacacaaccgggagtaaacacgtgagcaga

SEQ ID NO: 3032 - DNA, 38 bp, Artificial Sequence
  Synthetic oligonucleotide
ctctttaaacggtactcttttcgggcgtgtttaattga

SEQ ID NO: 3033 - DNA, 35 bp, Artificial Sequence
  Synthetic oligonucleotide
attgtagggtaatagcatgtttgggtcatggcttg

SEQ ID NO: 3034 - DNA, 36 bp, Artificial Sequence
  Synthetic oligonucleotide
gtattctagcgcagctttgtacaaacttaccggtta

SEQ ID NO: 3035 - DNA, 37 bp, Artificial Sequence
  Synthetic oligonucleotide
ggtacgttgagtcattcatgctcatcctatggggaga

SEQ ID NO: 3036 - DNA, 35 bp, Artificial Sequence
  Synthetic oligonucleotide
ggtggtcatgatagtaaactgtatctgttttcgat

SEQ ID NO: 3037 - DNA, 36 bp, Artificial Sequence
  Synthetic oligonucleotide
tttatagaggaccggtagctggttacgaccgtccaa

SEQ ID NO: 3038 - DNA, 35 bp, Artificial Sequence
  Synthetic oligonucleotide
acacgaaacaataggtcgcggtcatgaacatgcgg

SEQ ID NO: 3039 - DNA, 35 bp, Artificial Sequence
  Synthetic oligonucleotide
gagcagattcccgcaccacacgccctcccccgtta

SEQ ID NO: 3040 - DNA, 36 bp, Artificial Sequence
  Synthetic oligonucleotide
gcatgacttctcaagcatgacacggactggttggaa

SEQ ID NO: 3041 - DNA, 36 bp, Artificial Sequence
  Synthetic oligonucleotide
tcatacgggtcacgctcagtgagtgacatgcgcata

SEQ ID NO: 3042 - DNA, 35 bp, Artificial Sequence
  Synthetic oligonucleotide
ccagaccacaagggcacgttctcccccgctatacg

SEQ ID NO: 3043 - DNA, 36 bp, Artificial Sequence
  Synthetic oligonucleotide
acgtacctagcataggacggggcgaactaggggcga

SEQ ID NO: 3044 - DNA, 38 bp, Artificial Sequence
  Synthetic oligonucleotide
tgcgcaagttggcttaggggataggtgttcccgactga

SEQ ID NO: 3045 - DNA, 37 bp, Artificial Sequence
  Synthetic oligonucleotide
aatcacgatctccagttgagactcccaagcccgccga

SEQ ID NO: 3046 - DNA, 36 bp, Artificial Sequence
  Synthetic oligonucleotide
ataactccctccatgggttcgcgagcccgggtgtta

SEQ ID NO: 3047 - DNA, 35 bp, Artificial Sequence
  Synthetic oligonucleotide
ttgcgagggtaaagttggagggcggtaaagcattg

SEQ ID NO: 3048 - DNA, 36 bp, Artificial Sequence
  Synthetic oligonucleotide
tgacgggcattggcctcgtacggacaggctttgtta

SEQ ID NO: 3049 - DNA, 37 bp, Artificial Sequence
  Synthetic oligonucleotide
atgcgggcacaggtacgctaaaagtgtgattacgtga

SEQ ID NO: 3050 - DNA, 35 bp, Artificial Sequence
  Synthetic oligonucleotide
tattaaagacgtctagttgccgtttcgatagaaca

SEQ ID NO: 3051 - DNA, 37 bp, Artificial Sequence
  Synthetic oligonucleotide
ttgcgctgagggcgatcataatgcattcgtttgtaga

SEQ ID NO: 3052 - DNA, 38 bp, Artificial Sequence
  Synthetic oligonucleotide
catattggccgttaggcgtctctttaacagcggagtga

SEQ ID NO: 3053 - DNA, 37 bp, Artificial Sequence
  Synthetic oligonucleotide
tagggcacagaatagcttccacgcacagagaccggga

SEQ ID NO: 3054 - DNA, 37 bp, Artificial Sequence
  Synthetic oligonucleotide
gtattagaggaatggggggcaattttggaaccctcga

SEQ ID NO: 3055 - DNA, 37 bp, Artificial Sequence
  Synthetic oligonucleotide
gaccctcaacaaagaacaggttagagggtacccacga

SEQ ID NO: 3056 - DNA, 35 bp, Artificial Sequence
  Synthetic oligonucleotide
tgtgaagctagcgtactttcgcaaggtgtagttgt

SEQ ID NO: 3057 - DNA, 36 bp, Artificial Sequence
  Synthetic oligonucleotide
cgtcgactaacagcattcaacgcgatgctacgccta

SEQ ID NO: 3058 - DNA, 35 bp, Artificial Sequence
  Synthetic oligonucleotide
agccgattgcacgttacatatggattataagattc

SEQ ID NO: 3059 - DNA, 35 bp, Artificial Sequence
  Synthetic oligonucleotide
gactgttggcgaacgtatatatatgttaggactgt

SEQ ID NO: 3060 - DNA, 36 bp, Artificial Sequence
  Synthetic oligonucleotide
gatcgatctaggattctagcgggtcttatgcacagg

SEQ ID NO: 3061 - DNA, 35 bp, Artificial Sequence
  Synthetic oligonucleotide
tcaccgcgatagaggtcgctaggtccatgccaggt

SEQ ID NO: 3062 - DNA, 35 bp, Artificial Sequence
  Synthetic oligonucleotide
gaatcgccctctccgtcgtagtcgggctcgataaa

SEQ ID NO: 3063 - DNA, 37 bp, Artificial Sequence
  Synthetic oligonucleotide
gcgcgcaagcgcttggttacggatatatgaggggtga

SEQ ID NO: 3064 - DNA, 37 bp, Artificial Sequence
  Synthetic oligonucleotide
attcgaaacctcggtgacggtaaaggtggagagagga

SEQ ID NO: 3065 - DNA, 38 bp, Artificial Sequence
  Synthetic oligonucleotide
tgtccgccaggcgtggggtattgaaactggcggaatga

SEQ ID NO: 3066 - DNA, 35 bp, Artificial Sequence
  Synthetic oligonucleotide
aacttcaggggttacattaagtggggtacttgtga

SEQ ID NO: 3067 - DNA, 37 bp, Artificial Sequence
  Synthetic oligonucleotide
tcctactgtcaggaattatggtagtagcttgttttga

SEQ ID NO: 3068 - DNA, 36 bp, Artificial Sequence
  Synthetic oligonucleotide
atgttgcacacacgcctgccacgcatatctgtgata

SEQ ID NO: 3069 - DNA, 37 bp, Artificial Sequence
  Synthetic oligonucleotide
cgtcatgaacatatcacattaggtcataggcgactga

SEQ ID NO: 3070 - DNA, 35 bp, Artificial Sequence
  Synthetic oligonucleotide
gtgttggaccattgggctccaacgacgttaacgtg

SEQ ID NO: 3071 - DNA, 38 bp, Artificial Sequence
  Synthetic oligonucleotide
gcgatcgtcatggaggtgccacaaccattgtgctgtga

SEQ ID NO: 3072 - DNA, 35 bp, Artificial Sequence
  Synthetic oligonucleotide
acaacgctaaatccatccgagtctgataaagcgcc

SEQ ID NO: 3073 - DNA, 36 bp, Artificial Sequence
  Synthetic oligonucleotide
tgaaggttcaactaatggaggggacatcgcgggata

SEQ ID NO: 3074 - DNA, 35 bp, Artificial Sequence
  Synthetic oligonucleotide
ctacagcttctcggtgtgttttagacccgcccccc

SEQ ID NO: 3075 - DNA, 38 bp, Artificial Sequence
  Synthetic oligonucleotide
aacaatcggtgttagttaccggtgagttttgttcgtga

SEQ ID NO: 3076 - DNA, 35 bp, Artificial Sequence
  Synthetic oligonucleotide
gcttacaccgcagagctgtagtcgacgaaccagaa

SEQ ID NO: 3077 - DNA, 37 bp, Artificial Sequence
  Synthetic oligonucleotide
accagttggctagataggtaacgtttacggcttgtga

SEQ ID NO: 3078 - DNA, 38 bp, Artificial Sequence
  Synthetic oligonucleotide
actaatcaacgggtcgggcatagtgcaacttggggtga

SEQ ID NO: 3079 - DNA, 33 bp, Artificial Sequence
  Synthetic oligonucleotide
cccaccttcattacaagtgggattagatttgga

SEQ ID NO: 3080 - DNA, 35 bp, Artificial Sequence
  Synthetic oligonucleotide
gccgcgcgcgataaccgtgcagtcatcggactgac

SEQ ID NO: 3081 - DNA, 38 bp, Artificial Sequence
  Synthetic oligonucleotide
aggctcgctatttgctcgtcacacttttcagtcattga

SEQ ID NO: 3082 - DNA, 38 bp, Artificial Sequence
  Synthetic oligonucleotide
gatcaacatcttccacgcatgaagtcggtacgacatga

SEQ ID NO: 3083 - DNA, 37 bp, Artificial Sequence
  Synthetic oligonucleotide
ggaggttcgtttttgcatcatgaaaccgtgggatgga

SEQ ID NO: 3084 - DNA, 37 bp, Artificial Sequence
  Synthetic oligonucleotide
atcgtgggtcatgtggatgtgggttaaattgggcgga

SEQ ID NO: 3085 - DNA, 36 bp, Artificial Sequence
  Synthetic oligonucleotide
gggggtatcccccgaaacagcatctatggcatgtca

SEQ ID NO: 3086 - DNA, 35 bp, Artificial Sequence
  Synthetic oligonucleotide
ttgtggacaatcgcagtatgctgagggtgttcaga

SEQ ID NO: 3087 - DNA, 35 bp, Artificial Sequence
  Synthetic oligonucleotide
tgatggtatgtccccgtacgatggttctagagggc

SEQ ID NO: 3088 - DNA, 36 bp, Artificial Sequence
  Synthetic oligonucleotide
acatcatccatgacgatatgaagttgacagctgtca

SEQ ID NO: 3089 - DNA, 37 bp, Artificial Sequence
  Synthetic oligonucleotide
acgtgtcatattgctagtgagtctcatgaccgtgtga

SEQ ID NO: 3090 - DNA, 35 bp, Artificial Sequence
  Synthetic oligonucleotide
atctaattgagatctagctcttagagggggattgt

SEQ ID NO: 3091 - DNA, 36 bp, Artificial Sequence
  Synthetic oligonucleotide
gctactagtgttacgttctagaagggtatagcgata

SEQ ID NO: 3092 - DNA, 37 bp, Artificial Sequence
  Synthetic oligonucleotide
gtgtatcacacgtcccatgatcgagaggccccaagga

SEQ ID NO: 3093 - DNA, 36 bp, Artificial Sequence
  Synthetic oligonucleotide
gtgttcccagttaaagtccaagtcagctctttcaga

SEQ ID NO: 3094 - DNA, 38 bp, Artificial Sequence
  Synthetic oligonucleotide
ttgcgtgccaacttaagttaaacttgggaactacttga

SEQ ID NO: 3095 - DNA, 36 bp, Artificial Sequence
  Synthetic oligonucleotide
gtttcgactgacgtacggtgtgggtaggctttgaca

SEQ ID NO: 3096 - DNA, 36 bp, Artificial Sequence
  Synthetic oligonucleotide
gataaaccactatatcatcttctagttccggtagga

SEQ ID NO: 3097 - DNA, 36 bp, Artificial Sequence
  Synthetic oligonucleotide
gtttgcgaattcctgtaagggcatcaaaaagtttta

SEQ ID NO: 3098 - DNA, 38 bp, Artificial Sequence
  Synthetic oligonucleotide
gttttagttacgcattgtcccattctggggcggactga

SEQ ID NO: 3099 - DNA, 36 bp, Artificial Sequence
  Synthetic oligonucleotide
tcaatggtgagcccggaatcattggtatgagcaaga

SEQ ID NO: 3100 - DNA, 36 bp, Artificial Sequence
  Synthetic oligonucleotide
ttgcatcccgtatttgatgtttacagatgacctcta

SEQ ID NO: 3101 - DNA, 35 bp, Artificial Sequence
  Synthetic oligonucleotide
agtgtttacgtagtcattttcatgatgacttatgg

SEQ ID NO: 3102 - DNA, 36 bp, Artificial Sequence
  Synthetic oligonucleotide
ctcccccggcgtcaaaaagtcgtcgtgtgggattaa

SEQ ID NO: 3103 - DNA, 36 bp, Artificial Sequence
  Synthetic oligonucleotide
tgttgggcggtcatttgtacgtacgtgtgaatggga

SEQ ID NO: 3104 - DNA, 35 bp, Artificial Sequence
  Synthetic oligonucleotide
attgaaacgtatcaaaactgcaccctggatataag

SEQ ID NO: 3105 - DNA, 35 bp, Artificial Sequence
  Synthetic oligonucleotide
ttggttgaatgctggggtaactagttggtgaagca

SEQ ID NO: 3106 - DNA, 35 bp, Artificial Sequence
  Synthetic oligonucleotide
ggtcggacagagctagcagtaacacctggcggtcc

SEQ ID NO: 3107 - DNA, 37 bp, Artificial Sequence
  Synthetic oligonucleotide
tgtacatggtcagaaaaaggtattcagggtgcccaga

SEQ ID NO: 3108 - DNA, 37 bp, Artificial Sequence
  Synthetic oligonucleotide
ttaccgaggttgactaagtctgcgtaggttaaaggga

SEQ ID NO: 3109 - DNA, 35 bp, Artificial Sequence
  Synthetic oligonucleotide
ttggttgactgttggtccaagtgttaacgggcgtt

SEQ ID NO: 3110 - DNA, 35 bp, Artificial Sequence
  Synthetic oligonucleotide
aagtgatctttcattggtcttcttgcatctttgct

SEQ ID NO: 3111 - DNA, 37 bp, Artificial Sequence
  Synthetic oligonucleotide
ctgcgaggtatgaagaggattaacagccaacaattga

SEQ ID NO: 3112 - DNA, 35 bp, Artificial Sequence
  Synthetic oligonucleotide
gaaggagtttggtcgcagaagataggcggattcct

SEQ ID NO: 3113 - DNA, 36 bp, Artificial Sequence
  Synthetic oligonucleotide
tagccatggtcacaaacggatgctgcggttaaggaa

SEQ ID NO: 3114 - DNA, 37 bp, Artificial Sequence
  Synthetic oligonucleotide
acacgcaaaactatggccggaagatgcgacttgatga

SEQ ID NO: 3115 - DNA, 38 bp, Artificial Sequence
  Synthetic oligonucleotide
ggtggacacctcacacctccgcacttgtagacgattga

SEQ ID NO: 3116 - DNA, 38 bp, Artificial Sequence
  Synthetic oligonucleotide
tggtgctgtaaagtactgtgggaaaattttagggttga

SEQ ID NO: 3117 - DNA, 36 bp, Artificial Sequence
  Synthetic oligonucleotide
ccacctgcatgtggtcaatgtgctggagtgaagcga

SEQ ID NO: 3118 - DNA, 36 bp, Artificial Sequence
  Synthetic oligonucleotide
catgaacatggagcgactgcttagatatgctaatca

SEQ ID NO: 3119 - DNA, 37 bp, Artificial Sequence
  Synthetic oligonucleotide
gaagtcatctagattaagactaccaggttacgacaga

SEQ ID NO: 3120 - DNA, 36 bp, Artificial Sequence
  Synthetic oligonucleotide
ggcgtgtttaaatcttcgcacgccaatcagtctata

SEQ ID NO: 3121 - DNA, 36 bp, Artificial Sequence
  Synthetic oligonucleotide
ccaacctttacgagaaccaatggctaacgacgtaca

SEQ ID NO: 3122 - DNA, 38 bp, Artificial Sequence
  Synthetic oligonucleotide
tacaaaggctaacactttgtcaacggggtttttcctga

SEQ ID NO: 3123 - DNA, 36 bp, Artificial Sequence
  Synthetic oligonucleotide
ccgtgacacccgacgacgaagacctggcgaactaca

SEQ ID NO: 3124 - DNA, 35 bp, Artificial Sequence
  Synthetic oligonucleotide
aatgttctgcagttcttaatgcggaaatttttggt

SEQ ID NO: 3125 - DNA, 36 bp, Artificial Sequence
  Synthetic oligonucleotide
catgagtcgaccaggctcgcctcttcagggttctaa

SEQ ID NO: 3126 - DNA, 35 bp, Artificial Sequence
  Synthetic oligonucleotide
ctaccatatctaagaccgtcatgggcgggaaactg

SEQ ID NO: 3127 - DNA, 37 bp, Artificial Sequence
  Synthetic oligonucleotide
gcacgtccaacaaattagataggcgtccccggctaga

SEQ ID NO: 3128 - DNA, 35 bp, Artificial Sequence
  Synthetic oligonucleotide
tgtatgtgacgtattctcacgggtggtgtttactg

SEQ ID NO: 3129 - DNA, 37 bp, Artificial Sequence
  Synthetic oligonucleotide
gcatgttcacggcggtacatggctttacgtttcctga

SEQ ID NO: 3130 - DNA, 37 bp, Artificial Sequence
  Synthetic oligonucleotide
gtaaaaacgatctttcgtgcatcctattgtcgtgaga

SEQ ID NO: 3131 - DNA, 38 bp, Artificial Sequence
  Synthetic oligonucleotide
gatcgtcttagacgggtacgtacagtaatgcatgttga

SEQ ID NO: 3132 - DNA, 36 bp, Artificial Sequence
  Synthetic oligonucleotide
atggagaactcctacggctttgaggtttatttggaa

SEQ ID NO: 3133 - DNA, 35 bp, Artificial Sequence
  Synthetic oligonucleotide
gtgctaaccgccccccactgtggatccagtcaagt

SEQ ID NO: 3134 - DNA, 37 bp, Artificial Sequence
  Synthetic oligonucleotide
tcatgctataaggggcgaattagctagctaagctcga

SEQ ID NO: 3135 - DNA, 34 bp, Artificial Sequence
  Synthetic oligonucleotide
gcgctcgtctagaggcgaacttcaggtggccctc

SEQ ID NO: 3136 - DNA, 36 bp, Artificial Sequence
  Synthetic oligonucleotide
acgaacttagcacctaaggttttggtctgtgtctta

SEQ ID NO: 3137 - DNA, 36 bp, Artificial Sequence
  Synthetic oligonucleotide
tttgaggcacggtgggtttcagtttacccctgctta

SEQ ID NO: 3138 - DNA, 35 bp, Artificial Sequence
  Synthetic oligonucleotide
gcactctgacgggtgtttaaaggcgtattccgcgg

SEQ ID NO: 3139 - DNA, 37 bp, Artificial Sequence
  Synthetic oligonucleotide
ggtcccggaattgttctatggagggcctcacatggga

SEQ ID NO: 3140 - DNA, 35 bp, Artificial Sequence
  Synthetic oligonucleotide
tgagaatgagggcgtgcagtacaaggtggtgattt

SEQ ID NO: 3141 - DNA, 36 bp, Artificial Sequence
  Synthetic oligonucleotide
aacgaagtactttactaagggtatcgtatccgggta

SEQ ID NO: 3142 - DNA, 37 bp, Artificial Sequence
  Synthetic oligonucleotide
agagaatagggcgtcctgatactacagcatgacatga

SEQ ID NO: 3143 - DNA, 36 bp, Artificial Sequence
  Synthetic oligonucleotide
gtatcgggtgaagaacatcaagtaaggctcagcgaa

SEQ ID NO: 3144 - DNA, 35 bp, Artificial Sequence
  Synthetic oligonucleotide
tctagagtggtgctgatttcccaagtttttcaaat

SEQ ID NO: 3145 - DNA, 37 bp, Artificial Sequence
  Synthetic oligonucleotide
gactgcatcagatcaggcaaaagggtaaaaactggga

SEQ ID NO: 3146 - DNA, 38 bp, Artificial Sequence
  Synthetic oligonucleotide
gattgctggttggtgctggaggtaggcaatgtacctga

SEQ ID NO: 3147 - DNA, 36 bp, Artificial Sequence
  Synthetic oligonucleotide
ggtcacgagcgactcacgttttaccggcttcttgaa

SEQ ID NO: 3148 - DNA, 35 bp, Artificial Sequence
  Synthetic oligonucleotide
gtcgtggtcacgaattctagacccaaggtacgcgg

SEQ ID NO: 3149 - DNA, 36 bp, Artificial Sequence
  Synthetic oligonucleotide
tatctgtcctcgacttttgtaaaggggaacgcggga

SEQ ID NO: 3150 - DNA, 35 bp, Artificial Sequence
  Synthetic oligonucleotide
gcccactaagtaccgtgtattggagcgtacgcgag

SEQ ID NO: 3151 - DNA, 36 bp, Artificial Sequence
  Synthetic oligonucleotide
ggtcattcactcaatgcaatgaagtcgtccggggga

SEQ ID NO: 3152 - DNA, 36 bp, Artificial Sequence
  Synthetic oligonucleotide
gagtgtcccgtagagacctcaggaccgctaaagtga

SEQ ID NO: 3153 - DNA, 37 bp, Artificial Sequence
  Synthetic oligonucleotide
aaagctttcgtgcagatcataggtactgggccttaga

SEQ ID NO: 3154 - DNA, 37 bp, Artificial Sequence
  Synthetic oligonucleotide
agttgaagctcggagcttcgaaagagtagtcagccga

SEQ ID NO: 3155 - DNA, 38 bp, Artificial Sequence
  Synthetic oligonucleotide
gtgatagttactaggtagaagagtcggttggtggttga

SEQ ID NO: 3156 - DNA, 35 bp, Artificial Sequence
  Synthetic oligonucleotide
gatagtgagcttgtaaaccgggaatgttcaccaag

SEQ ID NO: 3157 - DNA, 35 bp, Artificial Sequence
  Synthetic oligonucleotide
acggtatcgaccggcgccgtgcgtctaagggatgg

SEQ ID NO: 3158 - DNA, 38 bp, Artificial Sequence
  Synthetic oligonucleotide
atgcagcatatgtactacgtcccctatgactaggttga

SEQ ID NO: 3159 - DNA, 35 bp, Artificial Sequence
  Synthetic oligonucleotide
atgtcaatctagaagtacctgcgctctaagtgggg

SEQ ID NO: 3160 - DNA, 35 bp, Artificial Sequence
  Synthetic oligonucleotide
gctattgaacaacacttatcaggaataggatcaag

SEQ ID NO: 3161 - DNA, 35 bp, Artificial Sequence
  Synthetic oligonucleotide
gctgagggaaagggttttcccctcacagttaacta

SEQ ID NO: 3162 - DNA, 38 bp, Artificial Sequence
  Synthetic oligonucleotide
tttgcacgattcggacgtagagcgtactgtatttctga

SEQ ID NO: 3163 - DNA, 36 bp, Artificial Sequence
  Synthetic oligonucleotide
acttggagacttgcgttcgcacaaaggcgagttaaa

SEQ ID NO: 3164 - DNA, 37 bp, Artificial Sequence
  Synthetic oligonucleotide
taccacctgccgcacaacgtcaggtcaagtctacaga

SEQ ID NO: 3165 - DNA, 35 bp, Artificial Sequence
  Synthetic oligonucleotide
ctagaagacaacttctacaaatctaccccccgagt

SEQ ID NO: 3166 - DNA, 35 bp, Artificial Sequence
  Synthetic oligonucleotide
ccaagagctgcccgcactatcatgagcccgtaggt

SEQ ID NO: 3167 - DNA, 36 bp, Artificial Sequence
  Synthetic oligonucleotide
caatgcccacccgtgatcgtcaaaggggaagcataa

SEQ ID NO: 3168 - DNA, 35 bp, Artificial Sequence
  Synthetic oligonucleotide
gcatgtctttactagaactgcaccggggaactgaa

SEQ ID NO: 3169 - DNA, 38 bp, Artificial Sequence
  Synthetic oligonucleotide
gtgtcgggttacacagagaccacgatggataatggtga

SEQ ID NO: 3170 - DNA, 36 bp, Artificial Sequence
  Synthetic oligonucleotide
tctgacttacagagtgtggaatgtgggaacttgtga

SEQ ID NO: 3171 - DNA, 35 bp, Artificial Sequence
  Synthetic oligonucleotide
tttgctaacgccgaagtaagtgcagtaagtttttc

SEQ ID NO: 3172 - DNA, 36 bp, Artificial Sequence
  Synthetic oligonucleotide
accgtttataggggtgaatgtgcgaacatcgactga

SEQ ID NO: 3173 - DNA, 36 bp, Artificial Sequence
  Synthetic oligonucleotide
attggtggattgggcccataccgtgcttctggatca

SEQ ID NO: 3174 - DNA, 37 bp, Artificial Sequence
  Synthetic oligonucleotide
gcaaatgctaacggggcaaataggtgtgtaacggtga

SEQ ID NO: 3175 - DNA, 36 bp, Artificial Sequence
  Synthetic oligonucleotide
tctgatcaatggatgactcgtgagctcctacagcaa

SEQ ID NO: 3176 - DNA, 36 bp, Artificial Sequence
  Synthetic oligonucleotide
acacatagggcgttagtataccatattgcataatga

SEQ ID NO: 3177 - DNA, 36 bp, Artificial Sequence
  Synthetic oligonucleotide
tatgctattgttgtgagattaattgtcgagagcaga

SEQ ID NO: 3178 - DNA, 36 bp, Artificial Sequence
  Synthetic oligonucleotide
ctgctcccaaggagttagtagggggtatgctggcta

SEQ ID NO: 3179 - DNA, 35 bp, Artificial Sequence
  Synthetic oligonucleotide
taatcagcactggattcggtgtgtctataccggac

SEQ ID NO: 3180 - DNA, 38 bp, Artificial Sequence
  Synthetic oligonucleotide
aaaggatcggcgaggcggtgccgagtctaaacaactga

SEQ ID NO: 3181 - DNA, 37 bp, Artificial Sequence
  Synthetic oligonucleotide
aatgtcccacggcggaatgattacagtatctacaaga

SEQ ID NO: 3182 - DNA, 36 bp, Artificial Sequence
  Synthetic oligonucleotide
acgtcccactcgctcaacaggaggacactgttttaa

SEQ ID NO: 3183 - DNA, 35 bp, Artificial Sequence
  Synthetic oligonucleotide
atcgttatcttgctcaaaggcgaattatgggaggt

SEQ ID NO: 3184 - DNA, 35 bp, Artificial Sequence
  Synthetic oligonucleotide
gaccaggggttgcaaattggttcccgtacgtgaca

SEQ ID NO: 3185 - DNA, 35 bp, Artificial Sequence
  Synthetic oligonucleotide
gagcttaaggcgggcccgaaggaagccctcatgtg

SEQ ID NO: 3186 - DNA, 36 bp, Artificial Sequence
  Synthetic oligonucleotide
gcttagtgcacgcattttcgctgttgtatgaagtga

SEQ ID NO: 3187 - DNA, 38 bp, Artificial Sequence
  Synthetic oligonucleotide
gtggtaggaatttacgaatggaactgcacagggcgtga

SEQ ID NO: 3188 - DNA, 36 bp, Artificial Sequence
  Synthetic oligonucleotide
tggagtacacagtgcagaattaccacacccccaaga

SEQ ID NO: 3189 - DNA, 38 bp, Artificial Sequence
  Synthetic oligonucleotide
ttggtgaggacgtcgtgcatggagttacgcgactgtga

SEQ ID NO: 3190 - DNA, 37 bp, Artificial Sequence
  Synthetic oligonucleotide
caccatcccgcgtgtcgtattggtgattcgggcgaga

SEQ ID NO: 3191 - DNA, 36 bp, Artificial Sequence
  Synthetic oligonucleotide
gttagctgatcgaaagggctatcaaggtgtgagata

SEQ ID NO: 3192 - DNA, 38 bp, Artificial Sequence
  Synthetic oligonucleotide
ggcgtgtcatggcctgggggtatggggcttacatgtga

SEQ ID NO: 3193 - DNA, 38 bp, Artificial Sequence
  Synthetic oligonucleotide
tgacacacctgaaagtaatgtgttctgcaagaacgtga

SEQ ID NO: 3194 - DNA, 35 bp, Artificial Sequence
  Synthetic oligonucleotide
aatcagaactcgcttggcgaagtattcgtacgcga

SEQ ID NO: 3195 - DNA, 36 bp, Artificial Sequence
  Synthetic oligonucleotide
agggtcacaaaaccgacctgtttgcggcttcaacca

SEQ ID NO: 3196 - DNA, 35 bp, Artificial Sequence
  Synthetic oligonucleotide
ggcgtattactggtcaaccgaatgattgggccgga

SEQ ID NO: 3197 - DNA, 37 bp, Artificial Sequence
  Synthetic oligonucleotide
gtacgcttaatcttcgagtcggtggaagtgatttaga

SEQ ID NO: 3198 - DNA, 38 bp, Artificial Sequence
  Synthetic oligonucleotide
gttgagaccgttaacacagtagagttaggcctgattga

SEQ ID NO: 3199 - DNA, 36 bp, Artificial Sequence
  Synthetic oligonucleotide
tcaacacgtccgtggctacggattgggcgaatcgca

SEQ ID NO: 3200 - DNA, 35 bp, Artificial Sequence
  Synthetic oligonucleotide
tttctttaggaccggtcgtcctcagtataggtatg

SEQ ID NO: 3201 - DNA, 37 bp, Artificial Sequence
  Synthetic oligonucleotide
acgctgggtgagactatctgaacccaggcgtcccgga

SEQ ID NO: 3202 - DNA, 35 bp, Artificial Sequence
  Synthetic oligonucleotide
gctggaggcctcctggaagtattcaaccgttccag

SEQ ID NO: 3203 - DNA, 37 bp, Artificial Sequence
  Synthetic oligonucleotide
taggtatttatacacgacatagctccgaaacggccga

SEQ ID NO: 3204 - DNA, 38 bp, Artificial Sequence
  Synthetic oligonucleotide
ggtaaagtatcattggcttgatgtcatcattggcatga

SEQ ID NO: 3205 - DNA, 38 bp, Artificial Sequence
  Synthetic oligonucleotide
ttgtccgcattcgggaggctacggtacgcaggcactga

SEQ ID NO: 3206 - DNA, 35 bp, Artificial Sequence
  Synthetic oligonucleotide
aaacccccgcgcccctagttctcttgagtgtcatc

SEQ ID NO: 3207 - DNA, 37 bp, Artificial Sequence
  Synthetic oligonucleotide
cagtcccgcaggcatgtaattaatgtcacgttacgga

SEQ ID NO: 3208 - DNA, 38 bp, Artificial Sequence
  Synthetic oligonucleotide
gcaacacattggtgcaatgtcaagtagccactgagtga

SEQ ID NO: 3209 - DNA, 35 bp, Artificial Sequence
  Synthetic oligonucleotide
gggagccgcctcgtctgagaaagttctgagggggc

SEQ ID NO: 3210 - DNA, 35 bp, Artificial Sequence
  Synthetic oligonucleotide
tacgtaatacccccgctgagtttcgaaccgtgcat

SEQ ID NO: 3211 - DNA, 37 bp, Artificial Sequence
  Synthetic oligonucleotide
agtctacttggaacgaatcgatcaagcacgtagctga

SEQ ID NO: 3212 - DNA, 36 bp, Artificial Sequence
  Synthetic oligonucleotide
tgttggacagataaattatgagtagcaagcggtgta

SEQ ID NO: 3213 - DNA, 35 bp, Artificial Sequence
  Synthetic oligonucleotide
taagggtgcgagagttcaatggtgcaggatgagcg

SEQ ID NO: 3214 - DNA, 37 bp, Artificial Sequence
  Synthetic oligonucleotide
tctgtcatggaggtgcgccagtgtttggctgagcgga

SEQ ID NO: 3215 - DNA, 36 bp, Artificial Sequence
  Synthetic oligonucleotide
gtgttatcgagaaacaaaactgatgtgtgacatgta

SEQ ID NO: 3216 - DNA, 35 bp, Artificial Sequence
  Synthetic oligonucleotide
agtattaaggggagtgcgagacaatatattcgaaa

SEQ ID NO: 3217 - DNA, 36 bp, Artificial Sequence
  Synthetic oligonucleotide
ggttccaggggaacactacgtagggttcatacccta

SEQ ID NO: 3218 - DNA, 35 bp, Artificial Sequence
  Synthetic oligonucleotide
gtgcggttgagtttcgatcccactcaaacatagta

SEQ ID NO: 3219 - DNA, 36 bp, Artificial Sequence
  Synthetic oligonucleotide
actatactggcctggacatggtcaggcatactttga

SEQ ID NO: 3220 - DNA, 38 bp, Artificial Sequence
  Synthetic oligonucleotide
actgcaactccccggtggcatgtagataggtttgttga

SEQ ID NO: 3221 - DNA, 38 bp, Artificial Sequence
  Synthetic oligonucleotide
gttaacagcttctggaaatgctactttgattgtcgtga

SEQ ID NO: 3222 - DNA, 36 bp, Artificial Sequence
  Synthetic oligonucleotide
tacattgagatttcaagtggttctcgcacagttgga

SEQ ID NO: 3223 - DNA, 38 bp, Artificial Sequence
  Synthetic oligonucleotide
gactaacctcagccatacgatctaataatagatcgtga

SEQ ID NO: 3224 - DNA, 38 bp, Artificial Sequence
  Synthetic oligonucleotide
agcgaccggaacccgagactagaactgcaggatggtga

SEQ ID NO: 3225 - DNA, 37 bp, Artificial Sequence
  Synthetic oligonucleotide
taatggtgatggaaagcctagctgacgcttgcgcgga

SEQ ID NO: 3226 - DNA, 35 bp, Artificial Sequence
  Synthetic oligonucleotide
tcttacgtgctgcggagggggggcttatggtggtc

SEQ ID NO: 3227 - DNA, 38 bp, Artificial Sequence
  Synthetic oligonucleotide
gacacacttccttacgctttttggtactcgtgggttga

SEQ ID NO: 3228 - DNA, 36 bp, Artificial Sequence
  Synthetic oligonucleotide
tatacacggcatagacgtgccttgaaatacgttgta

SEQ ID NO: 3229 - DNA, 37 bp, Artificial Sequence
  Synthetic oligonucleotide
gtcacttgtgttgtgtatgctgtccgactacagacga

SEQ ID NO: 3230 - DNA, 37 bp, Artificial Sequence
  Synthetic oligonucleotide
acagtctcttggggctccgatatctatggtgtctgga

SEQ ID NO: 3231 - DNA, 35 bp, Artificial Sequence
  Synthetic oligonucleotide
ggactctcataggttcatgaattcacattttcggg

SEQ ID NO: 3232 - DNA, 37 bp, Artificial Sequence
  Synthetic oligonucleotide
tcgtcactcgatgcattgagccgctggaggatttgga

SEQ ID NO: 3233 - DNA, 36 bp, Artificial Sequence
  Synthetic oligonucleotide
gctaatgtgcgagtaaaaggtccgaccagtgtgcta

SEQ ID NO: 3234 - DNA, 37 bp, Artificial Sequence
  Synthetic oligonucleotide
atgttagtcctacatgtaagggttgcaggctatggga

SEQ ID NO: 3235 - DNA, 35 bp, Artificial Sequence
  Synthetic oligonucleotide
agttacgcgaatcggggtttggtccacgccatggg

SEQ ID NO: 3236 - DNA, 38 bp, Artificial Sequence
  Synthetic oligonucleotide
tacgactaagaagtcatataagtctcggctgaccatga

SEQ ID NO: 3237 - DNA, 35 bp, Artificial Sequence
  Synthetic oligonucleotide
tcaatggtgttgctcttatcattgtaacgactatt

SEQ ID NO: 3238 - DNA, 36 bp, Artificial Sequence
  Synthetic oligonucleotide
tgacttcagtaccagtctttattccatggcaccata

SEQ ID NO: 3239 - DNA, 38 bp, Artificial Sequence
  Synthetic oligonucleotide
gaaaaccgtacccgactcatccaactgtgggggggtga

SEQ ID NO: 3240 - DNA, 37 bp, Artificial Sequence
  Synthetic oligonucleotide
ataccaaggaaacgtccaagtgcctgtcttatttgga

SEQ ID NO: 3241 - DNA, 35 bp, Artificial Sequence
  Synthetic oligonucleotide
tgcgtcctgtgaaacactgaacgactaaccttgaa

SEQ ID NO: 3242 - DNA, 37 bp, Artificial Sequence
  Synthetic oligonucleotide
agaccagaattctctagacatccgcttctgtatgtga

SEQ ID NO: 3243 - DNA, 35 bp, Artificial Sequence
  Synthetic oligonucleotide
agcatgcaactgggaatgctatgataggggtacaa

SEQ ID NO: 3244 - DNA, 37 bp, Artificial Sequence
  Synthetic oligonucleotide
caaaaccgccaaagtgatactacagttaacggaatga

SEQ ID NO: 3245 - DNA, 35 bp, Artificial Sequence
  Synthetic oligonucleotide
gaagtcatgatctagtgggtagtaattacaaatta

SEQ ID NO: 3246 - DNA, 36 bp, Artificial Sequence
  Synthetic oligonucleotide
gataactcacgttaatgtgagctcacggtaccagta

SEQ ID NO: 3247 - DNA, 35 bp, Artificial Sequence
  Synthetic oligonucleotide
tagtcaggaatgtacgaaaattagaatagaggatc

SEQ ID NO: 3248 - DNA, 35 bp, Artificial Sequence
  Synthetic oligonucleotide
aaagaaagtgcacgtggtgcagacgactaacttct

SEQ ID NO: 3249 - DNA, 38 bp, Artificial Sequence
  Synthetic oligonucleotide
gaagcacaggttgggacctgcacgtttgtggtcagtga

SEQ ID NO: 3250 - DNA, 36 bp, Artificial Sequence
  Synthetic oligonucleotide
gcctaaaaggggcacgatcaagtcgactattggata

SEQ ID NO: 3251 - DNA, 35 bp, Artificial Sequence
  Synthetic oligonucleotide
gcgttcactgttgtagaggcgtattttcgcgtgtt

SEQ ID NO: 3252 - DNA, 35 bp, Artificial Sequence
  Synthetic oligonucleotide
ttgaattgtcctgcataccttgggagtttggagca

SEQ ID NO: 3253 - DNA, 35 bp, Artificial Sequence
  Synthetic oligonucleotide
gggatctcacgtaccaagtaatggagggtaaagtg

SEQ ID NO: 3254 - DNA, 36 bp, Artificial Sequence
  Synthetic oligonucleotide
attattgttaccagctctgctcaagcggtcacaaga

SEQ ID NO: 3255 - DNA, 37 bp, Artificial Sequence
  Synthetic oligonucleotide
gtcgaacctcgctctgttattcgacctatacagttga

SEQ ID NO: 3256 - DNA, 35 bp, Artificial Sequence
  Synthetic oligonucleotide
gcagaagcggaccaccccgtggagtgcttttacgt

SEQ ID NO: 3257 - DNA, 35 bp, Artificial Sequence
  Synthetic oligonucleotide
aatacgccgaaccaaccctgccgtcgtgttagcca

SEQ ID NO: 3258 - DNA, 36 bp, Artificial Sequence
  Synthetic oligonucleotide
agcaggtagctaggagcctcacgttaccactctaga

SEQ ID NO: 3259 - DNA, 37 bp, Artificial Sequence
  Synthetic oligonucleotide
agtgcatgtctcatggatatccagaaatgggcggaga

SEQ ID NO: 3260 - DNA, 37 bp, Artificial Sequence
  Synthetic oligonucleotide
ccttatcgtcctgcggaggctgaaattcaggtatcga

SEQ ID NO: 3261 - DNA, 37 bp, Artificial Sequence
  Synthetic oligonucleotide
gatggctaggacggcgtgataggtaaggctaaattga

SEQ ID NO: 3262 - DNA, 35 bp, Artificial Sequence
  Synthetic oligonucleotide
gcacttgcaaaggtgcacatcgaatgcggccgatc

SEQ ID NO: 3263 - DNA, 37 bp, Artificial Sequence
  Synthetic oligonucleotide
gcgttgaacctggactgctaggtgggctgggaatgga

SEQ ID NO: 3264 - DNA, 35 bp, Artificial Sequence
  Synthetic oligonucleotide
gtgagtacgcttaagggggttgtgtagtcttaaag

SEQ ID NO: 3265 - DNA, 36 bp, Artificial Sequence
  Synthetic oligonucleotide
tagaccattgatgagcaatctaacgtcgaacgacga

SEQ ID NO: 3266 - DNA, 36 bp, Artificial Sequence
  Synthetic oligonucleotide
tatgggggcataggtaagggagttaatttacataga

SEQ ID NO: 3267 - DNA, 37 bp, Artificial Sequence
  Synthetic oligonucleotide
tgagggcattcatgggcgattcattggtacggacgga

SEQ ID NO: 3268 - DNA, 36 bp, Artificial Sequence
  Synthetic oligonucleotide
tgcgtagttggtaggtagctgggacgagtcaccgaa

SEQ ID NO: 3269 - DNA, 35 bp, Artificial Sequence
  Synthetic oligonucleotide
tgcgttccgcaatccgtaactcattctggaggtaa

SEQ ID NO: 3270 - DNA, 35 bp, Artificial Sequence
  Synthetic oligonucleotide
ttggacaacggtacagcatagtcagtgggagtcta

SEQ ID NO: 3271 - DNA, 37 bp, Artificial Sequence
  Synthetic oligonucleotide
gagttcctcaactttagcttatggacatcacttttga

SEQ ID NO: 3272 - DNA, 38 bp, Artificial Sequence
  Synthetic oligonucleotide
agtgtgcattaatttgctaggaaacggatgtgatatga

SEQ ID NO: 3273 - DNA, 37 bp, Artificial Sequence
  Synthetic oligonucleotide
gacaccactcatgtgcgacacctgctgggtgtatcga

SEQ ID NO: 3274 - DNA, 37 bp, Artificial Sequence
  Synthetic oligonucleotide
gcgacaatcgtcttcggatgtcgcctgcatttactga

SEQ ID NO: 3275 - DNA, 35 bp, Artificial Sequence
  Synthetic oligonucleotide
gccgtgagtagtggtgatgatatgctagaacggta

SEQ ID NO: 3276 - DNA, 35 bp, Artificial Sequence
  Synthetic oligonucleotide
cgaccaattcggttgaacctgttggttgaagcacg

SEQ ID NO: 3277 - DNA, 36 bp, Artificial Sequence
  Synthetic oligonucleotide
gccctcaaggctggccaccaggctccattctttgta

SEQ ID NO: 3278 - DNA, 38 bp, Artificial Sequence
  Synthetic oligonucleotide
agacatatgaggactacacctccatcgtcgagaaatga

SEQ ID NO: 3279 - DNA, 38 bp, Artificial Sequence
  Synthetic oligonucleotide
atctttgcaatagcacggtcatgttaatcttaacatga

SEQ ID NO: 3280 - DNA, 35 bp, Artificial Sequence
  Synthetic oligonucleotide
catccgcaacgagagtaaaacgcatcaagtctagg

SEQ ID NO: 3281 - DNA, 38 bp, Artificial Sequence
  Synthetic oligonucleotide
ccattgcgcgttatattagaaacgtatggaggggctga

SEQ ID NO: 3282 - DNA, 35 bp, Artificial Sequence
  Synthetic oligonucleotide
gctgaaggtctacgggctctaaccatgccttcgta

SEQ ID NO: 3283 - DNA, 37 bp, Artificial Sequence
  Synthetic oligonucleotide
ggcccggctcatgtataattgagcgttcgagtgcgga

SEQ ID NO: 3284 - DNA, 36 bp, Artificial Sequence
  Synthetic oligonucleotide
gttggcgtgcccgccgttcagtttatatgacgggca

SEQ ID NO: 3285 - DNA, 35 bp, Artificial Sequence
  Synthetic oligonucleotide
tcatgtttcgtactgtgcgtctcgaattaaaatat

SEQ ID NO: 3286 - DNA, 35 bp, Artificial Sequence
  Synthetic oligonucleotide
ttcagtatgcgtcatgggtttgttgtgaaggactt

SEQ ID NO: 3287 - DNA, 37 bp, Artificial Sequence
  Synthetic oligonucleotide
tacgcaactgcccaaccagatgcgctaaggccgtaga

SEQ ID NO: 3288 - DNA, 36 bp, Artificial Sequence
  Synthetic oligonucleotide
tgaggtcctcggacctggtcatggaagtacagcata

SEQ ID NO: 3289 - DNA, 35 bp, Artificial Sequence
  Synthetic oligonucleotide
tgtctgcagttcagggattttgttgaatacgtgtg

SEQ ID NO: 3290 - DNA, 37 bp, Artificial Sequence
  Synthetic oligonucleotide
tgtgatctataccccgcgatcggaatacggccttaga

SEQ ID NO: 3291 - DNA, 36 bp, Artificial Sequence
  Synthetic oligonucleotide
gcatagtcctggatacgcggcccgacacctaaatta

SEQ ID NO: 3292 - DNA, 36 bp, Artificial Sequence
  Synthetic oligonucleotide
gtctgacggtcactgggagcactcatgacttcaaaa

SEQ ID NO: 3293 - DNA, 38 bp, Artificial Sequence
  Synthetic oligonucleotide
aaaactccatgacgtgcgagtatagcggtactccgtga

SEQ ID NO: 3294 - DNA, 37 bp, Artificial Sequence
  Synthetic oligonucleotide
acttggacctagctgctaaccgctaatgttcgaaaga

SEQ ID NO: 3295 - DNA, 38 bp, Artificial Sequence
  Synthetic oligonucleotide
agaaagctgtgcaactagaggtaacacttgctacatga

SEQ ID NO: 3296 - DNA, 35 bp, Artificial Sequence
  Synthetic oligonucleotide
cattacttttaccgtaatgagcgaccttctggatg

SEQ ID NO: 3297 - DNA, 37 bp, Artificial Sequence
  Synthetic oligonucleotide
ccgggaccttactgggctggtacgatgctacgtgtga

SEQ ID NO: 3298 - DNA, 35 bp, Artificial Sequence
  Synthetic oligonucleotide
gacatactacgccctctgcatataggcgtcctggt

SEQ ID NO: 3299 - DNA, 37 bp, Artificial Sequence
  Synthetic oligonucleotide
gtaacttggtccggggcgatctaggtgggtcgaagaa

SEQ ID NO: 3300 - DNA, 37 bp, Artificial Sequence
  Synthetic oligonucleotide
gtcagtagagtacgcaatagtaacctgaggaattaga

SEQ ID NO: 3301 - DNA, 38 bp, Artificial Sequence
  Synthetic oligonucleotide
taggccactgaaatagggtattactggatgacttctga

SEQ ID NO: 3302 - DNA, 38 bp, Artificial Sequence
  Synthetic oligonucleotide
tatgactaaatgcaaatgaccagtgggatgtaggatga

SEQ ID NO: 3303 - DNA, 37 bp, Artificial Sequence
  Synthetic oligonucleotide
aacgatcatcgcaaaccccggtggtcgcctacagcga

SEQ ID NO: 3304 - DNA, 36 bp, Artificial Sequence
  Synthetic oligonucleotide
gaaatggggctggtcgtgttcggtctagcagtataa

SEQ ID NO: 3305 - DNA, 37 bp, Artificial Sequence
  Synthetic oligonucleotide
gaaggtgctactcaagcgtgcccgttgtgaggttgga

SEQ ID NO: 3306 - DNA, 37 bp, Artificial Sequence
  Synthetic oligonucleotide
gtccgtagtaacgttagccgcaaggatattatgggga

SEQ ID NO: 3307 - DNA, 36 bp, Artificial Sequence
  Synthetic oligonucleotide
gttagggcgatgaggtccttgaagttaaagtcagta

SEQ ID NO: 3308 - DNA, 38 bp, Artificial Sequence
  Synthetic oligonucleotide
catgaccccggagatctttggatatggaggtgttgtga

SEQ ID NO: 3309 - DNA, 35 bp, Artificial Sequence
  Synthetic oligonucleotide
gcctgcacaaacgtattacggtcgtgtggggaggg

SEQ ID NO: 3310 - DNA, 36 bp, Artificial Sequence
  Synthetic oligonucleotide
accgagatatcactagtactgagacaagccattcaa

SEQ ID NO: 3311 - DNA, 36 bp, Artificial Sequence
  Synthetic oligonucleotide
aaagtcataaaattgaatgcgtccgtcaaagtcata

SEQ ID NO: 3312 - DNA, 35 bp, Artificial Sequence
  Synthetic oligonucleotide
aaccttactggagatcagccttccgtagccattgg

SEQ ID NO: 3313 - DNA, 36 bp, Artificial Sequence
  Synthetic oligonucleotide
aactacgacttagtgaggtaagtccgtgggatacga

SEQ ID NO: 3314 - DNA, 35 bp, Artificial Sequence
  Synthetic oligonucleotide
aactgtaagttccatacagtagttgccgatgccgg

SEQ ID NO: 3315 - DNA, 35 bp, Artificial Sequence
  Synthetic oligonucleotide
aagtagccggtggttgcgagttcgaaatgagttat

SEQ ID NO: 3316 - DNA, 36 bp, Artificial Sequence
  Synthetic oligonucleotide
actcccgagggcaaaggactggggtcggtagttaca

SEQ ID NO: 3317 - DNA, 37 bp, Artificial Sequence
  Synthetic oligonucleotide
agatagttaactatcagtacgatgagtagatgcgcga

SEQ ID NO: 3318 - DNA, 37 bp, Artificial Sequence
  Synthetic oligonucleotide
agcatggaaaatgcaattgcggtgatgcgccgtagga

SEQ ID NO: 3319 - DNA, 37 bp, Artificial Sequence
  Synthetic oligonucleotide
atggccaaggatctagaagtctcgccctcctctgcga

SEQ ID NO: 3320 - DNA, 38 bp, Artificial Sequence
  Synthetic oligonucleotide
attcagcatgtacagaggctgcttagttatatacttga

SEQ ID NO: 3321 - DNA, 38 bp, Artificial Sequence
  Synthetic oligonucleotide
gaagtgagtcattctagtcaagctagctcacattttga

SEQ ID NO: 3322 - DNA, 35 bp, Artificial Sequence
  Synthetic oligonucleotide
gagaagcggccagggactgttcgctttgttggaaa

SEQ ID NO: 3323 - DNA, 37 bp, Artificial Sequence
  Synthetic oligonucleotide
gaggacagcaggtcccttgtagatagttgtttgtaga

SEQ ID NO: 3324 - DNA, 36 bp, Artificial Sequence
  Synthetic oligonucleotide
gatgtctgatgcgactaggcccccgtcttagatgca

SEQ ID NO: 3325 - DNA, 37 bp, Artificial Sequence
  Synthetic oligonucleotide
gcgatcgatatcgcgaagaagggtgaacgatgcacga

SEQ ID NO: 3326 - DNA, 38 bp, Artificial Sequence
  Synthetic oligonucleotide
gcttcggaggtagtatgggtcggttacttggcttatga

SEQ ID NO: 3327 - DNA, 35 bp, Artificial Sequence
  Synthetic oligonucleotide
gttctgggttcactaaatcaggttttgtggctaga

SEQ ID NO: 3328 - DNA, 37 bp, Artificial Sequence
  Synthetic oligonucleotide
taacagatacttccagagtgagacgattacgtgctga

SEQ ID NO: 3329 - DNA, 35 bp, Artificial Sequence
  Synthetic oligonucleotide
taattcggacttgcaactgcagaaaaattgactcc

SEQ ID NO: 3330 - DNA, 38 bp, Artificial Sequence
  Synthetic oligonucleotide
tagccttgcgtgccaggaatacaaatttggtctattga

SEQ ID NO: 3331 - DNA, 38 bp, Artificial Sequence
  Synthetic oligonucleotide
tatgctacagagaacgcatatgacacatcatgtagtga

SEQ ID NO: 3332 - DNA, 36 bp, Artificial Sequence
  Synthetic oligonucleotide
tattacgaatgtggtggcatctgggacctgagccga

SEQ ID NO: 3333 - DNA, 35 bp, Artificial Sequence
  Synthetic oligonucleotide
tcaaattgaggggtagttgtgcgtggttgaagggc

SEQ ID NO: 3334 - DNA, 35 bp, Artificial Sequence
  Synthetic oligonucleotide
tctgccttaggcaacgaaccgtgagtcacaggata

SEQ ID NO: 3335 - DNA, 37 bp, Artificial Sequence
  Synthetic oligonucleotide
atcgtgggttatactactgtgcatgtataaagtacga

SEQ ID NO: 3336 - DNA, 36 bp, Artificial Sequence
  Synthetic oligonucleotide
gtcatgtgaaaactttgcaccgggaagaccgtacaa

SEQ ID NO: 3337 - DNA, 36 bp, Artificial Sequence
  Synthetic oligonucleotide
gcctcatacactgagcggcacagggcccgctatgga

SEQ ID NO: 3338 - DNA, 37 bp, Artificial Sequence
  Synthetic oligonucleotide
aatctagcaaggtaagatctttagagttaaactagga

SEQ ID NO: 3339 - DNA, 36 bp, Artificial Sequence
  Synthetic oligonucleotide
acagcattcattgtatgtccgggagttacatgctga

SEQ ID NO: 3340 - DNA, 37 bp, Artificial Sequence
  Synthetic oligonucleotide
agcatttggggaagtgtatactctgttctggagggga

SEQ ID NO: 3341 - DNA, 36 bp, Artificial Sequence
  Synthetic oligonucleotide
atcgttctgggggtcaagctttttataagccatgga

SEQ ID NO: 3342 - DNA, 36 bp, Artificial Sequence
  Synthetic oligonucleotide
gtaaaatcaacgcgtatgatggtcgaaaaggcctca

SEQ ID NO: 3343 - DNA, 36 bp, Artificial Sequence
  Synthetic oligonucleotide
tctatggtaggaccgtggcgattagaacgatattga

SEQ ID NO: 3344 - DNA, 36 bp, Artificial Sequence
  Synthetic oligonucleotide
gtacggagaagcctgtgttatccgaaaaggcaagga

SEQ ID NO: 3345 - DNA, 37 bp, Artificial Sequence
  Synthetic oligonucleotide
tagtgcgtactgtgacatctggtgtcctgtccggcga

SEQ ID NO: 3346 - DNA, 36 bp, Artificial Sequence
  Synthetic oligonucleotide
gttgtccggcaaagcgtggcggtatcatatcacgga

SEQ ID NO: 3347 - DNA, 35 bp, Artificial Sequence
  Synthetic oligonucleotide
acgtgctgctttagtaaacgctgggttgaacgggt

SEQ ID NO: 3348 - DNA, 38 bp, Artificial Sequence
  Synthetic oligonucleotide
agagctccgcggtggtatttacggttaataggccgtga

SEQ ID NO: 3349 - DNA, 38 bp, Artificial Sequence
  Synthetic oligonucleotide
gatgctcatgcggtatgtgttgctcagcacccacatga

SEQ ID NO: 3350 - DNA, 35 bp, Artificial Sequence
  Synthetic oligonucleotide
gcggggggcatttaggctaccaagggcgatcggtg

SEQ ID NO: 3351 - DNA, 35 bp, Artificial Sequence
  Synthetic oligonucleotide
gctgtgttgcaaacctgtctagcactcggatcggt

SEQ ID NO: 3352 - DNA, 37 bp, Artificial Sequence
  Synthetic oligonucleotide
gtccgccccggtaccgtacttcttcgtgtcgatggga

SEQ ID NO: 3353 - DNA, 37 bp, Artificial Sequence
  Synthetic oligonucleotide
tgtacattcgtttatggtcaacatggggtgaatcgga

SEQ ID NO: 3354 - DNA, 35 bp, Artificial Sequence
  Synthetic oligonucleotide
agccatgacagatgatccgccgcgcctccccaaag

SEQ ID NO: 3355 - DNA, 37 bp, Artificial Sequence
  Synthetic oligonucleotide
agtgacgttcgatggtcaggctttattatgatttgga

SEQ ID NO: 3356 - DNA, 36 bp, Artificial Sequence
  Synthetic oligonucleotide
gaagcataacatagggaatcgttgggtcaatttgca

SEQ ID NO: 3357 - DNA, 36 bp, Artificial Sequence
  Synthetic oligonucleotide
gggccgtaacttgctgtctacactcgtagtgtagta

SEQ ID NO: 3358 - DNA, 37 bp, Artificial Sequence
  Synthetic oligonucleotide
ggggattaactttacagcaggcgccgaagccattgga

SEQ ID NO: 3359 - DNA, 38 bp, Artificial Sequence
  Synthetic oligonucleotide
taaagagtacaggccggatcatcccctatcgggtctga

SEQ ID NO: 3360 - DNA, 36 bp, Artificial Sequence
  Synthetic oligonucleotide
tcaagttcgttgattatagtacgtgctcgcttagga

SEQ ID NO: 3361 - DNA, 38 bp, Artificial Sequence
  Synthetic oligonucleotide
tgaccataatttgaattgccgccatcaagttggcttga

SEQ ID NO: 3362 - DNA, 38 bp, Artificial Sequence
  Synthetic oligonucleotide
tggtattgccataggtagtagctgagatagcattgtga

SEQ ID NO: 3363 - DNA, 37 bp, Artificial Sequence
  Synthetic oligonucleotide
gtgactagacgcggtgcgaccggtacgtactacagga

SEQ ID NO: 3364 - DNA, 37 bp, Artificial Sequence
  Synthetic oligonucleotide
taaacatcgtaccggtttcatgtatgtactggaaaga

SEQ ID NO: 3365 - DNA, 35 bp, Artificial Sequence
  Synthetic oligonucleotide
catactgtagtccggttcagggtgatacggtaacg

SEQ ID NO: 3366 - DNA, 37 bp, Artificial Sequence
  Synthetic oligonucleotide
ccagaaatactggacggtttactgaggtcaatgcaga

SEQ ID NO: 3367 - DNA, 38 bp, Artificial Sequence
  Synthetic oligonucleotide
gtcatttcttgtagctaacggagcggtcgggaccatga

SEQ ID NO: 3368 - DNA, 37 bp, Artificial Sequence
  Synthetic oligonucleotide
catggatcattacaggctatctcagcttggcgacaga

SEQ ID NO: 3369 - DNA, 36 bp, Artificial Sequence
  Synthetic oligonucleotide
gatgccacagtaagtaccccaagagttaggctcaga

SEQ ID NO: 3370 - DNA, 36 bp, Artificial Sequence
  Synthetic oligonucleotide
aatctccaagatcgtgcgttgccagggcgcaagtga

SEQ ID NO: 3371 - DNA, 37 bp, Artificial Sequence
  Synthetic oligonucleotide
aatgcgtactacttcaggccagagttggatactacga

SEQ ID NO: 3372 - DNA, 38 bp, Artificial Sequence
  Synthetic oligonucleotide
agtcacattctagaagatgtcgctttccacgggggtga

SEQ ID NO: 3373 - DNA, 35 bp, Artificial Sequence
  Synthetic oligonucleotide
ccttgggtagctcaaaagatactacgacggtcatg

SEQ ID NO: 3374 - DNA, 37 bp, Artificial Sequence
  Synthetic oligonucleotide
cggagtactgatcactggctaagacaacaaacggtga

SEQ ID NO: 3375 - DNA, 35 bp, Artificial Sequence
  Synthetic oligonucleotide
ctagtatagctgacattataatgttccacgcgggg

SEQ ID NO: 3376 - DNA, 38 bp, Artificial Sequence
  Synthetic oligonucleotide
gaaacaactgggggtgttagcaatttaggacgatctga

SEQ ID NO: 3377 - DNA, 38 bp, Artificial Sequence
  Synthetic oligonucleotide
gagtgacctcctgcagttctgccattgctggcgggtga

SEQ ID NO: 3378 - DNA, 38 bp, Artificial Sequence
  Synthetic oligonucleotide
tgcgaacctgcgacttttcgtaagtgatggtacactga

SEQ ID NO: 3379 - DNA, 38 bp, Artificial Sequence
  Synthetic oligonucleotide
aacccgtacagcacaggggtgcccagcgtggccattga

SEQ ID NO: 3380 - DNA, 36 bp, Artificial Sequence
  Synthetic oligonucleotide
gttctgtggtgggctaggaacgtcacacaatcttta

SEQ ID NO: 3381 - DNA, 36 bp, Artificial Sequence
  Synthetic oligonucleotide
gactatggaggggtagtcgtcgtactgtgattacac

SEQ ID NO: 3382 - DNA, 36 bp, Artificial Sequence
  Synthetic oligonucleotide
gagaaactagcgcttaataaagaataacgacgtgta

SEQ ID NO: 3383 - DNA, 35 bp, Artificial Sequence
  Synthetic oligonucleotide
gatagcggttaggtgtcagtcatagaaattgctaa

SEQ ID NO: 3384 - DNA, 35 bp, Artificial Sequence
  Synthetic oligonucleotide
tcacgctagagtctggtggtctcttatttttggta

SEQ ID NO: 3385 - DNA, 36 bp, Artificial Sequence
  Synthetic oligonucleotide
tccagtactgcgaatgatttatttcgagcgccttga

SEQ ID NO: 3386 - DNA, 32 bp, Artificial Sequence
  Synthetic oligonucleotide
tctcagtaacgctgtaagggagttacgcttga

SEQ ID NO: 3387 - DNA, 35 bp, Artificial Sequence
  Synthetic oligonucleotide
atatgggatactgcatggggaatgatatacgggct

SEQ ID NO: 3388 - DNA, 36 bp, Artificial Sequence
  Synthetic oligonucleotide
gtagattgcgattactgctaggatcaacttgttgga

SEQ ID NO: 3389 - DNA, 35 bp, Artificial Sequence
  Synthetic oligonucleotide
taggttcgttatgtgaagttgcaatccgtcaacac

SEQ ID NO: 3390 - DNA, 37 bp, Artificial Sequence
  Synthetic oligonucleotide
aatgcactgggttttttgggcggtcgtttttgtttga

SEQ ID NO: 3391 - DNA, 37 bp, Artificial Sequence
  Synthetic oligonucleotide
acaattaggctcagagcacgcactataaggggtttga

SEQ ID NO: 3392 - DNA, 37 bp, Artificial Sequence
  Synthetic oligonucleotide
agaggtacttcctaggtaatgcaacggcccgagctga

SEQ ID NO: 3393 - DNA, 36 bp, Artificial Sequence
  Synthetic oligonucleotide
atcaacaaggtactagatacttcgtgaggtagatca

SEQ ID NO: 3394 - DNA, 35 bp, Artificial Sequence
  Synthetic oligonucleotide
atcatttaccatgcctgcgaggccggtaccctatc

SEQ ID NO: 3395 - DNA, 38 bp, Artificial Sequence
  Synthetic oligonucleotide
ctcagcgttttgctgaaaggatattgcctgtgagttga

SEQ ID NO: 3396 - DNA, 35 bp, Artificial Sequence
  Synthetic oligonucleotide
gaatgtctccggggctgattggggtccggggtcac

SEQ ID NO: 3397 - DNA, 36 bp, Artificial Sequence
  Synthetic oligonucleotide
gcccttggtgattgcactagggccctttggaataga

SEQ ID NO: 3398 - DNA, 38 bp, Artificial Sequence
  Synthetic oligonucleotide
ggacggtctaatgccgacggactgctataatcttatga

SEQ ID NO: 3399 - DNA, 35 bp, Artificial Sequence
  Synthetic oligonucleotide
ggatgacttgtgggggttcaaaccatcacgactca

SEQ ID NO: 3400 - DNA, 37 bp, Artificial Sequence
  Synthetic oligonucleotide
gtgggacccaatgcatggtcacgttaacggtacgtga

SEQ ID NO: 3401 - DNA, 36 bp, Artificial Sequence
  Synthetic oligonucleotide
tgacgaggcacagcattatgtagcttctctcaacga

SEQ ID NO: 3402 - DNA, 38 bp, Artificial Sequence
  Synthetic oligonucleotide
tggtaagcaaagacggaacctgtgactagttgatatga

SEQ ID NO: 3403 - DNA, 38 bp, Artificial Sequence
  Synthetic oligonucleotide
ttagcccaatagaggagccaagcggtgcacgttcatga

SEQ ID NO: 3404 - DNA, 37 bp, Artificial Sequence
  Synthetic oligonucleotide
ctcggctctgcaccgatgaagccgaggacccgggaga

SEQ ID NO: 3405 - DNA, 35 bp, Artificial Sequence
  Synthetic oligonucleotide
tcatgttcgtcctgcgttcatgacaatttcacgtt

SEQ ID NO: 3406 - DNA, 35 bp, Artificial Sequence
  Synthetic oligonucleotide
tttggtctggagtgggtctggtgtaccacgccagg

SEQ ID NO: 3407 - DNA, 38 bp, Artificial Sequence
  Synthetic oligonucleotide
aatgtcgatacgaggacgtccctgggaccgtactgtga

SEQ ID NO: 3408 - DNA, 35 bp, Artificial Sequence
  Synthetic oligonucleotide
agctgggccaatcgcatctttccggtcccgaagtc

SEQ ID NO: 3409 - DNA, 35 bp, Artificial Sequence
  Synthetic oligonucleotide
gcggtcaagaacttcctatacgggagaccatttag

SEQ ID NO: 3410 - DNA, 38 bp, Artificial Sequence
  Synthetic oligonucleotide
gcgtagcggggtgggtggctacgctcgtttgtgagtga

SEQ ID NO: 3411 - DNA, 38 bp, Artificial Sequence
  Synthetic oligonucleotide
ggagattgaggtaaaccagtgcgaatgcacctatgtga

SEQ ID NO: 3412 - DNA, 35 bp, Artificial Sequence
  Synthetic oligonucleotide
gtgcaacaaatcgcttgtaagatagaaaaaggaag

SEQ ID NO: 3413 - DNA, 36 bp, Artificial Sequence
  Synthetic oligonucleotide
tacacacctgcaggcacggagaaaaagcgcacctta

SEQ ID NO: 3414 - DNA, 38 bp, Artificial Sequence
  Synthetic oligonucleotide
taccggagtagctgtagatcatgcatgggtagaaatga

SEQ ID NO: 3415 - DNA, 38 bp, Artificial Sequence
  Synthetic oligonucleotide
ttccggaagtgaaagcaggcatgtgatggatactttga

SEQ ID NO: 3416 - DNA, 35 bp, Artificial Sequence
  Synthetic oligonucleotide
aacgtacagaggacgggtgggccatttaattaata

SEQ ID NO: 3417 - DNA, 38 bp, Artificial Sequence
  Synthetic oligonucleotide
accgcccgttaccatgggtagcacccacgttagattga

SEQ ID NO: 3418 - DNA, 37 bp, Artificial Sequence
  Synthetic oligonucleotide
agcggttagagtgccttcggaacttcggtcacaaaga

SEQ ID NO: 3419 - DNA, 36 bp, Artificial Sequence
  Synthetic oligonucleotide
ccacgtatgactaggaatcacctaaacgtagagtta

SEQ ID NO: 3420 - DNA, 35 bp, Artificial Sequence
  Synthetic oligonucleotide
ctcataatttgttgagccgtctggttctggcataa

SEQ ID NO: 3421 - DNA, 36 bp, Artificial Sequence
  Synthetic oligonucleotide
gatagacgtaacggggtttaggctacttatttagca

SEQ ID NO: 3422 - DNA, 34 bp, Artificial Sequence
  Synthetic oligonucleotide
ggctttagccatggtcggtatagtagctgggtac

SEQ ID NO: 3423 - DNA, 37 bp, Artificial Sequence
  Synthetic oligonucleotide
gtcgtgattgctgatcaagctcggaacgtgcggggga

SEQ ID NO: 3424 - DNA, 35 bp, Artificial Sequence
  Synthetic oligonucleotide
tagggttggatacagaagatggccttctcgagtta

SEQ ID NO: 3425 - DNA, 38 bp, Artificial Sequence
  Synthetic oligonucleotide
ttaggctttcgcgaagacgtaccccgggtcaagaatga

SEQ ID NO: 3426 - DNA, 36 bp, Artificial Sequence
  Synthetic oligonucleotide
ttcacagccgcgaatatactgatagcggatagttta

SEQ ID NO: 3427 - DNA, 35 bp, Artificial Sequence
  Synthetic oligonucleotide
accctcatcagtctagtttccgctcctcacgacca

SEQ ID NO: 3428 - DNA, 37 bp, Artificial Sequence
  Synthetic oligonucleotide
actctgagatgcgcttgggcataaacactgacacgga

SEQ ID NO: 3429 - DNA, 36 bp, Artificial Sequence
  Synthetic oligonucleotide
agccgagtccgactataatggtaactgcacgttaga

SEQ ID NO: 3430 - DNA, 38 bp, Artificial Sequence
  Synthetic oligonucleotide
taaaccgcatattggggttctaggcgaaacacaggtga

SEQ ID NO: 3431 - DNA, 35 bp, Artificial Sequence
  Synthetic oligonucleotide
atggccgctaccagcacggcgggtgaggccaacat

SEQ ID NO: 3432 - DNA, 37 bp, Artificial Sequence
  Synthetic oligonucleotide
acgcaagtggcggtgcacgtcctgcatcttgtattga

SEQ ID NO: 3433 - DNA, 38 bp, Artificial Sequence
  Synthetic oligonucleotide
atcagaacgctgtacgcgtacgggctagagacggctga

SEQ ID NO: 3434 - DNA, 37 bp, Artificial Sequence
  Synthetic oligonucleotide
ggaccacactgggctaatgtcgtgtaagcatactgga

SEQ ID NO: 3435 - DNA, 36 bp, Artificial Sequence
  Synthetic oligonucleotide
gggatctgtggatctttcaggagtccccgacatgca

SEQ ID NO: 3436 - DNA, 37 bp, Artificial Sequence
  Synthetic oligonucleotide
gggtggggaattcgtgagactgcattaatctcggcga

SEQ ID NO: 3437 - DNA, 38 bp, Artificial Sequence
  Synthetic oligonucleotide
tataaggggcgcttggtgctactctcccccgtgtgcga

SEQ ID NO: 3438 - DNA, 37 bp, Artificial Sequence
  Synthetic oligonucleotide
ttccgaatggcattgacatgggactcatagtgcgaga

SEQ ID NO: 3439 - DNA, 38 bp, Artificial Sequence
  Synthetic oligonucleotide
ttgcgaccgcgtactgaaagtccttgttgttccagtga

SEQ ID NO: 3440 - DNA, 38 bp, Artificial Sequence
  Synthetic oligonucleotide
acactttgactggaagttcctaccgcaggcccaattga

SEQ ID NO: 3441 - DNA, 36 bp, Artificial Sequence
  Synthetic oligonucleotide
tacttactgcgaggaaaagtagctggcctattaata

SEQ ID NO: 3442 - DNA, 35 bp, Artificial Sequence
  Synthetic oligonucleotide
acaatccaggggggatctactcctacaaacggctc

SEQ ID NO: 3443 - DNA, 38 bp, Artificial Sequence
  Synthetic oligonucleotide
agtgagtgacagggtctctcagatgttttgctaggtga

SEQ ID NO: 3444 - DNA, 38 bp, Artificial Sequence
  Synthetic oligonucleotide
atccagaggtctggcattgggcgttcaccgggtgttga

SEQ ID NO: 3445 - DNA, 35 bp, Artificial Sequence
  Synthetic oligonucleotide
ctccgtccgaatgctcgggtatgctatagaaaata

SEQ ID NO: 3446 - DNA, 35 bp, Artificial Sequence
  Synthetic oligonucleotide
gatcacgcgcagttatgagtattctagtatgtggc

SEQ ID NO: 3447 - DNA, 36 bp, Artificial Sequence
  Synthetic oligonucleotide
gccgagacggttttaactgtgcagttcgcgcctgga

SEQ ID NO: 3448 - DNA, 37 bp, Artificial Sequence
  Synthetic oligonucleotide
gtacggggagcttgcctcctttataattgacgttcga

SEQ ID NO: 3449 - DNA, 35 bp, Artificial Sequence
  Synthetic oligonucleotide
gtgcgtgagtcagtcattcagtacgaacgcctccc

SEQ ID NO: 3450 - DNA, 36 bp, Artificial Sequence
  Synthetic oligonucleotide
gttctatgacaaggtttcgggtacaaggtccatgga

SEQ ID NO: 3451 - DNA, 38 bp, Artificial Sequence
  Synthetic oligonucleotide
tccagattgcagtctggccgtgtttcttattaggttga

SEQ ID NO: 3452 - DNA, 38 bp, Artificial Sequence
  Synthetic oligonucleotide
ccaatgacgtacatgtgtggatggcttgccccgcttga

SEQ ID NO: 3453 - DNA, 38 bp, Artificial Sequence
  Synthetic oligonucleotide
gacattatggttaggcgaccgcttgtctcgggcaatga

SEQ ID NO: 3454 - DNA, 35 bp, Artificial Sequence
  Synthetic oligonucleotide
ttcatgtggagctgaggctgttagtatagccatag

SEQ ID NO: 3455 - DNA, 35 bp, Artificial Sequence
  Synthetic oligonucleotide
tgtacattaagaatgacgcctcatgcgggtcatgt

SEQ ID NO: 3456 - DNA, 35 bp, Artificial Sequence
  Synthetic oligonucleotide
caccccccgcgcatcactctattgtctcaagccag

SEQ ID NO: 3457 - DNA, 37 bp, Artificial Sequence
  Synthetic oligonucleotide
gagcgcaaggtgtgctaagcagatatccacgggacga

SEQ ID NO: 3458 - DNA, 37 bp, Artificial Sequence
  Synthetic oligonucleotide
gatacaggatgacgtatgtgtcgagatccgagccaga

SEQ ID NO: 3459 - DNA, 37 bp, Artificial Sequence
  Synthetic oligonucleotide
gatgacagggggtcttacacagttggccttggagcga

SEQ ID NO: 3460 - DNA, 37 bp, Artificial Sequence
  Synthetic oligonucleotide
gcttggcactcacgatctgtgatggaattgtgtacga

SEQ ID NO: 3461 - DNA, 35 bp, Artificial Sequence
  Synthetic oligonucleotide
gagataccgggaactccgtggacggcatcgatcgt

SEQ ID NO: 3462 - DNA, 37 bp, Artificial Sequence
  Synthetic oligonucleotide
taacgcttctgcagtggatggtagaagtttatacaga

SEQ ID NO: 3463 - DNA, 38 bp, Artificial Sequence
  Synthetic oligonucleotide
tgaataacgggtacgggggtggctccttccttcgatga

SEQ ID NO: 3464 - DNA, 35 bp, Artificial Sequence
  Synthetic oligonucleotide
tgcattgtcaccgacgttggcggtttgttggaccg

SEQ ID NO: 3465 - DNA, 35 bp, Artificial Sequence
  Synthetic oligonucleotide
aaccgggactgtttttccttgattcgtttgccact

SEQ ID NO: 3466 - DNA, 35 bp, Artificial Sequence
  Synthetic oligonucleotide
agaagaaccgcagcaccaatcggatacgatttgtg

SEQ ID NO: 3467 - DNA, 37 bp, Artificial Sequence
  Synthetic oligonucleotide
ataaagacaggcattaccatcacgcgtccaagtacga

SEQ ID NO: 3468 - DNA, 35 bp, Artificial Sequence
  Synthetic oligonucleotide
gaaatgtcatagtgcagattgtctttatatggtgc

SEQ ID NO: 3469 - DNA, 38 bp, Artificial Sequence
  Synthetic oligonucleotide
gaccgcgattcgcgtcacaaatggacgaaggtacgtga

SEQ ID NO: 3470 - DNA, 38 bp, Artificial Sequence
  Synthetic oligonucleotide
gattcgaccgatctagcgatcattatgggccatcgtga

SEQ ID NO: 3471 - DNA, 35 bp, Artificial Sequence
  Synthetic oligonucleotide
gcgttattgatatgagagggtctgtttaggtaggc

SEQ ID NO: 3472 - DNA, 37 bp, Artificial Sequence
  Synthetic oligonucleotide
gtaccctgtggtgcaaaaaggcattagcggacacgga

SEQ ID NO: 3473 - DNA, 38 bp, Artificial Sequence
  Synthetic oligonucleotide
taccatgctgcatttgactctaccgtcgtggagaatga

SEQ ID NO: 3474 - DNA, 38 bp, Artificial Sequence
  Synthetic oligonucleotide
tacggggtacccacgcaaccacaagttagggctagtga

SEQ ID NO: 3475 - DNA, 37 bp, Artificial Sequence
  Synthetic oligonucleotide
tccgattcagtgcacttatgacagtcatgggtgccga

SEQ ID NO: 3476 - DNA, 37 bp, Artificial Sequence
  Synthetic oligonucleotide
tctaagagccgcagaagagtattagataccggacaga

SEQ ID NO: 3477 - DNA, 35 bp, Artificial Sequence
  Synthetic oligonucleotide
ttagtaacaaaatgcaggaaggtgctggtcaatct

SEQ ID NO: 3478 - DNA, 38 bp, Artificial Sequence
  Synthetic oligonucleotide
ccagggcatccctgaagtgacccactgggaggtggtga

SEQ ID NO: 3479 - DNA, 37 bp, Artificial Sequence
  Synthetic oligonucleotide
gttgtacgcgtacggcgtgcaaggcggaaaactgtga

SEQ ID NO: 3480 - DNA, 36 bp, Artificial Sequence
  Synthetic oligonucleotide
ttgcaccgatatggtacgatatggtggttggacgca

SEQ ID NO: 3481 - DNA, 37 bp, Artificial Sequence
  Synthetic oligonucleotide
aacgatgcattcactattgtatgcatcattgggacga

SEQ ID NO: 3482 - DNA, 36 bp, Artificial Sequence
  Synthetic oligonucleotide
aatacggagggccgtgactaatttaatggtcgacca

SEQ ID NO: 3483 - DNA, 36 bp, Artificial Sequence
  Synthetic oligonucleotide
gtacgatgcaccaatggttcgcctgaacctgtacca

SEQ ID NO: 3484 - DNA, 35 bp, Artificial Sequence
  Synthetic oligonucleotide
taaagtagagagataccagttgggtgagtattttt

SEQ ID NO: 3485 - DNA, 35 bp, Artificial Sequence
  Synthetic oligonucleotide
tgtgggccggggaatatgtgtccgccccggtacta

SEQ ID NO: 3486 - DNA, 35 bp, Artificial Sequence
  Synthetic oligonucleotide
tgggttacagtaagatggcacaagctcccccgttt

SEQ ID NO: 3487 - DNA, 37 bp, Artificial Sequence
  Synthetic oligonucleotide
gcaggctaacaatgctctgcgacacgttcacagccga

SEQ ID NO: 3488 - DNA, 37 bp, Artificial Sequence
  Synthetic oligonucleotide
tgtggacacatcttgcatgattgcatgctgaacttga

SEQ ID NO: 3489 - DNA, 38 bp, Artificial Sequence
  Synthetic oligonucleotide
aacgttaaggtaccgtacgaaaagatcatgaatcttga

SEQ ID NO: 3490 - DNA, 38 bp, Artificial Sequence
  Synthetic oligonucleotide
agttaacactccgagcgggttgtaagtagtaaggctga

SEQ ID NO: 3491 - DNA, 35 bp, Artificial Sequence
  Synthetic oligonucleotide
atgaaagcccgtagagctgtcctagacaatcggta

SEQ ID NO: 3492 - DNA, 36 bp, Artificial Sequence
  Synthetic oligonucleotide
atggggtgcatctgagttctgcaggttgctgggaaa

SEQ ID NO: 3493 - DNA, 35 bp, Artificial Sequence
  Synthetic oligonucleotide
ctagtctcaaatagggggttagggagtaccagcta

SEQ ID NO: 3494 - DNA, 38 bp, Artificial Sequence
  Synthetic oligonucleotide
gatcgggcatgactgaccgcctatgttatggttcatga

SEQ ID NO: 3495 - DNA, 37 bp, Artificial Sequence
  Synthetic oligonucleotide
gcgcgcaaggtcgatcacgcaaaggtcgagaccgaga

SEQ ID NO: 3496 - DNA, 36 bp, Artificial Sequence
  Synthetic oligonucleotide
ggtacaggtcttaacgggatgactacgcactggcgc

SEQ ID NO: 3497 - DNA, 35 bp, Artificial Sequence
  Synthetic oligonucleotide
gtaaggccagccacggataggcggattagcgggat

SEQ ID NO: 3498 - DNA, 36 bp, Artificial Sequence
  Synthetic oligonucleotide
tccgtgcgtgattgagtggtgggaccatgtggcaaa

SEQ ID NO: 3499 - DNA, 38 bp, Artificial Sequence
  Synthetic oligonucleotide
tcctagtctgactcgcaagagattgacgatacgtatga

SEQ ID NO: 3500 - DNA, 35 bp, Artificial Sequence
  Synthetic oligonucleotide
tccttactgcggtattattaataagaagttgtaga

SEQ ID NO: 3501 - DNA, 35 bp, Artificial Sequence
  Synthetic oligonucleotide
tggcctagacgtacttctcgaggctaattatactg

SEQ ID NO: 3502 - DNA, 35 bp, Artificial Sequence
  Synthetic oligonucleotide
ttatggccgtgctacatgcataaggaagccaatga

SEQ ID NO: 3503 - DNA, 35 bp, Artificial Sequence
  Synthetic oligonucleotide
gtggactcagtcagttggtgatgctgctgtgtttg

SEQ ID NO: 3504 - DNA, 37 bp, Artificial Sequence
  Synthetic oligonucleotide
agctgatcacgtaagtatggtggggtcctgcaataga

SEQ ID NO: 3505 - DNA, 35 bp, Artificial Sequence
  Synthetic oligonucleotide
agtgtagggtaaagatatagaattacgcgagaaga

SEQ ID NO: 3506 - DNA, 37 bp, Artificial Sequence
  Synthetic oligonucleotide
ggagtcgccgtaagcattacctgcaaatatagtcaga

SEQ ID NO: 3507 - DNA, 38 bp, Artificial Sequence
  Synthetic oligonucleotide
ggtgcctcgaataacgcgttgtactagcaacactatga

SEQ ID NO: 3508 - DNA, 35 bp, Artificial Sequence
  Synthetic oligonucleotide
gtgaatgccataacgactatgttaactcgaactag

SEQ ID NO: 3509 - DNA, 38 bp, Artificial Sequence
  Synthetic oligonucleotide
tgattccacagaatgggtgtcatgaagggttaaattga

SEQ ID NO: 3510 - DNA, 37 bp, Artificial Sequence
  Synthetic oligonucleotide
tgtccctggggcggtagtgacgcggagaggtaccgga

SEQ ID NO: 3511 - DNA, 36 bp, Artificial Sequence
  Synthetic oligonucleotide
ggaaatagctgtgtggcattgcttttactgggtaaa

SEQ ID NO: 3512 - DNA, 38 bp, Artificial Sequence
  Synthetic oligonucleotide
gttcatactggattcgttcgggatctcaccaaccgtga

SEQ ID NO: 3513 - DNA, 35 bp, Artificial Sequence
  Synthetic oligonucleotide
atgatccagcgggcgctttggatggatatacggtt

SEQ ID NO: 3514 - DNA, 35 bp, Artificial Sequence
  Synthetic oligonucleotide
gaaatttcagctaccttgcacataaagaatttggg

SEQ ID NO: 3515 - DNA, 38 bp, Artificial Sequence
  Synthetic oligonucleotide
atgtcacgtacagtgattcataaaggttaggcggttga

SEQ ID NO: 3516 - DNA, 35 bp, Artificial Sequence
  Synthetic oligonucleotide
gttctagattctagaaactccctacgtcatgtgga

SEQ ID NO: 3517 - DNA, 35 bp, Artificial Sequence
  Synthetic oligonucleotide
tcacggggacgtgctgtgcgatgtccgaactccac

SEQ ID NO: 3518 - DNA, 35 bp, Artificial Sequence
  Synthetic oligonucleotide
gatcgttattaccgtggaacgcaatgacactgcgt

SEQ ID NO: 3519 - DNA, 37 bp, Artificial Sequence
  Synthetic oligonucleotide
actggtcatgtgccagacacgattagttacaccgcga

SEQ ID NO: 3520 - DNA, 35 bp, Artificial Sequence
  Synthetic oligonucleotide
agagagaaaagctgtccgcactgtactgactgaaa

SEQ ID NO: 3521 - DNA, 37 bp, Artificial Sequence
  Synthetic oligonucleotide
agttctgcagggattggcaacgactggtaatacgcga

SEQ ID NO: 3522 - DNA, 37 bp, Artificial Sequence
  Synthetic oligonucleotide
atatcgtctgcatgcatcatctccaagcaagtaggga

SEQ ID NO: 3523 - DNA, 37 bp, Artificial Sequence
  Synthetic oligonucleotide
cataagcggttatctacgtgcccatatcggttcgcga

SEQ ID NO: 3524 - DNA, 35 bp, Artificial Sequence
  Synthetic oligonucleotide
ctccgctgattgaaatggtggatgttgttacgtca

SEQ ID NO: 3525 - DNA, 35 bp, Artificial Sequence
  Synthetic oligonucleotide
taatgaccactggatctaataatctggggttcttt

SEQ ID NO: 3526 - DNA, 35 bp, Artificial Sequence
  Synthetic oligonucleotide
tacattgggtctcgaggactgaacgtgttatcggc

SEQ ID NO: 3527 - DNA, 35 bp, Artificial Sequence
  Synthetic oligonucleotide
aacctggcctggtcggaaacaagggacaggcaatc

SEQ ID NO: 3528 - DNA, 38 bp, Artificial Sequence
  Synthetic oligonucleotide
agctccactacctgggtttaggtaatacgaactgatga

SEQ ID NO: 3529 - DNA, 36 bp, Artificial Sequence
  Synthetic oligonucleotide
agctgcaatgtgggtgtccgtgctatctgacggcga

SEQ ID NO: 3530 - DNA, 35 bp, Artificial Sequence
  Synthetic oligonucleotide
tgtacggtaaactttgcaggaattacaaatcaagg

SEQ ID NO: 3531 - DNA, 36 bp, Artificial Sequence
  Synthetic oligonucleotide
aatgagggcctgttacgaaacgagtactgtgtcgga

SEQ ID NO: 3532 - DNA, 35 bp, Artificial Sequence
  Synthetic oligonucleotide
agacttgatgcgcacgcagccattggtaggattaa

SEQ ID NO: 3533 - DNA, 37 bp, Artificial Sequence
  Synthetic oligonucleotide
cctggtctaacggccaaactgctgtacacgtgttaga

SEQ ID NO: 3534 - DNA, 38 bp, Artificial Sequence
  Synthetic oligonucleotide
cgctgactagcagatcctggaatgggcactttggttga

SEQ ID NO: 3535 - DNA, 37 bp, Artificial Sequence
  Synthetic oligonucleotide
ctcactatggggtcgctggcataaaatggtggctaga

SEQ ID NO: 3536 - DNA, 35 bp, Artificial Sequence
  Synthetic oligonucleotide
ctggaacgtgagctcggagagttgggccagccatc

SEQ ID NO: 3537 - DNA, 38 bp, Artificial Sequence
  Synthetic oligonucleotide
ggatgtgatcgggtgaaagagttgtacgcgttcattga

SEQ ID NO: 3538 - DNA, 35 bp, Artificial Sequence
  Synthetic oligonucleotide
gttgaaccatgatctgcgttaaggtaatttgtctg

SEQ ID NO: 3539 - DNA, 37 bp, Artificial Sequence
  Synthetic oligonucleotide
ttaccctccttttgtatggacctttgaagatgtagga

SEQ ID NO: 3540 - DNA, 36 bp, Artificial Sequence
  Synthetic oligonucleotide
aacacatgttacgtccatcgggggcttcataagtca

SEQ ID NO: 3541 - DNA, 37 bp, Artificial Sequence
  Synthetic oligonucleotide
accggtactagaagttgggtcgtgggggaggacttga

SEQ ID NO: 3542 - DNA, 35 bp, Artificial Sequence
  Synthetic oligonucleotide
catgaaagtcaaatttcgttgcaatagggaacgtt

SEQ ID NO: 3543 - DNA, 35 bp, Artificial Sequence
  Synthetic oligonucleotide
gagtcaattcaagatagagattggaattcagcgta

SEQ ID NO: 3544 - DNA, 35 bp, Artificial Sequence
  Synthetic oligonucleotide
gggagctgtgataccgagcacgtcgacttcaaatc

SEQ ID NO: 3545 - DNA, 35 bp, Artificial Sequence
  Synthetic oligonucleotide
gtcatggagtgagcggttacgtgggggacccaaag

SEQ ID NO: 3546 - DNA, 37 bp, Artificial Sequence
  Synthetic oligonucleotide
ttagtgcctcgcaagtcatgtaatagacggtatggga

SEQ ID NO: 3547 - DNA, 38 bp, Artificial Sequence
  Synthetic oligonucleotide
cctatggattgtagtccggggacgctgggacgtgctga

SEQ ID NO: 3548 - DNA, 37 bp, Artificial Sequence
  Synthetic oligonucleotide
tagtcgtgactatgtgggggatatgcggcctggcgga

SEQ ID NO: 3549 - DNA, 35 bp, Artificial Sequence
  Synthetic oligonucleotide
gtacctgagagcgtgtctggaaattctccacgtgc

SEQ ID NO: 3550 - DNA, 38 bp, Artificial Sequence
  Synthetic oligonucleotide
tcggcctgccacgtcatgttgtcctccccccgccttga

SEQ ID NO: 3551 - DNA, 35 bp, Artificial Sequence
  Synthetic oligonucleotide
aaatccgaggcgaaggacctcgtatttattctgca

SEQ ID NO: 3552 - DNA, 36 bp, Artificial Sequence
  Synthetic oligonucleotide
aagtacctgcccgggacgaggtatcgaccatggaaa

SEQ ID NO: 3553 - DNA, 35 bp, Artificial Sequence
  Synthetic oligonucleotide
agaacggtggtagagctcaataagagtcacatcat

SEQ ID NO: 3554 - DNA, 37 bp, Artificial Sequence
  Synthetic oligonucleotide
agccgccgaagcatggtcatgatgggtaaggctgtga

SEQ ID NO: 3555 - DNA, 37 bp, Artificial Sequence
  Synthetic oligonucleotide
agtcatacgtagattcccatctcgttgattaggctga

SEQ ID NO: 3556 - DNA, 37 bp, Artificial Sequence
  Synthetic oligonucleotide
atagcactgcgagtccgggaacgtagatagtcttaga

SEQ ID NO: 3557 - DNA, 38 bp, Artificial Sequence
  Synthetic oligonucleotide
ctggggatcgaccccggtaactcacagggctgtcctga

SEQ ID NO: 3558 - DNA, 35 bp, Artificial Sequence
  Synthetic oligonucleotide
gaactgaaagtgcaaaaagtttaaagtcatgagct

SEQ ID NO: 3559 - DNA, 36 bp, Artificial Sequence
  Synthetic oligonucleotide
gccgtagcgcagaacggtgccaaatgatggtagata

SEQ ID NO: 3560 - DNA, 36 bp, Artificial Sequence
  Synthetic oligonucleotide
ggtggctgcacagtggtagacccttatttttctgga

SEQ ID NO: 3561 - DNA, 35 bp, Artificial Sequence
  Synthetic oligonucleotide
gtcaacccatgtacagatatcctatgcttggtgtc

SEQ ID NO: 3562 - DNA, 37 bp, Artificial Sequence
  Synthetic oligonucleotide
tctgattagttgttgccgagggcgttggttaatccga

SEQ ID NO: 3563 - DNA, 35 bp, Artificial Sequence
  Synthetic oligonucleotide
tgtcgtacaggttcggcgattcgacctgtcgattg

SEQ ID NO: 3564 - DNA, 36 bp, Artificial Sequence
  Synthetic oligonucleotide
tgttgactgagtcccgcgtccagatggttacatata

SEQ ID NO: 3565 - DNA, 37 bp, Artificial Sequence
  Synthetic oligonucleotide
ttggggtcaagtcatgtgacgtgcggtttgctgttga

SEQ ID NO: 3566 - DNA, 35 bp, Artificial Sequence
  Synthetic oligonucleotide
tttctaaagacagttgtttcggttctgccggtttg

SEQ ID NO: 3567 - DNA, 35 bp, Artificial Sequence
  Synthetic oligonucleotide
aaggacaagcagtcggaataatctgtggtcaggta

SEQ ID NO: 3568 - DNA, 36 bp, Artificial Sequence
  Synthetic oligonucleotide
acaacgccagaattgtacgataattagtggggcgga

SEQ ID NO: 3569 - DNA, 36 bp, Artificial Sequence
  Synthetic oligonucleotide
gcagtgataaagactgtagggtatcctgtcatcaga

SEQ ID NO: 3570 - DNA, 35 bp, Artificial Sequence
  Synthetic oligonucleotide
ggtgtctccgaggtttaagtccccacgggattccc

SEQ ID NO: 3571 - DNA, 37 bp, Artificial Sequence
  Synthetic oligonucleotide
gtcgtgcaagactcgttgaagaagagcgtaggcgaga

SEQ ID NO: 3572 - DNA, 35 bp, Artificial Sequence
  Synthetic oligonucleotide
taggcattgatgtacctaggtgggggttagaccct

SEQ ID NO: 3573 - DNA, 36 bp, Artificial Sequence
  Synthetic oligonucleotide
tgaataaatacgcggtgtgacgtgtgtattctttga

SEQ ID NO: 3574 - DNA, 37 bp, Artificial Sequence
  Synthetic oligonucleotide
tgtacgccacaagaccgccgggagacgtactgcagga

SEQ ID NO: 3575 - DNA, 36 bp, Artificial Sequence
  Synthetic oligonucleotide
tgttcttacgaggtcagggatgttcgaatcagcaca

SEQ ID NO: 3576 - DNA, 37 bp, Artificial Sequence
  Synthetic oligonucleotide
tatggtagaactcaaagaggtgttttagtttgggaga

SEQ ID NO: 3577 - DNA, 35 bp, Artificial Sequence
  Synthetic oligonucleotide
acaaccgttggtcatcaaaatgtgagttggtccac

SEQ ID NO: 3578 - DNA, 38 bp, Artificial Sequence
  Synthetic oligonucleotide
accggttgcaacagcagtacggggtcgaatagtcgtga

SEQ ID NO: 3579 - DNA, 35 bp, Artificial Sequence
  Synthetic oligonucleotide
gtagaggtagaacttgagcaatactcttcgagtaa

SEQ ID NO: 3580 - DNA, 37 bp, Artificial Sequence
  Synthetic oligonucleotide
tccgcttcgcattaagtcgtagaagaatcgggcgtga

SEQ ID NO: 3581 - DNA, 38 bp, Artificial Sequence
  Synthetic oligonucleotide
ataaaccgaaagcagcgtgagcgcttggtatagattga

SEQ ID NO: 3582 - DNA, 36 bp, Artificial Sequence
  Synthetic oligonucleotide
tcacgactgcaggcttgcgtcataatcaaccaccaa

SEQ ID NO: 3583 - DNA, 38 bp, Artificial Sequence
  Synthetic oligonucleotide
tgagaggtactgcaagggagttggggcttcaagagtga

SEQ ID NO: 3584 - DNA, 36 bp, Artificial Sequence
  Synthetic oligonucleotide
aatcgtgtgtctccgaggctgaattagttatacaaa

SEQ ID NO: 3585 - DNA, 38 bp, Artificial Sequence
  Synthetic oligonucleotide
acagtacgtgcttgtcccattcaggcaaaccggggtga

SEQ ID NO: 3586 - DNA, 36 bp, Artificial Sequence
  Synthetic oligonucleotide
acagtcatgaccattttcattttgtgagtacggcta

SEQ ID NO: 3587 - DNA, 36 bp, Artificial Sequence
  Synthetic oligonucleotide
accggacggggaggaggtttatagcggtttgttgta

SEQ ID NO: 3588 - DNA, 38 bp, Artificial Sequence
  Synthetic oligonucleotide
aggggcccttccgtcactatgcatattttgatggctga

SEQ ID NO: 3589 - DNA, 36 bp, Artificial Sequence
  Synthetic oligonucleotide
attgcagtttagatttggttgagcctcgatgcgcaa

SEQ ID NO: 3590 - DNA, 35 bp, Artificial Sequence
  Synthetic oligonucleotide
cacgcaaatagtactgtttcgggttagacgcgcat

SEQ ID NO: 3591 - DNA, 35 bp, Artificial Sequence
  Synthetic oligonucleotide
cgctaggttgtgcaaaacgaaaccgtagggaccga

SEQ ID NO: 3592 - DNA, 35 bp, Artificial Sequence
  Synthetic oligonucleotide
gccatactttgtcgaaggtcccgattatacgggtg

SEQ ID NO: 3593 - DNA, 37 bp, Artificial Sequence
  Synthetic oligonucleotide
gcctagattcccagcgattccatatcctagtcagaga

SEQ ID NO: 3594 - DNA, 37 bp, Artificial Sequence
  Synthetic oligonucleotide
ggatgcgtcgagcctacggccacttcgacggcccgga

SEQ ID NO: 3595 - DNA, 37 bp, Artificial Sequence
  Synthetic oligonucleotide
gggaggctgacgtggaagtgaatcaaaatctatctga

SEQ ID NO: 3596 - DNA, 36 bp, Artificial Sequence
  Synthetic oligonucleotide
taatgccggaccttactttgaaaggaatttcgtgga

SEQ ID NO: 3597 - DNA, 37 bp, Artificial Sequence
  Synthetic oligonucleotide
tagcacttctagggggattggtaccaatgctcaggca

SEQ ID NO: 3598 - DNA, 38 bp, Artificial Sequence
  Synthetic oligonucleotide
tgcaatctgctacggactggcaagtccgcggggggtga

SEQ ID NO: 3599 - DNA, 36 bp, Artificial Sequence
  Synthetic oligonucleotide
tgctgagcgctggtacgtagaatctaacggacttca

SEQ ID NO: 3600 - DNA, 37 bp, Artificial Sequence
  Synthetic oligonucleotide
ttaacacagtagttggtccatcagaggtgtgcggaga

SEQ ID NO: 3601 - DNA, 36 bp, Artificial Sequence
  Synthetic oligonucleotide
tttacatcgaacggtgaaaaatcgtgtgctcccgta

SEQ ID NO: 3602 - DNA, 35 bp, Artificial Sequence
  Synthetic oligonucleotide
ttttattcccattataattgtacgaccaggatatg

SEQ ID NO: 3603 - DNA, 36 bp, Artificial Sequence
  Synthetic oligonucleotide
ttttgcattcagaattgtgtgtccggctaatcccaa

SEQ ID NO: 3604 - DNA, 37 bp, Artificial Sequence
  Synthetic oligonucleotide
catgaaagggccatatacgtatcggacagtcagaaga

SEQ ID NO: 3605 - DNA, 35 bp, Artificial Sequence
  Synthetic oligonucleotide
cattgccctctatttttacataacgcctggtatga

SEQ ID NO: 3606 - DNA, 38 bp, Artificial Sequence
  Synthetic oligonucleotide
gtacgtgtactgaatcatggatgagtggacctgagtga

SEQ ID NO: 3607 - DNA, 37 bp, Artificial Sequence
  Synthetic oligonucleotide
taacctactgtggttggtgacacgattgtgagcatga

SEQ ID NO: 3608 - DNA, 36 bp, Artificial Sequence
  Synthetic oligonucleotide
acgatgcaaacgcccatttgtagtttggttcgtaca

SEQ ID NO: 3609 - DNA, 37 bp, Artificial Sequence
  Synthetic oligonucleotide
gcggaaccgggtagaaacagtctttatctaaacgtga

SEQ ID NO: 3610 - DNA, 37 bp, Artificial Sequence
  Synthetic oligonucleotide
gcgtagtgtggacgattattggcgtaaggttaatgga

SEQ ID NO: 3611 - DNA, 35 bp, Artificial Sequence
  Synthetic oligonucleotide
tagtcatgaggcgctagggcgcatcacaatgcaac

SEQ ID NO: 3612 - DNA, 35 bp, Artificial Sequence
  Synthetic oligonucleotide
tatccttccactcattgcggaaagttctgatggtt

SEQ ID NO: 3613 - DNA, 37 bp, Artificial Sequence
  Synthetic oligonucleotide
tctcaacgcgaggtctccgtttgcgttgtattcccga

SEQ ID NO: 3614 - DNA, 36 bp, Artificial Sequence
  Synthetic oligonucleotide
tttggtattagtgctcgggctgttgcgttttctgca

SEQ ID NO: 3615 - DNA, 36 bp, Artificial Sequence
  Synthetic oligonucleotide
acgactcactcgagtggatccgaacgggaacttgaa

SEQ ID NO: 3616 - DNA, 36 bp, Artificial Sequence
  Synthetic oligonucleotide
gattgcactgcgactgtttcattatagacgttagta

SEQ ID NO: 3617 - DNA, 35 bp, Artificial Sequence
  Synthetic oligonucleotide
gcttgtcgcgtacttgcactctgacgggcccttac

SEQ ID NO: 3618 - DNA, 35 bp, Artificial Sequence
  Synthetic oligonucleotide
ggacttttaggtcctatcgtgggaaccatttcggt

SEQ ID NO: 3619 - DNA, 38 bp, Artificial Sequence
  Synthetic oligonucleotide
gggtcaaccgggggttttagcacgtataatagtcatga

SEQ ID NO: 3620 - DNA, 35 bp, Artificial Sequence
  Synthetic oligonucleotide
tggtccctgcaggttcagtcacggacacggggagc

SEQ ID NO: 3621 - DNA, 38 bp, Artificial Sequence
  Synthetic oligonucleotide
agcaagctccctctccaggagacgtgcaaggagggtga

SEQ ID NO: 3622 - DNA, 35 bp, Artificial Sequence
  Synthetic oligonucleotide
aggacgggagatctgaagccacagagactgaatgt

SEQ ID NO: 3623 - DNA, 38 bp, Artificial Sequence
  Synthetic oligonucleotide
atgttcgaccaatgattgttaagagccaccgcccgtga

SEQ ID NO: 3624 - DNA, 36 bp, Artificial Sequence
  Synthetic oligonucleotide
caagcgtggccatggtttacgtactaaatagactta

SEQ ID NO: 3625 - DNA, 38 bp, Artificial Sequence
  Synthetic oligonucleotide
catgtcaacgactgattgagcgccggtccaatgcgtta

SEQ ID NO: 3626 - DNA, 35 bp, Artificial Sequence
  Synthetic oligonucleotide
cctggtccctgacctaatgctgcagtcttcatggt

SEQ ID NO: 3627 - DNA, 35 bp, Artificial Sequence
  Synthetic oligonucleotide
gaatcgacatcctcgttgcaatacctcgggctttg

SEQ ID NO: 3628 - DNA, 36 bp, Artificial Sequence
  Synthetic oligonucleotide
gacgttacacgggtgtaaagccgcgctaacttggta

SEQ ID NO: 3629 - DNA, 36 bp, Artificial Sequence
  Synthetic oligonucleotide
gatatcgagttgaggacgcgtgtctcacgcactgaa

SEQ ID NO: 3630 - DNA, 38 bp, Artificial Sequence
  Synthetic oligonucleotide
gcgcaccaagtcgttattgaaattttaggggggtatga

SEQ ID NO: 3631 - DNA, 36 bp, Artificial Sequence
  Synthetic oligonucleotide
tatctgccgtactaaaatgcgttttccgagttgacg

SEQ ID NO: 3632 - DNA, 36 bp, Artificial Sequence
  Synthetic oligonucleotide
tcaaccaaaatatgttgagtttagcgctagaacgaa

SEQ ID NO: 3633 - DNA, 35 bp, Artificial Sequence
  Synthetic oligonucleotide
tcatcgactcacgcgccggtttgacaggcggtaga

SEQ ID NO: 3634 - DNA, 38 bp, Artificial Sequence
  Synthetic oligonucleotide
atgatacactacgacgagatgcgggcaatatcggttga

SEQ ID NO: 3635 - DNA, 38 bp, Artificial Sequence
  Synthetic oligonucleotide
acacgaagataggtggctgaatcattcagagggtgtga

SEQ ID NO: 3636 - DNA, 35 bp, Artificial Sequence
  Synthetic oligonucleotide
agcgaaaataggcttgaggtgcatgcctgaccgga

SEQ ID NO: 3637 - DNA, 36 bp, Artificial Sequence
  Synthetic oligonucleotide
tacagggggtatgcttgtgagcatgtcaataacgga

SEQ ID NO: 3638 - DNA, 37 bp, Artificial Sequence
  Synthetic oligonucleotide
acaatcgaacataatccaactgcgtctggtcatggga

SEQ ID NO: 3639 - DNA, 35 bp, Artificial Sequence
  Synthetic oligonucleotide
agtactgagcggaggtgattgtagccgactgtagg

SEQ ID NO: 3640 - DNA, 37 bp, Artificial Sequence
  Synthetic oligonucleotide
agtatagctactgatagatcttcatagtgaacatcga

SEQ ID NO: 3641 - DNA, 36 bp, Artificial Sequence
  Synthetic oligonucleotide
agtattcacggatgcaagtgcactggccgatgtcga

SEQ ID NO: 3642 - DNA, 35 bp, Artificial Sequence
  Synthetic oligonucleotide
attgagattcattcaggctggtaccgttgctgacc

SEQ ID NO: 3643 - DNA, 36 bp, Artificial Sequence
  Synthetic oligonucleotide
gacgtgcaggcaagacggaagtgtaactgccattaa

SEQ ID NO: 3644 - DNA, 35 bp, Artificial Sequence
  Synthetic oligonucleotide
gcatacagttgaacctatatgcaacgtattaaggg

SEQ ID NO: 3645 - DNA, 35 bp, Artificial Sequence
  Synthetic oligonucleotide
gctgggcatgaaaatactggtgtcgacggatgtac

SEQ ID NO: 3646 - DNA, 38 bp, Artificial Sequence
  Synthetic oligonucleotide
tcaccgcccgactctagtgcaagattcggttgaactga

SEQ ID NO: 3647 - DNA, 36 bp, Artificial Sequence
  Synthetic oligonucleotide
aaatagtgacgtgcaggcaatgagttttttcacaga

SEQ ID NO: 3648 - DNA, 38 bp, Artificial Sequence
  Synthetic oligonucleotide
aatatcattggtagatgtgcgaaacactggtcaagtga

SEQ ID NO: 3649 - DNA, 38 bp, Artificial Sequence
  Synthetic oligonucleotide
acctgcactagtgtcatggaaactctgggatggtgtga

SEQ ID NO: 3650 - DNA, 35 bp, Artificial Sequence
  Synthetic oligonucleotide
agagctggggtgaggcacatagccaacagactcgc

SEQ ID NO: 3651 - DNA, 38 bp, Artificial Sequence
  Synthetic oligonucleotide
agataccgcacactgagtacgcacggaaggaggggtga

SEQ ID NO: 3652 - DNA, 35 bp, Artificial Sequence
  Synthetic oligonucleotide
attcaaggaggtcacgctcattttaattggggtaa

SEQ ID NO: 3653 - DNA, 37 bp, Artificial Sequence
  Synthetic oligonucleotide
attgtggacttccgcacgttcgcgacatgggtcctga

SEQ ID NO: 3654 - DNA, 35 bp, Artificial Sequence
  Synthetic oligonucleotide
tgtttctgtgctaagcgcaatctaacaacggtcta

SEQ ID NO: 3655 - DNA, 36 bp, Artificial Sequence
  Synthetic oligonucleotide
aacgtaggtcacgcacacaatacggagtcaaagcaa

SEQ ID NO: 3656 - DNA, 38 bp, Artificial Sequence
  Synthetic oligonucleotide
attaggggacggtgaattgaacgtaacaggcttgttga

SEQ ID NO: 3657 - DNA, 36 bp, Artificial Sequence
  Synthetic oligonucleotide
caaggacaaagagatgctggaggccgatataggcga

SEQ ID NO: 3658 - DNA, 37 bp, Artificial Sequence
  Synthetic oligonucleotide
cctggtcaaaacacctttccgaatcgcgcgcgcgaga

SEQ ID NO: 3659 - DNA, 38 bp, Artificial Sequence
  Synthetic oligonucleotide
cttgcaaagtaaactggaaaacgggtcctaagacatga

SEQ ID NO: 3660 - DNA, 35 bp, Artificial Sequence
  Synthetic oligonucleotide
gcccgataatcagtgcgatgtagaagtgcgtctat

SEQ ID NO: 3661 - DNA, 35 bp, Artificial Sequence
  Synthetic oligonucleotide
ggagcgggtcgcggatacgcctaggatgggacttg

SEQ ID NO: 3662 - DNA, 35 bp, Artificial Sequence
  Synthetic oligonucleotide
taattgggtaaggcaggtgcgggtttatacttaag

SEQ ID NO: 3663 - DNA, 36 bp, Artificial Sequence
  Synthetic oligonucleotide
ttacattgaactaaaggtaaagcgaagctagcacca

SEQ ID NO: 3664 - DNA, 36 bp, Artificial Sequence
  Synthetic oligonucleotide
ttagaactgcacatttcgaaatcttgtgatactcga

SEQ ID NO: 3665 - DNA, 35 bp, Artificial Sequence
  Synthetic oligonucleotide
ttcgttaaatacttgtttcgaacacacgggggtcg

SEQ ID NO: 3666 - DNA, 36 bp, Artificial Sequence
  Synthetic oligonucleotide
tcacgccaagagttggtgaacgtctgtgggtcgtga

SEQ ID NO: 3667 - DNA, 36 bp, Artificial Sequence
  Synthetic oligonucleotide
aatttaagctcaggggccctgttcagacgggtttta

SEQ ID NO: 3668 - DNA, 38 bp, Artificial Sequence
  Synthetic oligonucleotide
tccagtcgaaaggttgcccaggggtgataaagacatga

SEQ ID NO: 3669 - DNA, 37 bp, Artificial Sequence
  Synthetic oligonucleotide
tctgtggaccggtagaaaggagtgcgttttagggagc

SEQ ID NO: 3670 - DNA, 35 bp, Artificial Sequence
  Synthetic oligonucleotide
tttgatgtaagcagtcaagagggagggtacgtcac

SEQ ID NO: 3671 - DNA, 37 bp, Artificial Sequence
  Synthetic oligonucleotide
catgactcaaagatccccggtccgctgattaccccga

SEQ ID NO: 3672 - DNA, 36 bp, Artificial Sequence
  Synthetic oligonucleotide
cttgagctgttggtccgctactgagtaaacacgata

SEQ ID NO: 3673 - DNA, 38 bp, Artificial Sequence
  Synthetic oligonucleotide
gagtggcacaaaactctgagcgcgtgcctcacatatga

SEQ ID NO: 3674 - DNA, 35 bp, Artificial Sequence
  Synthetic oligonucleotide
gtatcattaccgcagtaacgaatgcatgactgtaa

SEQ ID NO: 3675 - DNA, 36 bp, Artificial Sequence
  Synthetic oligonucleotide
tcagccacgcgtcgtacggccagacacctatcttca

SEQ ID NO: 3676 - DNA, 38 bp, Artificial Sequence
  Synthetic oligonucleotide
tgtacgctgttaacgcgttccctgcgacaactgtgtga

SEQ ID NO: 3677 - DNA, 36 bp, Artificial Sequence
  Synthetic oligonucleotide
ttccggtacctgcccttggcgtgtttggcgcgccca

SEQ ID NO: 3678 - DNA, 35 bp, Artificial Sequence
  Synthetic oligonucleotide
ttttgcccgagcccggctatcctagaaagtcacgc

SEQ ID NO: 3679 - DNA, 36 bp, Artificial Sequence
  Synthetic oligonucleotide
gccataaaggagtgcggtccattcgggcggtacata

SEQ ID NO: 3680 - DNA, 35 bp, Artificial Sequence
  Synthetic oligonucleotide
atgatccaactggatcggtaaaggttgggattggg

SEQ ID NO: 3681 - DNA, 35 bp, Artificial Sequence
  Synthetic oligonucleotide
ctactcaatcgttccgagagttgccagtaactatg

SEQ ID NO: 3682 - DNA, 38 bp, Artificial Sequence
  Synthetic oligonucleotide
ggaatggcatttcacgttgaatcgccttcctcaactga

SEQ ID NO: 3683 - DNA, 36 bp, Artificial Sequence
  Synthetic oligonucleotide
tggcgtgatgcgtatcacgaataacgtactagttaa

SEQ ID NO: 3684 - DNA, 36 bp, Artificial Sequence
  Synthetic oligonucleotide
ccatcgcaattggtgaacgattcgcaaaggggatga

SEQ ID NO: 3685 - DNA, 36 bp, Artificial Sequence
  Synthetic oligonucleotide
acctaagtcatggagggtcatttagggacgttcgca

SEQ ID NO: 3686 - DNA, 37 bp, Artificial Sequence
  Synthetic oligonucleotide
agaatttgtaccctagaagcacaagagccgtgctaga

SEQ ID NO: 3687 - DNA, 35 bp, Artificial Sequence
  Synthetic oligonucleotide
atgttcgtgaggtttggttaagtcctcgttttatt

SEQ ID NO: 3688 - DNA, 35 bp, Artificial Sequence
  Synthetic oligonucleotide
atttcggggatgagctcttcgggtgatctaaaggt

SEQ ID NO: 3689 - DNA, 37 bp, Artificial Sequence
  Synthetic oligonucleotide
gaagtagatccgccgcctcgtaggtacacaaggatga

SEQ ID NO: 3690 - DNA, 36 bp, Artificial Sequence
  Synthetic oligonucleotide
gccttgccgacccggtgtttgttcggaataattgta

SEQ ID NO: 3691 - DNA, 38 bp, Artificial Sequence
  Synthetic oligonucleotide
gctgtcatgcctaaagcgcaattggtcttgggtgttga

SEQ ID NO: 3692 - DNA, 35 bp, Artificial Sequence
  Synthetic oligonucleotide
ggataaactgcacgggtggggtgttcacctaagga

SEQ ID NO: 3693 - DNA, 36 bp, Artificial Sequence
  Synthetic oligonucleotide
tactgtgcatggcaactggtacaggagtaggaggta

SEQ ID NO: 3694 - DNA, 38 bp, Artificial Sequence
  Synthetic oligonucleotide
tagactggaccgaagtatggtgccgagcttgcacttga

SEQ ID NO: 3695 - DNA, 37 bp, Artificial Sequence
  Synthetic oligonucleotide
tcttggtaggccctgctattagacaagtaaggtgaga

SEQ ID NO: 3696 - DNA, 37 bp, Artificial Sequence
  Synthetic oligonucleotide
ttcaaagaccggcacagtacagcttacactggcccga

SEQ ID NO: 3697 - DNA, 35 bp, Artificial Sequence
  Synthetic oligonucleotide
tccgttgaggttctggagttggcactaacggacgt

SEQ ID NO: 3698 - DNA, 36 bp, Artificial Sequence
  Synthetic oligonucleotide
aatcggcggatatttggatatacgccagagagttta

SEQ ID NO: 3699 - DNA, 36 bp, Artificial Sequence
  Synthetic oligonucleotide
gactcgtagattgtcgtaccgtacttgcacatacaa

SEQ ID NO: 3700 - DNA, 36 bp, Artificial Sequence
  Synthetic oligonucleotide
tagcatcggtacctgcgttatcagggctatgttgaa

SEQ ID NO: 3701 - DNA, 33 bp, Artificial Sequence
  Synthetic oligonucleotide
tgtgtgggatactgttttcccgcacaaagctga

SEQ ID NO: 3702 - DNA, 36 bp, Artificial Sequence
  Synthetic oligonucleotide
aactcaacggttaagtgtggggtcgtgagttttaaa

SEQ ID NO: 3703 - DNA, 38 bp, Artificial Sequence
  Synthetic oligonucleotide
agtaacgagtgctagatttacgtaacatagccccttga

SEQ ID NO: 3704 - DNA, 36 bp, Artificial Sequence
  Synthetic oligonucleotide
gactgattccaattgatacacgcctgtcaatcgcga

SEQ ID NO: 3705 - DNA, 35 bp, Artificial Sequence
  Synthetic oligonucleotide
gattgacaatcggtggagcgggcctcgagccatcg

SEQ ID NO: 3706 - DNA, 35 bp, Artificial Sequence
  Synthetic oligonucleotide
ggtacctgtccctggcttttcccacgtctagacca

SEQ ID NO: 3707 - DNA, 36 bp, Artificial Sequence
  Synthetic oligonucleotide
gtgtgcggtatactcggtgcggatgaaaaaactgta

SEQ ID NO: 3708 - DNA, 38 bp, Artificial Sequence
  Synthetic oligonucleotide
tcgcattgtcacttacagtgtcaacgaggcgcatgtga

SEQ ID NO: 3709 - DNA, 35 bp, Artificial Sequence
  Synthetic oligonucleotide
tgttcgcaggtttgaatacatagccggggttcagg

SEQ ID NO: 3710 - DNA, 37 bp, Artificial Sequence
  Synthetic oligonucleotide
tttatacgtactggaagaggctagcatgttagaacga

SEQ ID NO: 3711 - DNA, 35 bp, Artificial Sequence
  Synthetic oligonucleotide
aatcaaggcatggaatcttgtgtatagcaagcgat

SEQ ID NO: 3712 - DNA, 35 bp, Artificial Sequence
  Synthetic oligonucleotide
aggacatcgaccccggatgtttcatcagtctcatg

SEQ ID NO: 3713 - DNA, 35 bp, Artificial Sequence
  Synthetic oligonucleotide
agtaccagcacggggcctggcacctgcaccgtgag

SEQ ID NO: 3714 - DNA, 38 bp, Artificial Sequence
  Synthetic oligonucleotide
ataaatcgtcgtagtatggtgatgggaacgaccattga

SEQ ID NO: 3715 - DNA, 37 bp, Artificial Sequence
  Synthetic oligonucleotide
attggcgaggcaacaaagccaattcactgcagggcga

SEQ ID NO: 3716 - DNA, 37 bp, Artificial Sequence
  Synthetic oligonucleotide
cgatttggcaacttaggttgagatgggtgcatcatga

SEQ ID NO: 3717 - DNA, 38 bp, Artificial Sequence
  Synthetic oligonucleotide
gaacgcacgcatctggatccaagcgcccatccgcatga

SEQ ID NO: 3718 - DNA, 36 bp, Artificial Sequence
  Synthetic oligonucleotide
gaatatctgtcgttcgcgatcaccaagtggcggaga

SEQ ID NO: 3719 - DNA, 37 bp, Artificial Sequence
  Synthetic oligonucleotide
gcaggattataggttatgcaacgaaatcaagacttga

SEQ ID NO: 3720 - DNA, 37 bp, Artificial Sequence
  Synthetic oligonucleotide
ggtctgacaaagcaagagctgtcagggggttttatga

SEQ ID NO: 3721 - DNA, 37 bp, Artificial Sequence
  Synthetic oligonucleotide
gtacccggtgcgcctcgcgctccggtttgagaaagga

SEQ ID NO: 3722 - DNA, 37 bp, Artificial Sequence
  Synthetic oligonucleotide
gtcatatcgttcgcagtacatggggggaaggatgtga

SEQ ID NO: 3723 - DNA, 38 bp, Artificial Sequence
  Synthetic oligonucleotide
taagttgctatcctaatcgttttcgcacgagctgctga

SEQ ID NO: 3724 - DNA, 37 bp, Artificial Sequence
  Synthetic oligonucleotide
tggaacggttgttcttatcaaatctagtttcgaagga

SEQ ID NO: 3725 - DNA, 36 bp, Artificial Sequence
  Synthetic oligonucleotide
ttcgtcatgggaccggcaataacgcgtggtaatgta

SEQ ID NO: 3726 - DNA, 37 bp, Artificial Sequence
  Synthetic oligonucleotide
gtttgttcactggcaaacgtactgggtgaaagggcga

SEQ ID NO: 3727 - DNA, 37 bp, Artificial Sequence
  Synthetic oligonucleotide
aaccacccgattacggacggtgtatataacgcgacga

SEQ ID NO: 3728 - DNA, 37 bp, Artificial Sequence
  Synthetic oligonucleotide
gtaggcggtgcctatcgctaaaactgactagttagga

SEQ ID NO: 3729 - DNA, 35 bp, Artificial Sequence
  Synthetic oligonucleotide
tgctgtagcacgaactggacatcttatcaatcagg

SEQ ID NO: 3730 - DNA, 37 bp, Artificial Sequence
  Synthetic oligonucleotide
aagctcgtggtacggacagttcttacggcccaagtga

SEQ ID NO: 3731 - DNA, 37 bp, Artificial Sequence
  Synthetic oligonucleotide
aaggtgttgcagccatgacattatcccaccgccttga

SEQ ID NO: 3732 - DNA, 38 bp, Artificial Sequence
  Synthetic oligonucleotide
acgagatccgctcgtggttctcgttggtactaatatga

SEQ ID NO: 3733 - DNA, 35 bp, Artificial Sequence
  Synthetic oligonucleotide
actggggcaagtacgttagattactagccagtggg

SEQ ID NO: 3734 - DNA, 38 bp, Artificial Sequence
  Synthetic oligonucleotide
agagttcgggcaatgctgagggcaagattgccattgga

SEQ ID NO: 3735 - DNA, 37 bp, Artificial Sequence
  Synthetic oligonucleotide
cctgcaggcattctctaggataaaatcacgctccaga

SEQ ID NO: 3736 - DNA, 37 bp, Artificial Sequence
  Synthetic oligonucleotide
gctacagcagttatgggtcttcgcgaggagactaaga

SEQ ID NO: 3737 - DNA, 36 bp, Artificial Sequence
  Synthetic oligonucleotide
gctctgatccacgtagttggcggaaagggcctttga

SEQ ID NO: 3738 - DNA, 35 bp, Artificial Sequence
  Synthetic oligonucleotide
gtgaatgtctttctcagcatagttgcaggtgttgg

SEQ ID NO: 3739 - DNA, 37 bp, Artificial Sequence
  Synthetic oligonucleotide
gtgtcactgactcatgagcctgggctacggttaatga

SEQ ID NO: 3740 - DNA, 37 bp, Artificial Sequence
  Synthetic oligonucleotide
tgagagcttcaacgaggtacagactcatcctggcgga

SEQ ID NO: 3741 - DNA, 37 bp, Artificial Sequence
  Synthetic oligonucleotide
aaagtacgcacacgctttgatatctgacgcggagtga

SEQ ID NO: 3742 - DNA, 35 bp, Artificial Sequence
  Synthetic oligonucleotide
aaacgacttaggtggtgagtaggtgcatctgcaga

SEQ ID NO: 3743 - DNA, 38 bp, Artificial Sequence
  Synthetic oligonucleotide
acttctgctctagataagcccccgcatagtagtactga

SEQ ID NO: 3744 - DNA, 35 bp, Artificial Sequence
  Synthetic oligonucleotide
gccgtagcataaactgtcaccaaggaccattgtgc

SEQ ID NO: 3745 - DNA, 37 bp, Artificial Sequence
  Synthetic oligonucleotide
ggacatggggcgccggcccgttcattgaatcgtagga

SEQ ID NO: 3746 - DNA, 37 bp, Artificial Sequence
  Synthetic oligonucleotide
ggcctgcttcggtccgggagtaacacggttaacttga

SEQ ID NO: 3747 - DNA, 38 bp, Artificial Sequence
  Synthetic oligonucleotide
ggtcaaactgtactgtcttttggagtcacgatatatga

SEQ ID NO: 3748 - DNA, 35 bp, Artificial Sequence
  Synthetic oligonucleotide
gtgcatcgtaaaaccggatagtatttgaactcgta

SEQ ID NO: 3749 - DNA, 37 bp, Artificial Sequence
  Synthetic oligonucleotide
gtttagcgtcactggcaggcacgattattggggaaga

SEQ ID NO: 3750 - DNA, 35 bp, Artificial Sequence
  Synthetic oligonucleotide
gtttgattgcataacaaaggggtaatgccctttgc

SEQ ID NO: 3751 - DNA, 35 bp, Artificial Sequence
  Synthetic oligonucleotide
acattcatgacctaagtatgcccttgacgggccga

SEQ ID NO: 3752 - DNA, 37 bp, Artificial Sequence
  Synthetic oligonucleotide
aaagccccgggcgtactgagaagacattataatcgga

SEQ ID NO: 3753 - DNA, 38 bp, Artificial Sequence
  Synthetic oligonucleotide
atagtgcgcatatgctcggactaaatagacgtgtgtga

SEQ ID NO: 3754 - DNA, 38 bp, Artificial Sequence
  Synthetic oligonucleotide
gcactcggcttaacagtttaactgtgctccattcatga

SEQ ID NO: 3755 - DNA, 38 bp, Artificial Sequence
  Synthetic oligonucleotide
tgtaattcctacggcctcccggaggcgggaatgcttga

SEQ ID NO: 3756 - DNA, 38 bp, Artificial Sequence
  Synthetic oligonucleotide
tttcacagcttacagtcaaccgaggctctaactcctga

SEQ ID NO: 3757 - DNA, 35 bp, Artificial Sequence
  Synthetic oligonucleotide
aatgtaaaggtctaccggaactttacctctggctg

SEQ ID NO: 3758 - DNA, 35 bp, Artificial Sequence
  Synthetic oligonucleotide
accatagacacatcacggttgccggacaatcgcaa

SEQ ID NO: 3759 - DNA, 38 bp, Artificial Sequence
  Synthetic oligonucleotide
actactcaggttttcggtgtgtacgtgatcatgggtga

SEQ ID NO: 3760 - DNA, 38 bp, Artificial Sequence
  Synthetic oligonucleotide
actagggccagatatagacaatattcccctgtctgtga

SEQ ID NO: 3761 - DNA, 38 bp, Artificial Sequence
  Synthetic oligonucleotide
gattcacggtccataagaacgcctgaagcggaatgtga

SEQ ID NO: 3762 - DNA, 37 bp, Artificial Sequence
  Synthetic oligonucleotide
ggaaacataatctcatgttctggatcgaacggtagga

SEQ ID NO: 3763 - DNA, 36 bp, Artificial Sequence
  Synthetic oligonucleotide
gggggtgttgtgtagttactccgtatcgcttgttga

SEQ ID NO: 3764 - DNA, 38 bp, Artificial Sequence
  Synthetic oligonucleotide
gtaaaaccgtttgttggatggagaaactctgtccatga

SEQ ID NO: 3765 - DNA, 37 bp, Artificial Sequence
  Synthetic oligonucleotide
gtaagatttgtgttcaggatcagcctttcccgttaca

SEQ ID NO: 3766 - DNA, 36 bp, Artificial Sequence
  Synthetic oligonucleotide
gtaggggatgtatatggctcgttattacaaggttga

SEQ ID NO: 3767 - DNA, 36 bp, Artificial Sequence
  Synthetic oligonucleotide
gtcaaggatttagatctttatgtggggtgggtttta

SEQ ID NO: 3768 - DNA, 37 bp, Artificial Sequence
  Synthetic oligonucleotide
gtcccggacaggcgaaaaaccgggtttatagttacga

SEQ ID NO: 3769 - DNA, 36 bp, Artificial Sequence
  Synthetic oligonucleotide
gtgcacttagaagatgcatttgcgatatgcgcaaga

SEQ ID NO: 3770 - DNA, 38 bp, Artificial Sequence
  Synthetic oligonucleotide
tctgacgagaacgccaaaggtcttggacagcaccatga

SEQ ID NO: 3771 - DNA, 37 bp, Artificial Sequence
  Synthetic oligonucleotide
tgaccgttgtgcagtaatgttaaggacttttactaga

SEQ ID NO: 3772 - DNA, 37 bp, Artificial Sequence
  Synthetic oligonucleotide
ttcagactcgagggggtgtatccactgtaggttttga

SEQ ID NO: 3773 - DNA, 38 bp, Artificial Sequence
  Synthetic oligonucleotide
ttggcgtactgggtagtcaaacgttggtcagggcatga

SEQ ID NO: 3774 - DNA, 37 bp, Artificial Sequence
  Synthetic oligonucleotide
ttgtacgcgtagaatgatatagggcttcagtagatga

SEQ ID NO: 3775 - DNA, 36 bp, Artificial Sequence
  Synthetic oligonucleotide
ttgtcacagcgagccagtattgagggtcgtgcttca

SEQ ID NO: 3776 - DNA, 37 bp, Artificial Sequence
  Synthetic oligonucleotide
gcagtccagtttcttcacgagttgtgttccgagtcga

SEQ ID NO: 3777 - DNA, 36 bp, Artificial Sequence
  Synthetic oligonucleotide
tagcggacgtcacggacatttcacctaggggtgcaa

SEQ ID NO: 3778 - DNA, 38 bp, Artificial Sequence
  Synthetic oligonucleotide
tgtttaagtcggttcggcgtcgtccgggagtggactga

SEQ ID NO: 3779 - DNA, 38 bp, Artificial Sequence
  Synthetic oligonucleotide
ttgagattgacaacttttagtcatggacaaggctttga

SEQ ID NO: 3780 - DNA, 37 bp, Artificial Sequence
  Synthetic oligonucleotide
accatgttaaaccaatttggacattgctgtagtccga

SEQ ID NO: 3781 - DNA, 36 bp, Artificial Sequence
  Synthetic oligonucleotide
gttatggcattagcactcggatatagttcgaccgta

SEQ ID NO: 3782 - DNA, 35 bp, Artificial Sequence
  Synthetic oligonucleotide
ttacggcacagcacaggctgcccccctcatgcgta

SEQ ID NO: 3783 - DNA, 37 bp, Artificial Sequence
  Synthetic oligonucleotide
atcaactgtaaatgcagacggaataatccaattacga

SEQ ID NO: 3784 - DNA, 37 bp, Artificial Sequence
  Synthetic oligonucleotide
aatcccgcactgaggtggccgtgccaaggatcgacga

SEQ ID NO: 3785 - DNA, 36 bp, Artificial Sequence
  Synthetic oligonucleotide
ctcgtcctagagaatgaaggcacgggacgatttgca

SEQ ID NO: 3786 - DNA, 37 bp, Artificial Sequence
  Synthetic oligonucleotide
ctgctaaagctaagggaggtatggatcatgatctcga

SEQ ID NO: 3787 - DNA, 37 bp, Artificial Sequence
  Synthetic oligonucleotide
gaaagtcaagggtgcgtaagttatgataacgggttga

SEQ ID NO: 3788 - DNA, 38 bp, Artificial Sequence
  Synthetic oligonucleotide
gagactgcagcttccagggtaatttacgtaatgtatga

SEQ ID NO: 3789 - DNA, 37 bp, Artificial Sequence
  Synthetic oligonucleotide
gagcctcaatgtcgcggagcaggcccgcattctctga

SEQ ID NO: 3790 - DNA, 37 bp, Artificial Sequence
  Synthetic oligonucleotide
gattcgcttgtgctgtcaatgcgagataagagggcga

SEQ ID NO: 3791 - DNA, 35 bp, Artificial Sequence
  Synthetic oligonucleotide
gcctccgcggttctgatatagcccaggaaccctac

SEQ ID NO: 3792 - DNA, 38 bp, Artificial Sequence
  Synthetic oligonucleotide
gtggaggaaccgtgaagtggaatgtacctgccacctga

SEQ ID NO: 3793 - DNA, 35 bp, Artificial Sequence
  Synthetic oligonucleotide
tctcatgagcgaatgcggcttcccgtagtccgtaa

SEQ ID NO: 3794 - DNA, 35 bp, Artificial Sequence
  Synthetic oligonucleotide
ttaaatgggtcgacccgtccagggtacatagggca

SEQ ID NO: 3795 - DNA, 35 bp, Artificial Sequence
  Synthetic oligonucleotide
ttacatactgagagggcgactgcaagaaggtgggg

SEQ ID NO: 3796 - DNA, 36 bp, Artificial Sequence
  Synthetic oligonucleotide
ttggtaggaacaaagtacctccagactgcgggacga

SEQ ID NO: 3797 - DNA, 38 bp, Artificial Sequence
  Synthetic oligonucleotide
agggaacgccggtcaaaaaaaaagtacatgcggactga

SEQ ID NO: 3798 - DNA, 38 bp, Artificial Sequence
  Synthetic oligonucleotide
gtcaatgggctaggcttatgccatggttatgtacgtga

SEQ ID NO: 3799 - DNA, 36 bp, Artificial Sequence
  Synthetic oligonucleotide
atttgctataccgtacggcaatgtaccgtaggtgta

SEQ ID NO: 3800 - DNA, 36 bp, Artificial Sequence
  Synthetic oligonucleotide
aaaagctgtcaagattatttcagctggacggtccga

SEQ ID NO: 3801 - DNA, 35 bp, Artificial Sequence
  Synthetic oligonucleotide
aaccagtagtatggtcataagcgtatagcgactac

SEQ ID NO: 3802 - DNA, 36 bp, Artificial Sequence
  Synthetic oligonucleotide
aaggaatcaacgtatctgcgtactttagaatctcca

SEQ ID NO: 3803 - DNA, 35 bp, Artificial Sequence
  Synthetic oligonucleotide
aatgtatcaagtgtgagccctcagaaggcgatagt

SEQ ID NO: 3804 - DNA, 38 bp, Artificial Sequence
  Synthetic oligonucleotide
acatgggatcaatacctctgggtaccattcggtagtga

SEQ ID NO: 3805 - DNA, 36 bp, Artificial Sequence
  Synthetic oligonucleotide
agttattgagcatagaacatcgtcaccgggtcgtta

SEQ ID NO: 3806 - DNA, 35 bp, Artificial Sequence
  Synthetic oligonucleotide
atacctagtagttgctgtctggttgaattggtgga

SEQ ID NO: 3807 - DNA, 38 bp, Artificial Sequence
  Synthetic oligonucleotide
catggagtggacggcctgcataacagagtaatatttga

SEQ ID NO: 3808 - DNA, 35 bp, Artificial Sequence
  Synthetic oligonucleotide
cgtcccccctcgtgcggcatcggtgccctcccacg

SEQ ID NO: 3809 - DNA, 35 bp, Artificial Sequence
  Synthetic oligonucleotide
ctcctaccgattggattgggatccgtctaagcaag

SEQ ID NO: 3810 - DNA, 37 bp, Artificial Sequence
  Synthetic oligonucleotide
gaacagtaagttgagatcatcaacggactccattgga

SEQ ID NO: 3811 - DNA, 37 bp, Artificial Sequence
  Synthetic oligonucleotide
gactgctcccgttgtacacggcgttatcggttacgga

SEQ ID NO: 3812 - DNA, 36 bp, Artificial Sequence
  Synthetic oligonucleotide
gaggaccgtgtgcatgcacctcggcctactactgga

SEQ ID NO: 3813 - DNA, 38 bp, Artificial Sequence
  Synthetic oligonucleotide
gcgaaggaacgaattgggtgtcccttagcgccccatga

SEQ ID NO: 3814 - DNA, 38 bp, Artificial Sequence
  Synthetic oligonucleotide
gctacgccactacagacgtcaccgcatctacctactga

SEQ ID NO: 3815 - DNA, 35 bp, Artificial Sequence
  Synthetic oligonucleotide
gcttccccgcgccatagtccggctatggtccataa

SEQ ID NO: 3816 - DNA, 38 bp, Artificial Sequence
  Synthetic oligonucleotide
ggagtagttgcttctgctaggctcctaacgcgggttga

SEQ ID NO: 3817 - DNA, 38 bp, Artificial Sequence
  Synthetic oligonucleotide
ggagtcatgtgagacagtgcataacgacctgtatgtga

SEQ ID NO: 3818 - DNA, 37 bp, Artificial Sequence
  Synthetic oligonucleotide
gtaccgtaccatatgtctaaggaagtctatgcgtgga

SEQ ID NO: 3819 - DNA, 35 bp, Artificial Sequence
  Synthetic oligonucleotide
gtgaatcaggaatccacatgacggtacggtccctg

SEQ ID NO: 3820 - DNA, 37 bp, Artificial Sequence
  Synthetic oligonucleotide
gttgggcggttgtttcagttacatcccatccgttcga

SEQ ID NO: 3821 - DNA, 35 bp, Artificial Sequence
  Synthetic oligonucleotide
tacgcttgcgtccgatttagggtccggagtcccgc

SEQ ID NO: 3822 - DNA, 35 bp, Artificial Sequence
  Synthetic oligonucleotide
tacggcccgtaatgggatccaccgatctgtaaggg

SEQ ID NO: 3823 - DNA, 37 bp, Artificial Sequence
  Synthetic oligonucleotide
tataccctgaagagttaggccctgcgttcggaggtga

SEQ ID NO: 3824 - DNA, 36 bp, Artificial Sequence
  Synthetic oligonucleotide
tatggtctccgctgcagatttaatgctgtgtagtaa

SEQ ID NO: 3825 - DNA, 35 bp, Artificial Sequence
  Synthetic oligonucleotide
tcactcgataacaaagtgtacgttaggcgacacga

SEQ ID NO: 3826 - DNA, 36 bp, Artificial Sequence
  Synthetic oligonucleotide
tcataacacaggatcctcgaggtatagatgtgccaa

SEQ ID NO: 3827 - DNA, 36 bp, Artificial Sequence
  Synthetic oligonucleotide
tccgccacaagtttgatttatatgcaagtactgcga

SEQ ID NO: 3828 - DNA, 35 bp, Artificial Sequence
  Synthetic oligonucleotide
tctataacttttagagtgcccttctgacgtcgtag

SEQ ID NO: 3829 - DNA, 37 bp, Artificial Sequence
  Synthetic oligonucleotide
tgcaaatgtagaggcaacacattgacctgaattggga

SEQ ID NO: 3830 - DNA, 38 bp, Artificial Sequence
  Synthetic oligonucleotide
gagaacgcacgcttttctgcagtgcttggccacattga

SEQ ID NO: 3831 - DNA, 36 bp, Artificial Sequence
  Synthetic oligonucleotide
gtcttggacatcgcaatactgcgactcccttacgca

SEQ ID NO: 3832 - DNA, 36 bp, Artificial Sequence
  Synthetic oligonucleotide
gcttagtcggggtatattgtactttggcatggttga

SEQ ID NO: 3833 - DNA, 38 bp, Artificial Sequence
  Synthetic oligonucleotide
agcactggtcggagcccggatctactcccattgattga

SEQ ID NO: 3834 - DNA, 37 bp, Artificial Sequence
  Synthetic oligonucleotide
atacccgaccacgctggcctgggcaacccctggagga

SEQ ID NO: 3835 - DNA, 38 bp, Artificial Sequence
  Synthetic oligonucleotide
gctatcacgagtctgcacggtaaaaatggtacggctga

SEQ ID NO: 3836 - DNA, 35 bp, Artificial Sequence
  Synthetic oligonucleotide
gttccagtgcgcgaaacgccggaaagtcattgatc

SEQ ID NO: 3837 - DNA, 37 bp, Artificial Sequence
  Synthetic oligonucleotide
aagacgcggctactccttccgtcatgagggagacgga

SEQ ID NO: 3838 - DNA, 37 bp, Artificial Sequence
  Synthetic oligonucleotide
acactttccgacgataaatacactactataagccgga

SEQ ID NO: 3839 - DNA, 37 bp, Artificial Sequence
  Synthetic oligonucleotide
agttcatggcggaggggccctttctatattaccacga

SEQ ID NO: 3840 - DNA, 37 bp, Artificial Sequence
  Synthetic oligonucleotide
gcactcctctgaggggttgatttcggtgaaatttcga

SEQ ID NO: 3841 - DNA, 35 bp, Artificial Sequence
  Synthetic oligonucleotide
ggccagggccgccatgaggatggacccgtattgga

SEQ ID NO: 3842 - DNA, 35 bp, Artificial Sequence
  Synthetic oligonucleotide
gtaccatgggatcgagccgtatcagcattacgacg

SEQ ID NO: 3843 - DNA, 35 bp, Artificial Sequence
  Synthetic oligonucleotide
gttttgccaccactgacgtaactggagtttccgcg

SEQ ID NO: 3844 - DNA, 37 bp, Artificial Sequence
  Synthetic oligonucleotide
ttctggcgcggctcattagcgcttgcgtaatagcgga

SEQ ID NO: 3845 - DNA, 38 bp, Artificial Sequence
  Synthetic oligonucleotide
gtggcatactggtcccgacgtgtctgcagaatgtttga

SEQ ID NO: 3846 - DNA, 37 bp, Artificial Sequence
  Synthetic oligonucleotide
agcatgattcagcggactcacaatgcacactatgtga

SEQ ID NO: 3847 - DNA, 35 bp, Artificial Sequence
  Synthetic oligonucleotide
cttgggtttatggtcttcaaacaccagattactcg

SEQ ID NO: 3848 - DNA, 35 bp, Artificial Sequence
  Synthetic oligonucleotide
gtcggaattaatacatcgaaccgtgcccagcataa

SEQ ID NO: 3849 - DNA, 37 bp, Artificial Sequence
  Synthetic oligonucleotide
agccagcgacgtactgggatgtgcacaggaattgaga

SEQ ID NO: 3850 - DNA, 38 bp, Artificial Sequence
  Synthetic oligonucleotide
cataggccctctatgataggtggccgcctgacgaatga

SEQ ID NO: 3851 - DNA, 36 bp, Artificial Sequence
  Synthetic oligonucleotide
ggtagtgcagtgtaagcgttgttgtccaatgcgaga

SEQ ID NO: 3852 - DNA, 38 bp, Artificial Sequence
  Synthetic oligonucleotide
tccagaccaaggaggggtcacgaacttgatattattga

SEQ ID NO: 3853 - DNA, 36 bp, Artificial Sequence
  Synthetic oligonucleotide
gccttctacagagtgcggggcttgaatatgtatgga

SEQ ID NO: 3854 - DNA, 37 bp, Artificial Sequence
  Synthetic oligonucleotide
agcaacaaaggcgcaagggccatagcagtcactaaga

SEQ ID NO: 3855 - DNA, 36 bp, Artificial Sequence
  Synthetic oligonucleotide
gaaatagtagcgaaattatggttagtgtgtggacca

SEQ ID NO: 3856 - DNA, 35 bp, Artificial Sequence
  Synthetic oligonucleotide
gaatttggggcgcctgtcgacactcaaggaaacta

SEQ ID NO: 3857 - DNA, 37 bp, Artificial Sequence
  Synthetic oligonucleotide
gagcaaccccgctccctgtaaggtggacgtagaatga

SEQ ID NO: 3858 - DNA, 35 bp, Artificial Sequence
  Synthetic oligonucleotide
gaggggtagacagtataagagtcgttcgtgatgtg

SEQ ID NO: 3859 - DNA, 36 bp, Artificial Sequence
  Synthetic oligonucleotide
gagtcccgtccgtaggctgatgctgtctcaagtaca

SEQ ID NO: 3860 - DNA, 35 bp, Artificial Sequence
  Synthetic oligonucleotide
gcaacggggtaagtctaacaaatatagtgtcagtt

SEQ ID NO: 3861 - DNA, 37 bp, Artificial Sequence
  Synthetic oligonucleotide
gcaagggcacctggtgtctagagtaattcctcaaaga

SEQ ID NO: 3862 - DNA, 35 bp, Artificial Sequence
  Synthetic oligonucleotide
ggatccgaaggatgagttctcgaccaggtcacacg

SEQ ID NO: 3863 - DNA, 37 bp, Artificial Sequence
  Synthetic oligonucleotide
ggcactgaagtcccgcatataattattagagggtgga

SEQ ID NO: 3864 - DNA, 35 bp, Artificial Sequence
  Synthetic oligonucleotide
ggcgttaatacgccaaatcctaccgggcaactgta

SEQ ID NO: 3865 - DNA, 37 bp, Artificial Sequence
  Synthetic oligonucleotide
gttaagcgagtgtgtcgtgtgtattcaacatgccaga

SEQ ID NO: 3866 - DNA, 38 bp, Artificial Sequence
  Synthetic oligonucleotide
ttaccatattaagcctcgcacggggccgccaaccgtga

SEQ ID NO: 3867 - DNA, 37 bp, Artificial Sequence
  Synthetic oligonucleotide
acgttgtaccggctccagtcaactcagattttggcga

SEQ ID NO: 3868 - DNA, 38 bp, Artificial Sequence
  Synthetic oligonucleotide
gctaccttcagccacgtagacgggttagggtaccctga

SEQ ID NO: 3869 - DNA, 36 bp, Artificial Sequence
  Synthetic oligonucleotide
tactcatagggtggatggtaaggtctacgagttgta

SEQ ID NO: 3870 - DNA, 35 bp, Artificial Sequence
  Synthetic oligonucleotide
agttgccggacgtgcatcgttatcatctgcaaatg

SEQ ID NO: 3871 - DNA, 35 bp, Artificial Sequence
  Synthetic oligonucleotide
gaatatagaagcggcatatcactactcgctgatgg

SEQ ID NO: 3872 - DNA, 35 bp, Artificial Sequence
  Synthetic oligonucleotide
gctgaaaccctaacttcgatcttacaaggccccct

SEQ ID NO: 3873 - DNA, 37 bp, Artificial Sequence
  Synthetic oligonucleotide
tcatgctgttcaatcttagctggcgttgtttttatga

SEQ ID NO: 3874 - DNA, 38 bp, Artificial Sequence
  Synthetic oligonucleotide
tgagaacggtcgcttaacgtcatgggtctaagttttga

SEQ ID NO: 3875 - DNA, 35 bp, Artificial Sequence
  Synthetic oligonucleotide
tgttttgtgggtagattctctcaaataggtgccta

SEQ ID NO: 3876 - DNA, 36 bp, Artificial Sequence
  Synthetic oligonucleotide
aaagtcgcaatggttaaatatgctgaccacagctga

SEQ ID NO: 3877 - DNA, 38 bp, Artificial Sequence
  Synthetic oligonucleotide
acaatggctgtaataagcggggccgcttatcgaggtga

SEQ ID NO: 3878 - DNA, 35 bp, Artificial Sequence
  Synthetic oligonucleotide
actagtaaaagcaagtaatagacgcaagtacggaa

SEQ ID NO: 3879 - DNA, 38 bp, Artificial Sequence
  Synthetic oligonucleotide
agcattattcattgaatacacgaaagagtattgtatga

SEQ ID NO: 3880 - DNA, 37 bp, Artificial Sequence
  Synthetic oligonucleotide
atgttaagcagacatttagggtttagctacgtgacga

SEQ ID NO: 3881 - DNA, 35 bp, Artificial Sequence
  Synthetic oligonucleotide
attaggtccatgaaacttacgctactctgagcata

SEQ ID NO: 3882 - DNA, 37 bp, Artificial Sequence
  Synthetic oligonucleotide
gaaaggaacgggcgcacgtactgcttggttgtcgcga

SEQ ID NO: 3883 - DNA, 37 bp, Artificial Sequence
  Synthetic oligonucleotide
taattctgcatggtggatcgtaacgttactacattga

SEQ ID NO: 3884 - DNA, 35 bp, Artificial Sequence
  Synthetic oligonucleotide
tcgagaaacgctggtaagacgaagattagcatcag

SEQ ID NO: 3885 - DNA, 36 bp, Artificial Sequence
  Synthetic oligonucleotide
tgttgtagcttgttccacgattgaagtgtgatctaa

SEQ ID NO: 3886 - DNA, 36 bp, Artificial Sequence
  Synthetic oligonucleotide
tttagcgcggtgcgtgccaaaggttgaaacggggta

SEQ ID NO: 3887 - DNA, 37 bp, Artificial Sequence
  Synthetic oligonucleotide
aaagggcccgtgtaggtactccagaacagcatggtga

SEQ ID NO: 3888 - DNA, 37 bp, Artificial Sequence
  Synthetic oligonucleotide
aacgctaactagtggtcgctgtaatttcgagagcgga

SEQ ID NO: 3889 - DNA, 38 bp, Artificial Sequence
  Synthetic oligonucleotide
acacgtatatgttctggttatctgcagtcattaggtga

SEQ ID NO: 3890 - DNA, 37 bp, Artificial Sequence
  Synthetic oligonucleotide
acgtacggtgaaatgcgttaacaatgtagagccccga

SEQ ID NO: 3891 - DNA, 37 bp, Artificial Sequence
  Synthetic oligonucleotide
catgacctgggccatagtaggggcaatatacggtgga

SEQ ID NO: 3892 - DNA, 36 bp, Artificial Sequence
  Synthetic oligonucleotide
cctctctacatcttgtgaacaaatgcgtaagggcta

SEQ ID NO: 3893 - DNA, 36 bp, Artificial Sequence
  Synthetic oligonucleotide
accacacacttttgaggtagatactaaggtaatgga

SEQ ID NO: 3894 - DNA, 35 bp, Artificial Sequence
  Synthetic oligonucleotide
accagtgtacgtaatataatgcgtgtatgaccatg

SEQ ID NO: 3895 - DNA, 36 bp, Artificial Sequence
  Synthetic oligonucleotide
acggctttgctaggcgactggcgacgcccagccaca

SEQ ID NO: 3896 - DNA, 37 bp, Artificial Sequence
  Synthetic oligonucleotide
aggtgccggtgaaaagatggtccgaatccataatcga

SEQ ID NO: 3897 - DNA, 35 bp, Artificial Sequence
  Synthetic oligonucleotide
cacatacaacccgacgtggtggcttggtagagtgt

SEQ ID NO: 3898 - DNA, 35 bp, Artificial Sequence
  Synthetic oligonucleotide
catggaatctttatcaggaatacgcagtattctag

SEQ ID NO: 3899 - DNA, 35 bp, Artificial Sequence
  Synthetic oligonucleotide
gatcctgtggggacatagttcctagcgggcccaag

SEQ ID NO: 3900 - DNA, 38 bp, Artificial Sequence
  Synthetic oligonucleotide
gcctagtcatacctactgatgagcttttccggctctga

SEQ ID NO: 3901 - DNA, 35 bp, Artificial Sequence
  Synthetic oligonucleotide
gcgtatcgactgaaaacttagtggtcgtgcaccaa

SEQ ID NO: 3902 - DNA, 36 bp, Artificial Sequence
  Synthetic oligonucleotide
taggatcatatccgcataagcaggctcagcgacaaa

SEQ ID NO: 3903 - DNA, 36 bp, Artificial Sequence
  Synthetic oligonucleotide
tgcggcaataacaccgagcaacgcattctaggtcaa

SEQ ID NO: 3904 - DNA, 36 bp, Artificial Sequence
  Synthetic oligonucleotide
tgttagtttgtacgagtagacatgattggattcgga

SEQ ID NO: 3905 - DNA, 35 bp, Artificial Sequence
  Synthetic oligonucleotide
actcctaggaggactgtggcgtagtgctcgcccct

SEQ ID NO: 3906 - DNA, 36 bp, Artificial Sequence
  Synthetic oligonucleotide
atcacggacgacttcgagagatacgtacgagtcaga

SEQ ID NO: 3907 - DNA, 36 bp, Artificial Sequence
  Synthetic oligonucleotide
taggagtagctttttcgaaacgtgttttttggctaa

SEQ ID NO: 3908 - DNA, 37 bp, Artificial Sequence
  Synthetic oligonucleotide
tccgtgctgggcaaaagggggcaggagccataaagga

SEQ ID NO: 3909 - DNA, 38 bp, Artificial Sequence
  Synthetic oligonucleotide
gaccgtcattaacatcgagaggggaggcatttggttga

SEQ ID NO: 3910 - DNA, 36 bp, Artificial Sequence
  Synthetic oligonucleotide
ggtacttacgtagcaaataacttgtctctagcgaga

SEQ ID NO: 3911 - DNA, 35 bp, Artificial Sequence
  Synthetic oligonucleotide
acgatactgggccggaattcacgacagcttattgc

SEQ ID NO: 3912 - DNA, 36 bp, Artificial Sequence
  Synthetic oligonucleotide
acgtcgaattagggacgcgctctcgcaccgcgggta

SEQ ID NO: 3913 - DNA, 38 bp, Artificial Sequence
  Synthetic oligonucleotide
acttgaaccaagttccctgactgtatctatgtgtttga

SEQ ID NO: 3914 - DNA, 37 bp, Artificial Sequence
  Synthetic oligonucleotide
agtcatgtttacgaatccattagaacccttatcagta

SEQ ID NO: 3915 - DNA, 36 bp, Artificial Sequence
  Synthetic oligonucleotide
ataatgccctgttggatattggtcggtcgacaatga

SEQ ID NO: 3916 - DNA, 36 bp, Artificial Sequence
  Synthetic oligonucleotide
gaccaccatcccgtctaccgcacttgagttctgaaa

SEQ ID NO: 3917 - DNA, 38 bp, Artificial Sequence
  Synthetic oligonucleotide
gactcgggatttccggggagaaggggttgcctgtctga

SEQ ID NO: 3918 - DNA, 37 bp, Artificial Sequence
  Synthetic oligonucleotide
gcaaacctcagaggcggttctgtaactgtataggcga

SEQ ID NO: 3919 - DNA, 37 bp, Artificial Sequence
  Synthetic oligonucleotide
gcacaatggtcccccggtacgtactcgggtccgtaga

SEQ ID NO: 3920 - DNA, 37 bp, Artificial Sequence
  Synthetic oligonucleotide
gcctttaaacgtggaatcaactgaaaagcccgctgga

SEQ ID NO: 3921 - DNA, 35 bp, Artificial Sequence
  Synthetic oligonucleotide
gcgctacggtccggggggagcaatgtatgggtccc

SEQ ID NO: 3922 - DNA, 38 bp, Artificial Sequence
  Synthetic oligonucleotide
ggacccttcgaatcgtgcaaggggtgtatgctgcatga

SEQ ID NO: 3923 - DNA, 37 bp, Artificial Sequence
  Synthetic oligonucleotide
ggagcgactggcagataaatgacgttgaaataaagga

SEQ ID NO: 3924 - DNA, 36 bp, Artificial Sequence
  Synthetic oligonucleotide
ggctctactaggcgtttcgtcatggtttcgcgtaga

SEQ ID NO: 3925 - DNA, 37 bp, Artificial Sequence
  Synthetic oligonucleotide
gtaagcctaggcgataccctgctggaccgggatggga

SEQ ID NO: 3926 - DNA, 36 bp, Artificial Sequence
  Synthetic oligonucleotide
gtagatcgagctgagaagatatcacgattacatgta

SEQ ID NO: 3927 - DNA, 35 bp, Artificial Sequence
  Synthetic oligonucleotide
gttactgggtaagtgcaatgtactgacctcctgta

SEQ ID NO: 3928 - DNA, 35 bp, Artificial Sequence
  Synthetic oligonucleotide
taatgcactgtattgcaatcgctatataaggtact

SEQ ID NO: 3929 - DNA, 37 bp, Artificial Sequence
  Synthetic oligonucleotide
tacgcgaaccgatgagcggaacgagttgatcgggcga

SEQ ID NO: 3930 - DNA, 35 bp, Artificial Sequence
  Synthetic oligonucleotide
tgctgcccgagtttagctatgcgggcatgttgaag

SEQ ID NO: 3931 - DNA, 35 bp, Artificial Sequence
  Synthetic oligonucleotide
tgtggttcactgcaatgtcgtgcgtaaagcccgcc

SEQ ID NO: 3932 - DNA, 35 bp, Artificial Sequence
  Synthetic oligonucleotide
ttcccgcggggcatttttcacgacggttcatgtgg

SEQ ID NO: 3933 - DNA, 38 bp, Artificial Sequence
  Synthetic oligonucleotide
tttgcctacagtgaaacgtctagtgggggatgttgtga

SEQ ID NO: 3934 - DNA, 37 bp, Artificial Sequence
  Synthetic oligonucleotide
aacgggacgctctgagtacctataatcgagcgggaga

SEQ ID NO: 3935 - DNA, 36 bp, Artificial Sequence
  Synthetic oligonucleotide
accttcgtaaggtaataccaagagtgtgggatctta

SEQ ID NO: 3936 - DNA, 35 bp, Artificial Sequence
  Synthetic oligonucleotide
atacgcttactgctatagaacgtaatgcgcccgtg

SEQ ID NO: 3937 - DNA, 35 bp, Artificial Sequence
  Synthetic oligonucleotide
cgtgccgtaatcgtagtattgctacgagggacgga

SEQ ID NO: 3938 - DNA, 37 bp, Artificial Sequence
  Synthetic oligonucleotide
gaagtgacgtgaattagtgcaatcaccacaataagga

SEQ ID NO: 3939 - DNA, 37 bp, Artificial Sequence
  Synthetic oligonucleotide
gagcgcaactggtagttggagcttcttttacgcatga

SEQ ID NO: 3940 - DNA, 36 bp, Artificial Sequence
  Synthetic oligonucleotide
gagcggggcgcacgagatgtacttcatagtctgcta

SEQ ID NO: 3941 - DNA, 36 bp, Artificial Sequence
  Synthetic oligonucleotide
ggaacgtattagaaagtcaattgagcgttataagca

SEQ ID NO: 3942 - DNA, 35 bp, Artificial Sequence
  Synthetic oligonucleotide
gggagaatccgggtcaaagacgtttggttgtgtga

SEQ ID NO: 3943 - DNA, 35 bp, Artificial Sequence
  Synthetic oligonucleotide
gtcgtaactgtgatgggcatgaatttgattaaact

SEQ ID NO: 3944 - DNA, 37 bp, Artificial Sequence
  Synthetic oligonucleotide
tggcccattcccaggttgaacaacccggtctgccgga

SEQ ID NO: 3945 - DNA, 35 bp, Artificial Sequence
  Synthetic oligonucleotide
ggatcccgtcccgctactgttatggtttcttcagt

SEQ ID NO: 3946 - DNA, 36 bp, Artificial Sequence
  Synthetic oligonucleotide
gtgggacttgagactggactaagtgctgataataaa

SEQ ID NO: 3947 - DNA, 35 bp, Artificial Sequence
  Synthetic oligonucleotide
aagtactgagggcggcatggtacataggatatatc

SEQ ID NO: 3948 - DNA, 35 bp, Artificial Sequence
  Synthetic oligonucleotide
aacatgaacgtatagttggttcactccaattggta

SEQ ID NO: 3949 - DNA, 36 bp, Artificial Sequence
  Synthetic oligonucleotide
aatctcagggggacctgacattcgtgtgcgtttgga

SEQ ID NO: 3950 - DNA, 38 bp, Artificial Sequence
  Synthetic oligonucleotide
atagcattttggccacttgcctaacatagttctactga

SEQ ID NO: 3951 - DNA, 37 bp, Artificial Sequence
  Synthetic oligonucleotide
ctaaggacgggtcctgagtgttgtctgtatcccccga

SEQ ID NO: 3952 - DNA, 35 bp, Artificial Sequence
  Synthetic oligonucleotide
gaatggagagtaggatagctatcctccgacatagg

SEQ ID NO: 3953 - DNA, 35 bp, Artificial Sequence
  Synthetic oligonucleotide
gatttcctatactgctggtctgggaataagtgagg

SEQ ID NO: 3954 - DNA, 35 bp, Artificial Sequence
  Synthetic oligonucleotide
ggagtatcctagctggcttgagctcagggtgcggt

SEQ ID NO: 3955 - DNA, 35 bp, Artificial Sequence
  Synthetic oligonucleotide
ggttggttcacgagctggccatggaggtgctacag

SEQ ID NO: 3956 - DNA, 36 bp, Artificial Sequence
  Synthetic oligonucleotide
acgcaatcacgcattgtatagcgaacctctgtggga

SEQ ID NO: 3957 - DNA, 37 bp, Artificial Sequence
  Synthetic oligonucleotide
agcgatcgtgagatgtaccttagcagcatggcctaga

SEQ ID NO: 3958 - DNA, 37 bp, Artificial Sequence
  Synthetic oligonucleotide
agtggttcgggagtaatcagagagctgctggtggtga

SEQ ID NO: 3959 - DNA, 35 bp, Artificial Sequence
  Synthetic oligonucleotide
gcgaaccagtctcgctcggcctgccgaacgatatc

SEQ ID NO: 3960 - DNA, 36 bp, Artificial Sequence
  Synthetic oligonucleotide
ggacgttggacattcgcgtactggagaagcctacca

SEQ ID NO: 3961 - DNA, 37 bp, Artificial Sequence
  Synthetic oligonucleotide
tactcggttgacctcagggtcctggttcaacctatga

SEQ ID NO: 3962 - DNA, 35 bp, Artificial Sequence
  Synthetic oligonucleotide
tccgctagtagaagtcgaggtttatacacatggtc

SEQ ID NO: 3963 - DNA, 37 bp, Artificial Sequence
  Synthetic oligonucleotide
tttggcaaatcgcgagttagtcagaggtccgtaccga

SEQ ID NO: 3964 - DNA, 36 bp, Artificial Sequence
  Synthetic oligonucleotide
acgacacgagcttactttagttgtaggagacaacca

SEQ ID NO: 3965 - DNA, 38 bp, Artificial Sequence
  Synthetic oligonucleotide
atgtcccccctcctgcaggccctcatgaaaatatgtga

SEQ ID NO: 3966 - DNA, 35 bp, Artificial Sequence
  Synthetic oligonucleotide
acgctataagggcacgtggggttgcatcgaatttt

SEQ ID NO: 3967 - DNA, 37 bp, Artificial Sequence
  Synthetic oligonucleotide
gtgctcatcattgggctttaaagggttgggaaatgga

SEQ ID NO: 3968 - DNA, 37 bp, Artificial Sequence
  Synthetic oligonucleotide
tccgctcgccgggatacgtactgacatatggtagtga

SEQ ID NO: 3969 - DNA, 36 bp, Artificial Sequence
  Synthetic oligonucleotide
tgtgaagcactactgggtaaatggtaatcgacatga

SEQ ID NO: 3970 - DNA, 38 bp, Artificial Sequence
  Synthetic oligonucleotide
tgtgcaatgtagtcgccgggctatgttctttgcactga

SEQ ID NO: 3971 - DNA, 36 bp, Artificial Sequence
  Synthetic oligonucleotide
ttaccgcctggggtaaggaatctaaggaaggtgcga

SEQ ID NO: 3972 - DNA, 38 bp, Artificial Sequence
  Synthetic oligonucleotide
atacaatgacacggcacggagtcgtgtcgtgtaactga

SEQ ID NO: 3973 - DNA, 36 bp, Artificial Sequence
  Synthetic oligonucleotide
ccaaattcacaagctggcaatcctgggtgatccgta

SEQ ID NO: 3974 - DNA, 35 bp, Artificial Sequence
  Synthetic oligonucleotide
ccgtcgtggcacctaggggatttaaaagataaatt

SEQ ID NO: 3975 - DNA, 37 bp, Artificial Sequence
  Synthetic oligonucleotide
ctgagtcaaccctgagagggagatgagtaacgggcga

SEQ ID NO: 3976 - DNA, 36 bp, Artificial Sequence
  Synthetic oligonucleotide
gaattcgcacaaaggcattagaacttcgacgtacga

SEQ ID NO: 3977 - DNA, 37 bp, Artificial Sequence
  Synthetic oligonucleotide
gcatcacgccctgtcagattccgaaagatgggtatga

SEQ ID NO: 3978 - DNA, 37 bp, Artificial Sequence
  Synthetic oligonucleotide
ggaaccggttaaaatcgtgacttcaaagtgacgtaga

SEQ ID NO: 3979 - DNA, 36 bp, Artificial Sequence
  Synthetic oligonucleotide
tccgttcttagtggtctatctcagtcttgtgtgata

SEQ ID NO: 3980 - DNA, 37 bp, Artificial Sequence
  Synthetic oligonucleotide
tcctatgcagaaaggcctcaggggtcagatttacgga

SEQ ID NO: 3981 - DNA, 36 bp, Artificial Sequence
  Synthetic oligonucleotide
gctctgcggtgtaaatgatggggtactcctgacgca

SEQ ID NO: 3982 - DNA, 35 bp, Artificial Sequence
  Synthetic oligonucleotide
ggttcacctaggtactatttcgcaagtggtgtagt

SEQ ID NO: 3983 - DNA, 36 bp, Artificial Sequence
  Synthetic oligonucleotide
gtgtcccgcggtcagtgggaactatctttaggttta

SEQ ID NO: 3984 - DNA, 37 bp, Artificial Sequence
  Synthetic oligonucleotide
tactacacaccgccggggagtaacttacttttaaaga

SEQ ID NO: 3985 - DNA, 35 bp, Artificial Sequence
  Synthetic oligonucleotide
tcataaatggttgggccgaccctgtgaattttact

SEQ ID NO: 3986 - DNA, 35 bp, Artificial Sequence
  Synthetic oligonucleotide
tgcgccccacctttcaatgcgggtcatgattcccg

SEQ ID NO: 3987 - DNA, 35 bp, Artificial Sequence
  Synthetic oligonucleotide
tgtcacgcttgtgctgtggaaaaagggatatataa

SEQ ID NO: 3988 - DNA, 36 bp, Artificial Sequence
  Synthetic oligonucleotide
atttgacgaccaagtgttccgttgtcatgtccgaga

SEQ ID NO: 3989 - DNA, 37 bp, Artificial Sequence
  Synthetic oligonucleotide
taccaggttaggatgtaccagggtcatggggctttga

SEQ ID NO: 3990 - DNA, 36 bp, Artificial Sequence
  Synthetic oligonucleotide
acacggggcaatccatgacgtttacgccctccgata

SEQ ID NO: 3991 - DNA, 35 bp, Artificial Sequence
  Synthetic oligonucleotide
acgacacgcgtatgggagtataccatgagtatcgt

SEQ ID NO: 3992 - DNA, 36 bp, Artificial Sequence
  Synthetic oligonucleotide
agcgctaggggctggaggggggtctacaacatggta

SEQ ID NO: 3993 - DNA, 36 bp, Artificial Sequence
  Synthetic oligonucleotide
agggtcgtacgtcacgaatctgggattgattgtgca

SEQ ID NO: 3994 - DNA, 37 bp, Artificial Sequence
  Synthetic oligonucleotide
agtcttgtgtgttaacctagctttttgttgtaggcga

SEQ ID NO: 3995 - DNA, 38 bp, Artificial Sequence
  Synthetic oligonucleotide
gataagcgtaagtggtttttaatgcccgatgttcatga

SEQ ID NO: 3996 - DNA, 38 bp, Artificial Sequence
  Synthetic oligonucleotide
gattgcaccaccgcatttaaccaagtgctcacgaatga

SEQ ID NO: 3997 - DNA, 36 bp, Artificial Sequence
  Synthetic oligonucleotide
gcttcttgggtctggtaccatcgcctctcagtgaga

SEQ ID NO: 3998 - DNA, 38 bp, Artificial Sequence
  Synthetic oligonucleotide
gtgatgtaccgacctgttaatatcatccgtttttttga

SEQ ID NO: 3999 - DNA, 37 bp, Artificial Sequence
  Synthetic oligonucleotide
tagactctaggttggactagccgtgctgagggtgcga

SEQ ID NO: 4000 - DNA, 37 bp, Artificial Sequence
  Synthetic oligonucleotide
taggagcatgcctgccagtgtatgtactacgtgctga

SEQ ID NO: 4001 - DNA, 35 bp, Artificial Sequence
  Synthetic oligonucleotide
taggggcttgtgcgcggtgcggatttcgagcgtac

SEQ ID NO: 4002 - DNA, 37 bp, Artificial Sequence
  Synthetic oligonucleotide
aaacaggttgatccttgctcagatagtatggtatcga

SEQ ID NO: 4003 - DNA, 37 bp, Artificial Sequence
  Synthetic oligonucleotide
acccacggatcacgggctcagttgttatggtttttga

SEQ ID NO: 4004 - DNA, 35 bp, Artificial Sequence
  Synthetic oligonucleotide
attcaatccaaggcttactaggtgtgttagacgca

SEQ ID NO: 4005 - DNA, 38 bp, Artificial Sequence
  Synthetic oligonucleotide
gtcatggagtgttgcacacatataaggctttgaactga

SEQ ID NO: 4006 - DNA, 38 bp, Artificial Sequence
  Synthetic oligonucleotide
taggtgtgcctctgagtggccccataatccccctttga

SEQ ID NO: 4007 - DNA, 36 bp, Artificial Sequence
  Synthetic oligonucleotide
ttgaccattcttacaatgaaggagggtacaaaacta

SEQ ID NO: 4008 - DNA, 35 bp, Artificial Sequence
  Synthetic oligonucleotide
ccagagaagctatctttgttctatgcgttggaggg

SEQ ID NO: 4009 - DNA, 35 bp, Artificial Sequence
  Synthetic oligonucleotide
aaggtcgcccgcccgaggagtgggattcagtaact

SEQ ID NO: 4010 - DNA, 35 bp, Artificial Sequence
  Synthetic oligonucleotide
taagtccgggcgcagtcctggtaagggttatcgta

SEQ ID NO: 4011 - DNA, 38 bp, Artificial Sequence
  Synthetic oligonucleotide
tcaccgttctcgactcacatgggagtccgcagtactga

SEQ ID NO: 4012 - DNA, 35 bp, Artificial Sequence
  Synthetic oligonucleotide
acgcggctctcccttggagtacgtatctggttgag

SEQ ID NO: 4013 - DNA, 35 bp, Artificial Sequence
  Synthetic oligonucleotide
atacactgagtagcaattggctactgggcgacgcg

SEQ ID NO: 4014 - DNA, 37 bp, Artificial Sequence
  Synthetic oligonucleotide
atgtgattgcaaagcctgattatcgcgacgagtgcga

SEQ ID NO: 4015 - DNA, 37 bp, Artificial Sequence
  Synthetic oligonucleotide
attagcactgggccccgcctggggatttcgctaccga

SEQ ID NO: 4016 - DNA, 38 bp, Artificial Sequence
  Synthetic oligonucleotide
gaaaagggacaatgactatgcgcggatagctgtattga

SEQ ID NO: 4017 - DNA, 36 bp, Artificial Sequence
  Synthetic oligonucleotide
gacaaaggatggaggatgggtagtaaatggtctgca

SEQ ID NO: 4018 - DNA, 38 bp, Artificial Sequence
  Synthetic oligonucleotide
gaggaagttaacagttgggtgagaaattgagtcattga

SEQ ID NO: 4019 - DNA, 35 bp, Artificial Sequence
  Synthetic oligonucleotide
gctttcgtaatggagctatacaattggtgatagta

SEQ ID NO: 4020 - DNA, 36 bp, Artificial Sequence
  Synthetic oligonucleotide
ggattatccttttccgtcgccaatgcgggctttgga

SEQ ID NO: 4021 - DNA, 37 bp, Artificial Sequence
  Synthetic oligonucleotide
gtcatgttcccaccaaccttgttcggttattaatcga

SEQ ID NO: 4022 - DNA, 36 bp, Artificial Sequence
  Synthetic oligonucleotide
gtttgtcctaccggatgccagagacgtgggtcacaa

SEQ ID NO: 4023 - DNA, 38 bp, Artificial Sequence
  Synthetic oligonucleotide
tagtgcacgatattagcgtgtttaagtactttatatga

SEQ ID NO: 4024 - DNA, 36 bp, Artificial Sequence
  Synthetic oligonucleotide
tgcagttaacagctgattctttttaatgcggtccga

SEQ ID NO: 4025 - DNA, 36 bp, Artificial Sequence
  Synthetic oligonucleotide
tgcatggtctagtcacatgggaatgatgtcacgaaa

SEQ ID NO: 4026 - DNA, 35 bp, Artificial Sequence
  Synthetic oligonucleotide
tggtgggttagaactttggtggggtcgctttctgc

SEQ ID NO: 4027 - DNA, 36 bp, Artificial Sequence
  Synthetic oligonucleotide
tgtttggtctgttagatcagatcggcatgaatgaca

SEQ ID NO: 4028 - DNA, 37 bp, Artificial Sequence
  Synthetic oligonucleotide
ttgcggtccgttgctaacgtcatctgcacgatacaga

SEQ ID NO: 4029 - DNA, 35 bp, Artificial Sequence
  Synthetic oligonucleotide
aaccctcaagggtggaggaacgtacgcaagattgc

SEQ ID NO: 4030 - DNA, 35 bp, Artificial Sequence
  Synthetic oligonucleotide
aaagccaagctgatcacgctactgatagtctgaac

SEQ ID NO: 4031 - DNA, 35 bp, Artificial Sequence
  Synthetic oligonucleotide
aagggctgtaaggaatcacgcgagtacttagggga

SEQ ID NO: 4032 - DNA, 36 bp, Artificial Sequence
  Synthetic oligonucleotide
acccacgggtagatggatgcgaccattacggggaca

SEQ ID NO: 4033 - DNA, 35 bp, Artificial Sequence
  Synthetic oligonucleotide
acgtgagtagcgactggagtcaccaaagatgcgct

SEQ ID NO: 4034 - DNA, 38 bp, Artificial Sequence
  Synthetic oligonucleotide
atccgggccgtgctggtgctttgcccgagcaaaactga

SEQ ID NO: 4035 - DNA, 36 bp, Artificial Sequence
  Synthetic oligonucleotide
ccggaaacgtgtgctcatcggaactggaccgggcga

SEQ ID NO: 4036 - DNA, 36 bp, Artificial Sequence
  Synthetic oligonucleotide
gacttggacctaatataattcaaccacgggcctgta

SEQ ID NO: 4037 - DNA, 38 bp, Artificial Sequence
  Synthetic oligonucleotide
gatgtaacgggtacagcgtgttgagtgaaattctctga

SEQ ID NO: 4038 - DNA, 36 bp, Artificial Sequence
  Synthetic oligonucleotide
gcactcatcgaattgggcgctctccttcacatgcga

SEQ ID NO: 4039 - DNA, 38 bp, Artificial Sequence
  Synthetic oligonucleotide
gctgggtacacgatgcgtgatcaggaaaaccggtgtga

SEQ ID NO: 4040 - DNA, 36 bp, Artificial Sequence
  Synthetic oligonucleotide
gtgtcatcaccatacttgttccacgctcaggtataa

SEQ ID NO: 4041 - DNA, 36 bp, Artificial Sequence
  Synthetic oligonucleotide
tgctgtcatggggcctaagactcgggtatcaccgga

SEQ ID NO: 4042 - DNA, 37 bp, Artificial Sequence
  Synthetic oligonucleotide
tggtggtttatggtagataacagggacagtccgagga

SEQ ID NO: 4043 - DNA, 38 bp, Artificial Sequence
  Synthetic oligonucleotide
ttagagcctgttaccgggggacgagaatagggcgatga

SEQ ID NO: 4044 - DNA, 38 bp, Artificial Sequence
  Synthetic oligonucleotide
taacggaaaagatagcaatgtagtgaaatagtacttga

SEQ ID NO: 4045 - DNA, 36 bp, Artificial Sequence
  Synthetic oligonucleotide
acccgggcgcacgtacaggggacagggtgaagggaa

SEQ ID NO: 4046 - DNA, 37 bp, Artificial Sequence
  Synthetic oligonucleotide
gcggacgaataggggactaccgaggcattggactcga

SEQ ID NO: 4047 - DNA, 37 bp, Artificial Sequence
  Synthetic oligonucleotide
ttcctgcgtactacatcacaagcggtgtatgtcaaga

SEQ ID NO: 4048 - DNA, 35 bp, Artificial Sequence
  Synthetic oligonucleotide
aaagttgtactcgcaatcagtgctataggtgccat

SEQ ID NO: 4049 - DNA, 35 bp, Artificial Sequence
  Synthetic oligonucleotide
gagactgtaaattcctaaaggcgttcgtacgcacg

SEQ ID NO: 4050 - DNA, 37 bp, Artificial Sequence
  Synthetic oligonucleotide
gtgttcggttggttagtggtaattgaacactcaaaga

SEQ ID NO: 4051 - DNA, 38 bp, Artificial Sequence
  Synthetic oligonucleotide
taagcgtagctaggagacctgtctgcaggttaagttga

SEQ ID NO: 4052 - DNA, 35 bp, Artificial Sequence
  Synthetic oligonucleotide
tacaaaacggtcgaagtttgcggaggtgtatttga

SEQ ID NO: 4053 - DNA, 38 bp, Artificial Sequence
  Synthetic oligonucleotide
agcaattggacatcgaacgcaggcattttagggtatga

SEQ ID NO: 4054 - DNA, 36 bp, Artificial Sequence
  Synthetic oligonucleotide
gtttgcgcctagagctggctcaggaagactttcaaa

SEQ ID NO: 4055 - DNA, 37 bp, Artificial Sequence
  Synthetic oligonucleotide
tcccatccaacatgcaggtttaaagcgttcacgacga

SEQ ID NO: 4056 - DNA, 37 bp, Artificial Sequence
  Synthetic oligonucleotide
tctatggtaggtccaataccggtcctattacggtgga

SEQ ID NO: 4057 - DNA, 37 bp, Artificial Sequence
  Synthetic oligonucleotide
gacagcccgtatagcaagcaagtcatccaggaacaga

SEQ ID NO: 4058 - DNA, 36 bp, Artificial Sequence
  Synthetic oligonucleotide
ggcacagcatggtcactctggagcatgaacaagaca

SEQ ID NO: 4059 - DNA, 36 bp, Artificial Sequence
  Synthetic oligonucleotide
ggttaacctaagtcacgtttaagaggtagcctgcga

SEQ ID NO: 4060 - DNA, 36 bp, Artificial Sequence
  Synthetic oligonucleotide
gcgggcgggaatcaagaattctaacgcaattctgta

SEQ ID NO: 4061 - DNA, 38 bp, Artificial Sequence
  Synthetic oligonucleotide
aatagccggtgtctaacgactgcaggtggatagggtga

SEQ ID NO: 4062 - DNA, 35 bp, Artificial Sequence
  Synthetic oligonucleotide
aattgatcgcggatccgtacagctcagccgagttt

SEQ ID NO: 4063 - DNA, 35 bp, Artificial Sequence
  Synthetic oligonucleotide
acttgcaaccaagtaaggtcctagtaaccgcattg

SEQ ID NO: 4064 - DNA, 36 bp, Artificial Sequence
  Synthetic oligonucleotide
agacaatgggtagtaattgtctgggtaaggattgca

SEQ ID NO: 4065 - DNA, 35 bp, Artificial Sequence
  Synthetic oligonucleotide
ctattcgcaacactgcgtcacgaaatgaactgaaa

SEQ ID NO: 4066 - DNA, 36 bp, Artificial Sequence
  Synthetic oligonucleotide
ctattgccctttgagcatccacactttgtctctgga

SEQ ID NO: 4067 - DNA, 37 bp, Artificial Sequence
  Synthetic oligonucleotide
gaacatgcgatactacgaaccagaatcgggttcttga

SEQ ID NO: 4068 - DNA, 35 bp, Artificial Sequence
  Synthetic oligonucleotide
gcgttgtaaagacgcgcggggattaaatgggtagt

SEQ ID NO: 4069 - DNA, 38 bp, Artificial Sequence
  Synthetic oligonucleotide
ggtgcttgttagggtacctacagcacgcatccgggtga

SEQ ID NO: 4070 - DNA, 37 bp, Artificial Sequence
  Synthetic oligonucleotide
tacaggttggttgggcggttaatctatatccgcgtga

SEQ ID NO: 4071 - DNA, 35 bp, Artificial Sequence
  Synthetic oligonucleotide
tactgacacactgctatgatgggtgtttacatagg

SEQ ID NO: 4072 - DNA, 38 bp, Artificial Sequence
  Synthetic oligonucleotide
tccctggtgatagatgaatgcctattaaagggtcctga

SEQ ID NO: 4073 - DNA, 35 bp, Artificial Sequence
  Synthetic oligonucleotide
tgaccccctcgttgtcgagcttgctagatcgaatt

SEQ ID NO: 4074 - DNA, 38 bp, Artificial Sequence
  Synthetic oligonucleotide
tgccaccgtatactgccaagcgagggcgaagtgattga

SEQ ID NO: 4075 - DNA, 37 bp, Artificial Sequence
  Synthetic oligonucleotide
ttagccggggggaaatgatgtgggcaacgagaagtga

SEQ ID NO: 4076 - DNA, 37 bp, Artificial Sequence
  Synthetic oligonucleotide
ttcgtgaggcgtagtagacaggagatcttggttggga

SEQ ID NO: 4077 - DNA, 35 bp, Artificial Sequence
  Synthetic oligonucleotide
agcagtcagaaaaccattgttggctcccccggatc

SEQ ID NO: 4078 - DNA, 35 bp, Artificial Sequence
  Synthetic oligonucleotide
atacaagtctagttgatatgtcttggggtgcctca

SEQ ID NO: 4079 - DNA, 36 bp, Artificial Sequence
  Synthetic oligonucleotide
attgcgtaatagtattgcggagactccacgacgata

SEQ ID NO: 4080 - DNA, 37 bp, Artificial Sequence
  Synthetic oligonucleotide
ccacctcgggcggtctgcagggcttgtgctgttccga

SEQ ID NO: 4081 - DNA, 36 bp, Artificial Sequence
  Synthetic oligonucleotide
cttacgggtaaactgtttcagggtggtacccatcga

SEQ ID NO: 4082 - DNA, 38 bp, Artificial Sequence
  Synthetic oligonucleotide
gattcatcccggaccgctagcaatgcctgatatgctga

SEQ ID NO: 4083 - DNA, 35 bp, Artificial Sequence
  Synthetic oligonucleotide
gcgcccgttttgccatgtcaaaacacgatatacac

SEQ ID NO: 4084 - DNA, 38 bp, Artificial Sequence
  Synthetic oligonucleotide
gtaagcgggcctatgttgacttcatacgactggagtga

SEQ ID NO: 4085 - DNA, 35 bp, Artificial Sequence
  Synthetic oligonucleotide
taagcctgatgcttagtgggtggataggttcgtgt

SEQ ID NO: 4086 - DNA, 35 bp, Artificial Sequence
  Synthetic oligonucleotide
tactaggtcaaggtggagataaaaccagttccttt

SEQ ID NO: 4087 - DNA, 36 bp, Artificial Sequence
  Synthetic oligonucleotide
tcgtatggctgtcaatgtaacttcttaatatctgga

SEQ ID NO: 4088 - DNA, 35 bp, Artificial Sequence
  Synthetic oligonucleotide
ttccatatgtcgtgccgagggtatcttactgatag

SEQ ID NO: 4089 - DNA, 35 bp, Artificial Sequence
  Synthetic oligonucleotide
tttgtacaaacacacaagcgaggatataggctgtc

SEQ ID NO: 4090 - DNA, 37 bp, Artificial Sequence
  Synthetic oligonucleotide
ccgaatttgtagctagatagtaatatagcacggccga

SEQ ID NO: 4091 - DNA, 35 bp, Artificial Sequence
  Synthetic oligonucleotide
gatctagtaccttctttcaaggtttattagaggtc

SEQ ID NO: 4092 - DNA, 37 bp, Artificial Sequence
  Synthetic oligonucleotide
gctacccccagctgctaacgtgcgttagcgactacga

SEQ ID NO: 4093 - DNA, 36 bp, Artificial Sequence
  Synthetic oligonucleotide
gtcttagctcctgaagatcccagacttcagggagta

SEQ ID NO: 4094 - DNA, 37 bp, Artificial Sequence
  Synthetic oligonucleotide
taaccacgtcggttgtcccctcgatatcccgtagaga

SEQ ID NO: 4095 - DNA, 35 bp, Artificial Sequence
  Synthetic oligonucleotide
taccgcttatcaaacagttaccctcccggtgggca

SEQ ID NO: 4096 - DNA, 37 bp, Artificial Sequence
  Synthetic oligonucleotide
taattccgcggtgagaggggcactgggtcaaaaacga

SEQ ID NO: 4097 - DNA, 37 bp, Artificial Sequence
  Synthetic oligonucleotide
actgcctccacgagataaggcctgaaaggaatgccga

SEQ ID NO: 4098 - DNA, 36 bp, Artificial Sequence
  Synthetic oligonucleotide
tgttgttgtaaaccctggtattaggtgtccctcgta

SEQ ID NO: 4099 - DNA, 36 bp, Artificial Sequence
  Synthetic oligonucleotide
tttagacgagacgggcatagctgattatttcgacta

SEQ ID NO: 4100 - DNA, 37 bp, Artificial Sequence
  Synthetic oligonucleotide
tttgggtgtagtagcatccagacaattagggattaga

SEQ ID NO: 4101 - DNA, 35 bp, Artificial Sequence
  Synthetic oligonucleotide
tccgtaccgatctaggtttgagaaacgacgcttag

SEQ ID NO: 4102 - DNA, 37 bp, Artificial Sequence
  Synthetic oligonucleotide
aatactagtcgtaccgcaggctggagtgggtcaaaga

SEQ ID NO: 4103 - DNA, 35 bp, Artificial Sequence
  Synthetic oligonucleotide
gtatggttcgccggagcctcgcgcgagaggcatgg

SEQ ID NO: 4104 - DNA, 37 bp, Artificial Sequence
  Synthetic oligonucleotide
aaatagcgcgtgccaggctccctttctaggataacga

SEQ ID NO: 4105 - DNA, 37 bp, Artificial Sequence
  Synthetic oligonucleotide
aaccggctcggttcgtaccaatgtttggaagcttaga

SEQ ID NO: 4106 - DNA, 37 bp, Artificial Sequence
  Synthetic oligonucleotide
aacgggatagagatatctatgggtgctagataccaga

SEQ ID NO: 4107 - DNA, 37 bp, Artificial Sequence
  Synthetic oligonucleotide
aagcaaatatgctttgactcgctgtattaaagctgga

SEQ ID NO: 4108 - DNA, 35 bp, Artificial Sequence
  Synthetic oligonucleotide
acaggtcctcatgttcgtaaagtcaatcacctggg

SEQ ID NO: 4109 - DNA, 37 bp, Artificial Sequence
  Synthetic oligonucleotide
agggcactcatgaatgggtcggaagtttcttttcaga

SEQ ID NO: 4110 - DNA, 35 bp, Artificial Sequence
  Synthetic oligonucleotide
aggttatggaattgtaccttactgggggagagcaa

SEQ ID NO: 4111 - DNA, 36 bp, Artificial Sequence
  Synthetic oligonucleotide
agtacacgtctggttggccatagagtgaaccgtgga

SEQ ID NO: 4112 - DNA, 38 bp, Artificial Sequence
  Synthetic oligonucleotide
agtgaagtaatcgttatggtgttttgaagtgcccctga

SEQ ID NO: 4113 - DNA, 35 bp, Artificial Sequence
  Synthetic oligonucleotide
agtgcctgaacatacgacgactaatctccgcgagg

SEQ ID NO: 4114 - DNA, 37 bp, Artificial Sequence
  Synthetic oligonucleotide
agttcatgactcgtacacaattttaagagcgaacaga

SEQ ID NO: 4115 - DNA, 37 bp, Artificial Sequence
  Synthetic oligonucleotide
attgtctgagtttggaaagctgagttccgaatcgcga

SEQ ID NO: 4116 - DNA, 36 bp, Artificial Sequence
  Synthetic oligonucleotide
ccatcggtcgcccgatggatccgtatccggttgaga

SEQ ID NO: 4117 - DNA, 37 bp, Artificial Sequence
  Synthetic oligonucleotide
cccacggtctgggacggtggatgactaagtcaaggga

SEQ ID NO: 4118 - DNA, 37 bp, Artificial Sequence
  Synthetic oligonucleotide
cccccggttaggctagcactccacgtatggatgcgga

SEQ ID NO: 4119 - DNA, 37 bp, Artificial Sequence
  Synthetic oligonucleotide
ctccggacggaggtgagagtcgtgtctctaagtgcga

SEQ ID NO: 4120 - DNA, 35 bp, Artificial Sequence
  Synthetic oligonucleotide
gaaaccacgctaaagtcgtccctgttccgcgagga

SEQ ID NO: 4121 - DNA, 38 bp, Artificial Sequence
  Synthetic oligonucleotide
gaagggacaccgggtggatgaaaaggagtagagcgtga

SEQ ID NO: 4122 - DNA, 38 bp, Artificial Sequence
  Synthetic oligonucleotide
gacattggtgtgccggggacaccacagatgcgttctga

SEQ ID NO: 4123 - DNA, 37 bp, Artificial Sequence
  Synthetic oligonucleotide
gaccttcgcactggcacagtttgcggaaaatattgga

SEQ ID NO: 4124 - DNA, 35 bp, Artificial Sequence
  Synthetic oligonucleotide
gacgccacgtggaaaccaggtatatgcgggcggac

SEQ ID NO: 4125 - DNA, 36 bp, Artificial Sequence
  Synthetic oligonucleotide
gacgccgcttacgttgtctggcgggtccatgtgata

SEQ ID NO: 4126 - DNA, 37 bp, Artificial Sequence
  Synthetic oligonucleotide
gatgcggtgtatactgctggagcggacgcacttcaga

SEQ ID NO: 4127 - DNA, 37 bp, Artificial Sequence
  Synthetic oligonucleotide
gcgccttgacgtcaggcctctagtattgggcaaggga

SEQ ID NO: 4128 - DNA, 38 bp, Artificial Sequence
  Synthetic oligonucleotide
gctcagcgcagcactgctaccggtaagttggactttga

SEQ ID NO: 4129 - DNA, 37 bp, Artificial Sequence
  Synthetic oligonucleotide
gctggtagatgtagtgtttcttattagtgttgtctga

SEQ ID NO: 4130 - DNA, 37 bp, Artificial Sequence
  Synthetic oligonucleotide
ggtaggtgctcgagttcaatgtgtgttacccttacga

SEQ ID NO: 4131 - DNA, 36 bp, Artificial Sequence
  Synthetic oligonucleotide
ggtcgcaaattgtccggttggtgggacctgaagtaa

SEQ ID NO: 4132 - DNA, 35 bp, Artificial Sequence
  Synthetic oligonucleotide
gtcacagggaaggtgcaatattactacaggactgc

SEQ ID NO: 4133 - DNA, 37 bp, Artificial Sequence
  Synthetic oligonucleotide
gtcccacccaccgtcaccgttgaaatgcctatggcga

SEQ ID NO: 4134 - DNA, 35 bp, Artificial Sequence
  Synthetic oligonucleotide
gtcctgtgcgcgtgtaaacagaggcataggcgctc

SEQ ID NO: 4135 - DNA, 35 bp, Artificial Sequence
  Synthetic oligonucleotide
gtgacttatacgggtaacgctgtagttgccaccgc

SEQ ID NO: 4136 - DNA, 36 bp, Artificial Sequence
  Synthetic oligonucleotide
gttctgggactaggatgcacttagagcgacgcgcta

SEQ ID NO: 4137 - DNA, 35 bp, Artificial Sequence
  Synthetic oligonucleotide
taaatgagcactataagtgcatttttgtctgtgta

SEQ ID NO: 4138 - DNA, 36 bp, Artificial Sequence
  Synthetic oligonucleotide
taagtacacgcaaatgtcatcggggccctacgagaa

SEQ ID NO: 4139 - DNA, 35 bp, Artificial Sequence
  Synthetic oligonucleotide
tacattttaggtcactgtagcatatgtacagacta

SEQ ID NO: 4140 - DNA, 38 bp, Artificial Sequence
  Synthetic oligonucleotide
tagccaagttggcagacagtactggcttctgtgagtga

SEQ ID NO: 4141 - DNA, 36 bp, Artificial Sequence
  Synthetic oligonucleotide
tattcgcacccttacactctctctttgtttgcggta

SEQ ID NO: 4142 - DNA, 35 bp, Artificial Sequence
  Synthetic oligonucleotide
tgacacaggaggtgtgtaaggtagaccgaccggat

SEQ ID NO: 4143 - DNA, 36 bp, Artificial Sequence
  Synthetic oligonucleotide
tgactgacagttagtgtaaggcaaaaccagaataaa

SEQ ID NO: 4144 - DNA, 36 bp, Artificial Sequence
  Synthetic oligonucleotide
tgcgtcatgtcgatgggatcaggtctgggagtaaga

SEQ ID NO: 4145 - DNA, 37 bp, Artificial Sequence
  Synthetic oligonucleotide
tggtgctgctgattcaaaaggagtctcccaagggcga

SEQ ID NO: 4146 - DNA, 37 bp, Artificial Sequence
  Synthetic oligonucleotide
tgtactaggtgaaccgcacctacttgggattagcgga

SEQ ID NO: 4147 - DNA, 36 bp, Artificial Sequence
  Synthetic oligonucleotide
ttacccatgtgcgacatgttaggcgagattagcgga

SEQ ID NO: 4148 - DNA, 38 bp, Artificial Sequence
  Synthetic oligonucleotide
ttcagggcacgggaaaatgttcccaaattccacggtga

SEQ ID NO: 4149 - DNA, 38 bp, Artificial Sequence
  Synthetic oligonucleotide
ttcccaggtctcgttctgaagtacggttcacgtgttga

SEQ ID NO: 4150 - DNA, 38 bp, Artificial Sequence
  Synthetic oligonucleotide
ttgaaaatcctctcgactgttagccacgccaggaatga

SEQ ID NO: 4151 - DNA, 35 bp, Artificial Sequence
  Synthetic oligonucleotide
tttaggaccgggaacgattagtaccgggcctacaa

SEQ ID NO: 4152 - DNA, 37 bp, Artificial Sequence
  Synthetic oligonucleotide
tttagggactggagcataggtagatgttgaacgcaga

SEQ ID NO: 4153 - DNA, 32 bp, Artificial Sequence
  Synthetic oligonucleotide
tttcacagtctgccatttgacgggtcgacgtt

SEQ ID NO: 4154 - DNA, 35 bp, Artificial Sequence
  Synthetic oligonucleotide
gtcatccgagcacgcaaacgctcggcctacgccta

SEQ ID NO: 4155 - DNA, 38 bp, Artificial Sequence; identical to SEQ ID NO: 1243
  Synthetic oligonucleotide

SEQ ID NO: 4156 - DNA, 37 bp, Artificial Sequence
  Synthetic oligonucleotide
gaaaggtgcgcggtatttacgttggcaaattgggtga

SEQ ID NO: 4157 - DNA, 35 bp, Artificial Sequence
  Synthetic oligonucleotide
gtcgccatgtaatcggttaagtgtagcgtgtattt

SEQ ID NO: 4158 - DNA, 38 bp, Artificial Sequence
  Synthetic oligonucleotide
tatcggcccgccttgggaccggaatggaataacctgga

SEQ ID NO: 4159 - DNA, 36 bp, Artificial Sequence
  Synthetic oligonucleotide
aagagcaaaatgatgtagtcatatgttactgaccaa

SEQ ID NO: 4160 - DNA, 37 bp, Artificial Sequence
  Synthetic oligonucleotide
tatgtcaaccctcgacccaatgggtcatctcgcacga

SEQ ID NO: 4161 - DNA, 37 bp, Artificial Sequence
  Synthetic oligonucleotide
tcacaatcccgacatgttaaaggcataacagctatga

SEQ ID NO: 4162 - DNA, 35 bp, Artificial Sequence
  Synthetic oligonucleotide
aaccctccgacagtggacgctaattgcactatagg

SEQ ID NO: 4163 - DNA, 37 bp, Artificial Sequence
  Synthetic oligonucleotide
atactgagtctggggttgtcgccccgagtgctcctga

SEQ ID NO: 4164 - DNA, 35 bp, Artificial Sequence
  Synthetic oligonucleotide
attatgggttggggttcccgccggattgtgtttca

SEQ ID NO: 4165 - DNA, 38 bp, Artificial Sequence
  Synthetic oligonucleotide
gcactgtaagaattttaagatgggatatggccagatga

SEQ ID NO: 4166 - DNA, 38 bp, Artificial Sequence
  Synthetic oligonucleotide
gtcccgtcacagtacgtgcatgtgcgccgggaacatga

SEQ ID NO: 4167 - DNA, 35 bp, Artificial Sequence
  Synthetic oligonucleotide
agagacgacatgaacgaggtgagacgcatgggatc

SEQ ID NO: 4168 - DNA, 36 bp, Artificial Sequence
  Synthetic oligonucleotide
atgggactcattacccatttccaagacagttgggta

SEQ ID NO: 4169 - DNA, 36 bp, Artificial Sequence
  Synthetic oligonucleotide
atttgtccttggcaaacatcctattcatgatggtca

SEQ ID NO: 4170 - DNA, 36 bp, Artificial Sequence
  Synthetic oligonucleotide
gcgggatgggagctgaccagagagctgcaggaaata

SEQ ID NO: 4171 - DNA, 37 bp, Artificial Sequence
  Synthetic oligonucleotide
gtctccagtagtatctgggacgattcatgtatttgga

SEQ ID NO: 4172 - DNA, 35 bp, Artificial Sequence
  Synthetic oligonucleotide
tactggacgggattggtctaatgtcacgcgtgtta

SEQ ID NO: 4173 - DNA, 36 bp, Artificial Sequence
  Synthetic oligonucleotide
ttctgccagtcatccaagtcatgggaacatgcgata

SEQ ID NO: 4174 - DNA, 36 bp, Artificial Sequence
  Synthetic oligonucleotide
agtcacatcaacacgggttgactgggatagttccaa

SEQ ID NO: 4175 - DNA, 36 bp, Artificial Sequence
  Synthetic oligonucleotide
atacattggtcgcattggatcggtatgtgacaggta

SEQ ID NO: 4176 - DNA, 35 bp, Artificial Sequence
  Synthetic oligonucleotide
cctagaaaacagccttttttgggaatgcttgcggt

SEQ ID NO: 4177 - DNA, 38 bp, Artificial Sequence
  Synthetic oligonucleotide
gcgccgagccatcctataccgtcctagtgtatcaatga

SEQ ID NO: 4178 - DNA, 35 bp, Artificial Sequence
  Synthetic oligonucleotide
gtaaaagcgggatgcgattttggtattttatgacg

SEQ ID NO: 4179 - DNA, 35 bp, Artificial Sequence
  Synthetic oligonucleotide
gtccgcaggtgaacatcggaatcgaacgacacacg

SEQ ID NO: 4180 - DNA, 38 bp, Artificial Sequence
  Synthetic oligonucleotide
tctaccaccgaggagaatacgcgcccagtccttgttga

SEQ ID NO: 4181 - DNA, 35 bp, Artificial Sequence
  Synthetic oligonucleotide
tgaacgtagccccccacgccgccacagttagtcgc

SEQ ID NO: 4182 - DNA, 38 bp, Artificial Sequence
  Synthetic oligonucleotide
gatggcgtagtctgcatgtatgaagttttgaggggtga

SEQ ID NO: 4183 - DNA, 36 bp, Artificial Sequence
  Synthetic oligonucleotide
aagagactagctactgcgcgtgaggggtttcgtaga

SEQ ID NO: 4184 - DNA, 35 bp, Artificial Sequence
  Synthetic oligonucleotide
accgggtcaacaagccccggctaattacggctcac

SEQ ID NO: 4185 - DNA, 37 bp, Artificial Sequence
  Synthetic oligonucleotide
agaagcctgagagtcgtgaggggactctttctatcga

SEQ ID NO: 4186 - DNA, 37 bp, Artificial Sequence
  Synthetic oligonucleotide
agcccacggaaggggtacatgagccctgcgtttccga

SEQ ID NO: 4187 - DNA, 35 bp, Artificial Sequence
  Synthetic oligonucleotide
agcttcagtactgcgtatgtgctttgatgtcctaa

SEQ ID NO: 4188 - DNA, 35 bp, Artificial Sequence
  Synthetic oligonucleotide
cacctccactctagtggggagggacggctttgcgg

SEQ ID NO: 4189 - DNA, 36 bp, Artificial Sequence
  Synthetic oligonucleotide
gacgccatttaacgcgcacgatgctgatacgggcca

SEQ ID NO: 4190 - DNA, 37 bp, Artificial Sequence
  Synthetic oligonucleotide
gagtagtacactgtttttagtttccgtctccacggga

SEQ ID NO: 4191 - DNA, 36 bp, Artificial Sequence
  Synthetic oligonucleotide
gatacagcaacttgcaccggagcatgatggtgatta

SEQ ID NO: 4192 - DNA, 38 bp, Artificial Sequence
  Synthetic oligonucleotide
gccctcgcctcaggaggtatgacaaagaccggctctga

SEQ ID NO: 4193 - DNA, 37 bp, Artificial Sequence
  Synthetic oligonucleotide
gcgaatacatcggtgtatccattgcacatacctacga

SEQ ID NO: 4194 - DNA, 37 bp, Artificial Sequence
  Synthetic oligonucleotide
gcgccattggattgaacgattgtccctaaaacgggga

SEQ ID NO: 4195 - DNA, 35 bp, Artificial Sequence
  Synthetic oligonucleotide
ggcattgggacgatgtcaggggtaccatctgctag

SEQ ID NO: 4196 - DNA, 37 bp, Artificial Sequence
  Synthetic oligonucleotide
gtaaccaaattccgacaaaggagtaagtgggagtaga

SEQ ID NO: 4197 - DNA, 35 bp, Artificial Sequence
  Synthetic oligonucleotide
gtaatcaacaattattcaaaaggtcacgcacgaag

SEQ ID NO: 4198 - DNA, 36 bp, Artificial Sequence
  Synthetic oligonucleotide
ttagtgaccatatcgcccttacagctttagaggaca

SEQ ID NO: 4199 - DNA, 35 bp, Artificial Sequence
  Synthetic oligonucleotide
acacgattgagcccgtgtataccattgcggctctc

SEQ ID NO: 4200 - DNA, 35 bp, Artificial Sequence
  Synthetic oligonucleotide
acacgggtaaacggggactcttgctagggttcttt

SEQ ID NO: 4201 - DNA, 36 bp, Artificial Sequence
  Synthetic oligonucleotide
acgttcatgaaggatggtcatggctatgaggtgaga

SEQ ID NO: 4202 - DNA, 36 bp, Artificial Sequence
  Synthetic oligonucleotide
actgacacagagggcgtgtgttagaatcaataccaa

SEQ ID NO: 4203 - DNA, 38 bp, Artificial Sequence
  Synthetic oligonucleotide
agacgcgaaaccggagtcgcgaatccacaaatggttga

SEQ ID NO: 4204 - DNA, 36 bp, Artificial Sequence
  Synthetic oligonucleotide
atcgcggaacgagtcagctcgccatggcgggcggta

SEQ ID NO: 4205 - DNA, 38 bp, Artificial Sequence
  Synthetic oligonucleotide
cctgggattctcctagggtaggttactaggaccagtga

SEQ ID NO: 4206 - DNA, 38 bp, Artificial Sequence
  Synthetic oligonucleotide
gaagacttgctggccccgacgacattcccgtgaaatga

SEQ ID NO: 4207 - DNA, 38 bp, Artificial Sequence
  Synthetic oligonucleotide
gctatgttcctcgataaagagtgactgggatgtattga

SEQ ID NO: 4208 - DNA, 36 bp, Artificial Sequence
  Synthetic oligonucleotide
ggcacagccacggtgttctgtggactgtggcactta

SEQ ID NO: 4209 - DNA, 37 bp, Artificial Sequence
  Synthetic oligonucleotide
ggtggtggaagtgtctaccgttttgcgtacgtcgtga

SEQ ID NO: 4210 - DNA, 38 bp, Artificial Sequence
  Synthetic oligonucleotide
gtcccatgggggaccctagttcacatctgtctagttga

SEQ ID NO: 4211 - DNA, 36 bp, Artificial Sequence
  Synthetic oligonucleotide
gtgaaacacacaccagggaataagcaaggccagaaa

SEQ ID NO: 4212 - DNA, 36 bp, Artificial Sequence
  Synthetic oligonucleotide
gtgacatgtgggggtactgacaaagcgtaagcgcta

SEQ ID NO: 4213 - DNA, 35 bp, Artificial Sequence
  Synthetic oligonucleotide
gtggtcatttggttcaatggggagcccaggcgagg

SEQ ID NO: 4214 - DNA, 37 bp, Artificial Sequence
  Synthetic oligonucleotide
taactattgggaccgcaatcgtcgcgtgagaattgga

SEQ ID NO: 4215 - DNA, 35 bp, Artificial Sequence
  Synthetic oligonucleotide
tagcgaatcgtgtggaagccggatcgggggtttgc

SEQ ID NO: 4216 - DNA, 37 bp, Artificial Sequence
  Synthetic oligonucleotide
tagtttagaggagccttcacaaccgactgctttgcga

SEQ ID NO: 4217 - DNA, 36 bp, Artificial Sequence
  Synthetic oligonucleotide
tcaccaacctatgggcgggaatcgattggatctgta

SEQ ID NO: 4218 - DNA, 35 bp, Artificial Sequence
  Synthetic oligonucleotide
tcgggtatgatggaaggcggaaggggtaccactga

SEQ ID NO: 4219 - DNA, 35 bp, Artificial Sequence
  Synthetic oligonucleotide
ttcaacctgctgtcatcgttgagtaacgtttagcc

SEQ ID NO: 4220 - DNA, 37 bp, Artificial Sequence
  Synthetic oligonucleotide
taaatgcccgtctataagggacattttcgaaccgcga

SEQ ID NO: 4221 - DNA, 36 bp, Artificial Sequence
  Synthetic oligonucleotide
gtgctagatgcacactcctttgcgactgaactgtga

SEQ ID NO: 4222 - DNA, 34 bp, Artificial Sequence
  Synthetic oligonucleotide
gaacgacctgaatgtaaacaatggagactatgtg

SEQ ID NO: 4223 - DNA, 37 bp, Artificial Sequence
  Synthetic oligonucleotide
taatcaggtctcatcatccgaggtactgtctttgtga

SEQ ID NO: 4224 - DNA, 35 bp, Artificial Sequence
  Synthetic oligonucleotide
aagacgagctgtgttggcgtttggcggttttggat

SEQ ID NO: 4225 - DNA, 37 bp, Artificial Sequence
  Synthetic oligonucleotide
acacatgaccagaaatgcatagtcagtgtactcagga

SEQ ID NO: 4226 - DNA, 35 bp, Artificial Sequence
  Synthetic oligonucleotide
agcacggatcatccgaggatataagggccgtatag

SEQ ID NO: 4227 - DNA, 35 bp, Artificial Sequence
  Synthetic oligonucleotide
gaagtgctcttaagcacgatcaagatatgtggggt

SEQ ID NO: 4228 - DNA, 35 bp, Artificial Sequence
  Synthetic oligonucleotide
gacgtcatgagggatagtacatgaggtatggcttg

SEQ ID NO: 4229 - DNA, 36 bp, Artificial Sequence
  Synthetic oligonucleotide
gcagtacgggcaaatgcggtttccattgtattaaca

SEQ ID NO: 4230 - DNA, 35 bp, Artificial Sequence
  Synthetic oligonucleotide
tctattcttggttacggtaggtatacactcgttag

SEQ ID NO: 4231 - DNA, 38 bp, Artificial Sequence
  Synthetic oligonucleotide
actttgactccgaagtcaagcacgtcgcacccgtgtga

SEQ ID NO: 4232 - DNA, 36 bp, Artificial Sequence
  Synthetic oligonucleotide
cgtaccatgtctcacagacgagacggaacatgaata

SEQ ID NO: 4233 - DNA, 38 bp, Artificial Sequence
  Synthetic oligonucleotide
gaagtctccgctaatagcacgggtctgcaaacatgtga

SEQ ID NO: 4234 - DNA, 38 bp, Artificial Sequence
  Synthetic oligonucleotide
gcgaacggggcgcgcgtgtgcagtacccacggtattga

SEQ ID NO: 4235 - DNA, 36 bp, Artificial Sequence
  Synthetic oligonucleotide
gccgaggtatcccggggatgataggggtgaagggga

SEQ ID NO: 4236 - DNA, 37 bp, Artificial Sequence
  Synthetic oligonucleotide
ggggaccgcaatcaggttacattggtacggttacgga

SEQ ID NO: 4237 - DNA, 38 bp, Artificial Sequence
  Synthetic oligonucleotide
aacggacttcccggtacggccgcttgcaagaatcctga

SEQ ID NO: 4238 - DNA, 37 bp, Artificial Sequence
  Synthetic oligonucleotide
acattagggttgttcctggcttctccgcacacgctga

SEQ ID NO: 4239 - DNA, 37 bp, Artificial Sequence
  Synthetic oligonucleotide
agtcacaaaattgaaaccgtaagatcagatacaggga

SEQ ID NO: 4240 - DNA, 36 bp, Artificial Sequence
  Synthetic oligonucleotide
atagaccttcacggatggtgcgcgtggcacccaaaa

SEQ ID NO: 4241 - DNA, 36 bp, Artificial Sequence
  Synthetic oligonucleotide
atggaatgcacgcgcgccgtaggaggttgaccacca

SEQ ID NO: 4242 - DNA, 35 bp, Artificial Sequence
  Synthetic oligonucleotide
atttcgcggaaattagttctgtgacaggtatatct

SEQ ID NO: 4243 - DNA, 37 bp, Artificial Sequence
  Synthetic oligonucleotide
gcattctcgaaagtgcaccacgtatggttttgcatga

SEQ ID NO: 4244 - DNA, 35 bp, Artificial Sequence
  Synthetic oligonucleotide
tagtgttgacacaactcgctccgcgtatgttatga

SEQ ID NO: 4245 - DNA, 37 bp, Artificial Sequence
  Synthetic oligonucleotide
tccaacagtaaggggccagagcgatggttatcttcga

SEQ ID NO: 4246 - DNA, 37 bp, Artificial Sequence
  Synthetic oligonucleotide
tggctgctgacgggcgctaaattgaaaggtcggggga

SEQ ID NO: 4247 - DNA, 36 bp, Artificial Sequence
  Synthetic oligonucleotide
tttactcgccccgacattacctgtagtcttgaggaa

SEQ ID NO: 4248 - DNA, 36 bp, Artificial Sequence
  Synthetic oligonucleotide
tttggtgatgaattgctgagatgctaggaagccgta

SEQ ID NO: 4249 - DNA, 38 bp, Artificial Sequence
  Synthetic oligonucleotide
actgacgaccattaaggcgtcttgctatactgcggtga

SEQ ID NO: 4250 - DNA, 37 bp, Artificial Sequence
  Synthetic oligonucleotide
ccaacctcggtctatgtcgtggaataccggtcttgga

SEQ ID NO: 4251 - DNA, 37 bp, Artificial Sequence
  Synthetic oligonucleotide
cgttgattgcgaacgtacagctggcatgacgaaatga

SEQ ID NO: 4252 - DNA, 38 bp, Artificial Sequence
  Synthetic oligonucleotide
gaccgccacttatcagggctgggtagagaaagtgctga

SEQ ID NO: 4253 - DNA, 36 bp, Artificial Sequence
  Synthetic oligonucleotide
gatcctgcaaggtgaaaggcttggaaagggacagta

SEQ ID NO: 4254 - DNA, 36 bp, Artificial Sequence
  Synthetic oligonucleotide
gcgtcatgggtcggtgcgaattaatagtttaacata

SEQ ID NO: 4255 - DNA, 35 bp, Artificial Sequence
  Synthetic oligonucleotide
gctacacaattagtttcttcgaggagaagctcaac

SEQ ID NO: 4256 - DNA, 35 bp, Artificial Sequence
  Synthetic oligonucleotide
ggatgaccaccttactaggggaaggaacttttcga

SEQ ID NO: 4257 - DNA, 35 bp, Artificial Sequence
  Synthetic oligonucleotide
gggattgtggctatcacacgcctgtaacgttggta

SEQ ID NO: 4258 - DNA, 36 bp, Artificial Sequence
  Synthetic oligonucleotide
gtccacggacacaagttcattatggacacagttaca

SEQ ID NO: 4259 - DNA, 37 bp, Artificial Sequence
  Synthetic oligonucleotide
gtgtgataatcttagtaataacaataagtacttgcga

SEQ ID NO: 4260 - DNA, 35 bp, Artificial Sequence
  Synthetic oligonucleotide
gttgagcatccaagaaggtattcatttcaagctgc

SEQ ID NO: 4261 - DNA, 35 bp, Artificial Sequence
  Synthetic oligonucleotide
taaatgacgcagttctgaagcgttttttcgttgca

SEQ ID NO: 4262 - DNA, 37 bp, Artificial Sequence
  Synthetic oligonucleotide
tagggtcgcactgcgagaataatctgcactatgggga

SEQ ID NO: 4263 - DNA, 37 bp, Artificial Sequence
  Synthetic oligonucleotide
tcaccattactagacaaacggtgatgctgggttccga

SEQ ID NO: 4264 - DNA, 37 bp, Artificial Sequence
  Synthetic oligonucleotide
tccatcgagggcgggtcgatggcactgtagagcgtga

SEQ ID NO: 4265 - DNA, 36 bp, Artificial Sequence
  Synthetic oligonucleotide
tctagaagtactgcactcagggccgtacctgtttca

SEQ ID NO: 4266 - DNA, 37 bp, Artificial Sequence
  Synthetic oligonucleotide
aaatagacgaatgaccggagttgcgtgtactggctga

SEQ ID NO: 4267 - DNA, 37 bp, Artificial Sequence
  Synthetic oligonucleotide
aacgtggttcgtgggtgggaatttacgttgggctaga

SEQ ID NO: 4268 - DNA, 38 bp, Artificial Sequence
  Synthetic oligonucleotide
aagctcgatcgaggctagagcgatcataacgcctctga

SEQ ID NO: 4269 - DNA, 35 bp, Artificial Sequence
  Synthetic oligonucleotide
aataggatggcgggttctattgaaatggagctagt

SEQ ID NO: 4270 - DNA, 38 bp, Artificial Sequence
  Synthetic oligonucleotide
acaggagcctgtgttgtcggctttaggatgtccgctga

SEQ ID NO: 4271 - DNA, 35 bp, Artificial Sequence
  Synthetic oligonucleotide
acatatacggtatagtcaagcgtcatgtacgcgac

SEQ ID NO: 4272 - DNA, 35 bp, Artificial Sequence
  Synthetic oligonucleotide
ataccagcacagagatacaaaggcaatatacatct

SEQ ID NO: 4273 - DNA, 36 bp, Artificial Sequence
  Synthetic oligonucleotide
atatagtacagcatcgaaggcgggtacgcaacacta

SEQ ID NO: 4274 - DNA, 35 bp, Artificial Sequence
  Synthetic oligonucleotide
atccatctgccgtatggcgtgttttagggtgtgac

SEQ ID NO: 4275 - DNA, 38 bp, Artificial Sequence
  Synthetic oligonucleotide
cattcggtactgcatagtacggtgaaacacggaactga

SEQ ID NO: 4276 - DNA, 38 bp, Artificial Sequence
  Synthetic oligonucleotide
ctaaaggtcaattattcagtgccgcgagacgaatttga

SEQ ID NO: 4277 - DNA, 36 bp, Artificial Sequence
  Synthetic oligonucleotide
gcaatttaatgcaagtcgggctagattccttttgca

SEQ ID NO: 4278 - DNA, 37 bp, Artificial Sequence
  Synthetic oligonucleotide
gcaccttaaccaagtgtgtggtctgaagcttgccaga

SEQ ID NO: 4279 - DNA, 36 bp, Artificial Sequence
  Synthetic oligonucleotide
gcgactgacaaccctgataggtcccacggaaatata

SEQ ID NO: 4280 - DNA, 36 bp, Artificial Sequence
  Synthetic oligonucleotide
gctaaacgaattgtaggataattcgacattacataa

SEQ ID NO: 4281 - DNA, 35 bp, Artificial Sequence
  Synthetic oligonucleotide
ggctcaccgacactagagaaggaatggagattgct

SEQ ID NO: 4282 - DNA, 35 bp, Artificial Sequence
  Synthetic oligonucleotide
gtactgatcgctggatatatcccgaacccagactc

SEQ ID NO: 4283 - DNA, 37 bp, Artificial Sequence
  Synthetic oligonucleotide
gtctgctgggtcttcgatacatcctgatcgggctcga

SEQ ID NO: 4284 - DNA, 36 bp, Artificial Sequence
  Synthetic oligonucleotide
gtgctggcttaaatatatttatgatcatggtctgca

SEQ ID NO: 4285 - DNA, 35 bp, Artificial Sequence
  Synthetic oligonucleotide
gttcgttcccatgtctgcgctaggatatagcggac

SEQ ID NO: 4286 - DNA, 35 bp, Artificial Sequence
  Synthetic oligonucleotide
taagaagtgctgctcaggccgtgtgtatatgggta

SEQ ID NO: 4287 - DNA, 35 bp, Artificial Sequence
  Synthetic oligonucleotide
tagcgaatggaaggtcgacaatctaaaatacggga

SEQ ID NO: 4288 - DNA, 37 bp, Artificial Sequence
  Synthetic oligonucleotide
tatctttcaactaggcggattagagatgacctgcgga

SEQ ID NO: 4289 - DNA, 36 bp, Artificial Sequence
  Synthetic oligonucleotide
tgcaacatgcaaggtttaacctacagggtgcgcgta

SEQ ID NO: 4290 - DNA, 36 bp, Artificial Sequence
  Synthetic oligonucleotide
tgttctgtgcggtttagggggatcaaggacatcgga

SEQ ID NO: 4291 - DNA, 38 bp, Artificial Sequence
  Synthetic oligonucleotide
ttgggtcgcagtcagtaccagttgtaagggtggcatga

SEQ ID NO: 4292 - DNA, 35 bp, Artificial Sequence
  Synthetic oligonucleotide
ttggtgaagttcagaataaacggcacgtttatagc

SEQ ID NO: 4293 - DNA, 37 bp, Artificial Sequence
  Synthetic oligonucleotide
gtggggtgctttgcagtttctattctcgacactccga

SEQ ID NO: 4294 - DNA, 37 bp, Artificial Sequence
  Synthetic oligonucleotide
cataaacgacacggcgctgtacctttaacgtgtacga

SEQ ID NO: 4295 - DNA, 37 bp, Artificial Sequence
  Synthetic oligonucleotide
ggtggttgattggtttctaagaagagtctaagagaga

SEQ ID NO: 4296 - DNA, 37 bp, Artificial Sequence
  Synthetic oligonucleotide
atcctagacggtactcgctggtatatggtgggtgtga

SEQ ID NO: 4297 - DNA, 35 bp, Artificial Sequence
  Synthetic oligonucleotide
atgttcaagaacgtactccggagtaggcaagcccc

SEQ ID NO: 4298 - DNA, 35 bp, Artificial Sequence
  Synthetic oligonucleotide
ctggagtcatatggacagcaaatcccgagcatgct

SEQ ID NO: 4299 - DNA, 36 bp, Artificial Sequence
  Synthetic oligonucleotide
gtatggcgattgagtaacttcggggatgcactccga

SEQ ID NO: 4300 - DNA, 37 bp, Artificial Sequence
  Synthetic oligonucleotide
gtcaagtggggcgttggcattgttagtcccacatgga

SEQ ID NO: 4301 - DNA, 38 bp, Artificial Sequence
  Synthetic oligonucleotide
aaccgtacgggtcacgctaagattctagggtactatga

SEQ ID NO: 4302 - DNA, 36 bp, Artificial Sequence
  Synthetic oligonucleotide
aaggaatctgccatgtgtatcgggttagggtgttta

SEQ ID NO: 4303 - DNA, 37 bp, Artificial Sequence
  Synthetic oligonucleotide
aagtaggtctatatcgttcgtagttgcgggctgtaga

SEQ ID NO: 4304 - DNA, 35 bp, Artificial Sequence
  Synthetic oligonucleotide
acgtactttatctagcgaatcgctgatctacattt

SEQ ID NO: 4305 - DNA, 36 bp, Artificial Sequence
  Synthetic oligonucleotide
gcgtcatgactaatgagccatgtgttgatacgctca

SEQ ID NO: 4306 - DNA, 37 bp, Artificial Sequence
  Synthetic oligonucleotide
taaacgcggctggttattcctgcagtaaacggaaaga

SEQ ID NO: 4307 - DNA, 37 bp, Artificial Sequence
  Synthetic oligonucleotide
tataaaatggcggaagaacggtgatgggaacacagga

SEQ ID NO: 4308 - DNA, 35 bp, Artificial Sequence
  Synthetic oligonucleotide
tttcggattgctaatcaatgggctataatgcatag

SEQ ID NO: 4309 - DNA, 37 bp, Artificial Sequence
  Synthetic oligonucleotide
gcctattaagaaatggtcggactgagtcactgattga

SEQ ID NO: 4310 - DNA, 35 bp, Artificial Sequence
  Synthetic oligonucleotide
acagtggcacaacctgcaatcgacgtgccatacgg

SEQ ID NO: 4311 - DNA, 38 bp, Artificial Sequence
  Synthetic oligonucleotide
atactagggcagtattaggagttaattgttcccgatga

SEQ ID NO: 4312 - DNA, 38 bp, Artificial Sequence
  Synthetic oligonucleotide
atgtacagcggcatcatcgtgttctactgccgggggaa

SEQ ID NO: 4313 - DNA, 36 bp, Artificial Sequence
  Synthetic oligonucleotide
catgcgactattggttttatagtttcttttaagtta

SEQ ID NO: 4314 - DNA, 35 bp, Artificial Sequence
  Synthetic oligonucleotide
cgtcgcgctctatgccgacgataagagttgtcagg

SEQ ID NO: 4315 - DNA, 38 bp, Artificial Sequence
  Synthetic oligonucleotide
gaagcctgtacatgagaattgtatgcgatccagaatga

SEQ ID NO: 4316 - DNA, 37 bp, Artificial Sequence
  Synthetic oligonucleotide
gcaaccggaatgacacgtgggggtactgatagatgga

SEQ ID NO: 4317 - DNA, 38 bp, Artificial Sequence
  Synthetic oligonucleotide
ggggcacatacgatggctagtaataagtcatggaatga

SEQ ID NO: 4318 - DNA, 38 bp, Artificial Sequence
  Synthetic oligonucleotide
gtactgctattactcgcgtctgaaacttaacttaatga

SEQ ID NO: 4319 - DNA, 36 bp, Artificial Sequence
  Synthetic oligonucleotide
taagggagagctacgattagaacgtccgtacacata

SEQ ID NO: 4320 - DNA, 37 bp, Artificial Sequence
  Synthetic oligonucleotide
tcaatacctaagttgacaacgaagtgtgtaacacgta

SEQ ID NO: 4321 - DNA, 35 bp, Artificial Sequence
  Synthetic oligonucleotide
acccacaggcccaaagttttgaggcgccttgccga

SEQ ID NO: 4322 - DNA, 37 bp, Artificial Sequence
  Synthetic oligonucleotide
tactttcggaatcggctctgctcgtggagcatggtga

SEQ ID NO: 4323 - DNA, 36 bp, Artificial Sequence
  Synthetic oligonucleotide
aacggtattgataaaaagtgtcccgtcgtgtgaaga

SEQ ID NO: 4324 - DNA, 35 bp, Artificial Sequence
  Synthetic oligonucleotide
aagctataccccggtttggcgggcctcccgatatg

SEQ ID NO: 4325 - DNA, 37 bp, Artificial Sequence
  Synthetic oligonucleotide
acatcgaaacacggtattcattcccaatcctgcagga

SEQ ID NO: 4326 - DNA, 35 bp, Artificial Sequence
  Synthetic oligonucleotide
agagaagtttaggctgttatttgggctccattggg

SEQ ID NO: 4327 - DNA, 35 bp, Artificial Sequence
  Synthetic oligonucleotide
agtccctgccacgtccccatcttacgaacctttca

SEQ ID NO: 4328 - DNA, 37 bp, Artificial Sequence
  Synthetic oligonucleotide
atacggcaaacatataaatatttgtaaacatgcgcga

SEQ ID NO: 4329 - DNA, 38 bp, Artificial Sequence
  Synthetic oligonucleotide
atggcatcgtctggacgaggcttgtcgtacatgcttga

SEQ ID NO: 4330 - DNA, 35 bp, Artificial Sequence
  Synthetic oligonucleotide
catagtccagggcgtcttcggatcgttttgcttag

SEQ ID NO: 4331 - DNA, 37 bp, Artificial Sequence
  Synthetic oligonucleotide
gatccacaaggaaggtgcgcattgtaaggctcacgga

SEQ ID NO: 4332 - DNA, 35 bp, Artificial Sequence
  Synthetic oligonucleotide
gcgattacgatcatcgcaaggtttactttatgttg

SEQ ID NO: 4333 - DNA, 37 bp, Artificial Sequence
  Synthetic oligonucleotide
tagagaagaaatgtgctaaggcatgagcatggtggga

SEQ ID NO: 4334 - DNA, 36 bp, Artificial Sequence
  Synthetic oligonucleotide
taggcgcatccagaaagggagcacccggtaaatata

SEQ ID NO: 4335 - DNA, 37 bp, Artificial Sequence
  Synthetic oligonucleotide
tcttgcgcaaggatacaaaacccaaactcgccctgga

SEQ ID NO: 4336 - DNA, 35 bp, Artificial Sequence
  Synthetic oligonucleotide
tgtacttaaggccatatgttaagttaatccgttta

SEQ ID NO: 4337 - DNA, 35 bp, Artificial Sequence
  Synthetic oligonucleotide
ttcgacataagcgtttctgcatagtctcagcccac

SEQ ID NO: 4338 - DNA, 36 bp, Artificial Sequence
  Synthetic oligonucleotide
ttgtggagtaatcagtcctatcgttccgtttggata

SEQ ID NO: 4339 - DNA, 37 bp, Artificial Sequence
  Synthetic oligonucleotide
tcgtacgtacagattccaccagtctttagttaagtta

SEQ ID NO: 4340 - DNA, 38 bp, Artificial Sequence
  Synthetic oligonucleotide
gaagacggagctgcgtatcatgttgaagtcgaatatga

SEQ ID NO: 4341 - DNA, 38 bp, Artificial Sequence
  Synthetic oligonucleotide
aaagggtgatcttgacttgtgcaatatttcgacgatga

SEQ ID NO: 4342 - DNA, 35 bp, Artificial Sequence
  Synthetic oligonucleotide
acatctcatgagaagcgccgggtttctaaggcgag

SEQ ID NO: 4343 - DNA, 38 bp, Artificial Sequence
  Synthetic oligonucleotide
actagggactatggggtaactcatgtcgttcgttttga

SEQ ID NO: 4344 - DNA, 35 bp, Artificial Sequence
  Synthetic oligonucleotide
agaggtccccatgggcccagctcgtgctttggcga

SEQ ID NO: 4345 - DNA, 37 bp, Artificial Sequence
  Synthetic oligonucleotide
agattgcagtttgttcggcccctacgtagaaaggcga

SEQ ID NO: 4346 - DNA, 35 bp, Artificial Sequence
  Synthetic oligonucleotide
agcctgctaggttttgcctgaccgcaaggcttgag

SEQ ID NO: 4347 - DNA, 36 bp, Artificial Sequence
  Synthetic oligonucleotide
aggtacatttagcgaagaagagtgtaatacgggcta

SEQ ID NO: 4348 - DNA, 38 bp, Artificial Sequence
  Synthetic oligonucleotide
aggtctgtgctagttggtaactaggtgaactctgatga

SEQ ID NO: 4349 - DNA, 35 bp, Artificial Sequence
  Synthetic oligonucleotide
ataacgatcaaagcgggcgtagataggttatcacg

SEQ ID NO: 4350 - DNA, 36 bp, Artificial Sequence
  Synthetic oligonucleotide
caatagtcgctggcatctaacagaactttcctagca

SEQ ID NO: 4351 - DNA, 35 bp, Artificial Sequence
  Synthetic oligonucleotide
ccacacccagagtgctgccctcaaggtatgaatta

SEQ ID NO: 4352 - DNA, 37 bp, Artificial Sequence
  Synthetic oligonucleotide
ccagaattaaagttggaggtcactcagcttggctgga

SEQ ID NO: 4353 - DNA, 35 bp, Artificial Sequence
  Synthetic oligonucleotide
gacgtgactacttgttcaggatttagatcctctcg

SEQ ID NO: 4354 - DNA, 35 bp, Artificial Sequence
  Synthetic oligonucleotide
gaggggtctgcaaggaagttgcggtgggtttagtt

SEQ ID NO: 4355 - DNA, 37 bp, Artificial Sequence
  Synthetic oligonucleotide
gaggtgcttaaaacgcgagatcccactcctctacgga

SEQ ID NO: 4356 - DNA, 35 bp, Artificial Sequence
  Synthetic oligonucleotide
ggagcataagctttctgaacgagggcgctcaagtc

SEQ ID NO: 4357 - DNA, 36 bp, Artificial Sequence
  Synthetic oligonucleotide
gtaaacaccggtctcatcaaatgttaatgatgctga

SEQ ID NO: 4358 - DNA, 38 bp, Artificial Sequence
  Synthetic oligonucleotide
gtgccaccatcctagcatggccaaccgcggtcgtgtga

SEQ ID NO: 4359 - DNA, 35 bp, Artificial Sequence
  Synthetic oligonucleotide
tagtcgatttacgtagcataaaattcgcaggcggg

SEQ ID NO: 4360 - DNA, 35 bp, Artificial Sequence
  Synthetic oligonucleotide
tcacctaggcaaaactaagcggtgacgtccacgtc

SEQ ID NO: 4361 - DNA, 35 bp, Artificial Sequence
  Synthetic oligonucleotide
tcgacggtaggtgaaagggcgaccggccatcttat

SEQ ID NO: 4362 - DNA, 36 bp, Artificial Sequence
  Synthetic oligonucleotide
tgattccacagcaggtggcgctatctctcgagacta

SEQ ID NO: 4363 - DNA, 36 bp, Artificial Sequence
  Synthetic oligonucleotide
tggtcatggggacatttgagtcagaagtagccatga

SEQ ID NO: 4364 - DNA, 35 bp, Artificial Sequence
  Synthetic oligonucleotide
ttcttcaccgagccttggtccgcgatggttgcggt

SEQ ID NO: 4365 - DNA, 38 bp, Artificial Sequence
  Synthetic oligonucleotide
agcgaattgggcgccagacgataattaggattgcatga

SEQ ID NO: 4366 - DNA, 36 bp, Artificial Sequence
  Synthetic oligonucleotide
ctggccggatggtgatggatttgtggctttgtttta

SEQ ID NO: 4367 - DNA, 37 bp, Artificial Sequence
  Synthetic oligonucleotide
gtagtgaaggcccctgagtttgaactttactatggtg

SEQ ID NO: 4368 - DNA, 36 bp, Artificial Sequence
  Synthetic oligonucleotide
tacacaattttgggaagcatatagcggtaccgacta

SEQ ID NO: 4369 - DNA, 35 bp, Artificial Sequence
  Synthetic oligonucleotide
tcagattccaacgaattatatgtacagcagtcttt

SEQ ID NO: 4370 - DNA, 36 bp, Artificial Sequence
  Synthetic oligonucleotide
accagccccgtcagaaatattatcagcatggaatta

SEQ ID NO: 4371 - DNA, 37 bp, Artificial Sequence
  Synthetic oligonucleotide
agtacacgatcgtgctcatgccattataagggtatga

SEQ ID NO: 4372 - DNA, 35 bp, Artificial Sequence
  Synthetic oligonucleotide
agtcatctttgtcacctggagatagtgataggcaa

SEQ ID NO: 4373 - DNA, 36 bp, Artificial Sequence
  Synthetic oligonucleotide
gagtctgccgtggggccgcacggagccacttataaa

SEQ ID NO: 4374 - DNA, 35 bp, Artificial Sequence
  Synthetic oligonucleotide
ggtgcctataacccgcctgcaggtacctacggcac

SEQ ID NO: 4375 - DNA, 37 bp, Artificial Sequence
  Synthetic oligonucleotide
gtagagtatatgaacatttggtgttttggccgtctga

SEQ ID NO: 4376 - DNA, 36 bp, Artificial Sequence
  Synthetic oligonucleotide
tgtgggagggatcattaggctcgggctgaggttgga

SEQ ID NO: 4377 - DNA, 35 bp, Artificial Sequence
  Synthetic oligonucleotide
actgcgtcactgcggttaggttgtactcctaggga

SEQ ID NO: 4378 - DNA, 35 bp, Artificial Sequence
  Synthetic oligonucleotide
atatatctgcactgaatgaagtcatcaatggcggt

SEQ ID NO: 4379 - DNA, 38 bp, Artificial Sequence
  Synthetic oligonucleotide
gtgcagtttcaatttacaatacgtctcagggactgtga

SEQ ID NO: 4380 - DNA, 38 bp, Artificial Sequence
  Synthetic oligonucleotide
tcacgaccgctacgggacagagcacaaaggaacggtga

SEQ ID NO: 4381 - DNA, 35 bp, Artificial Sequence
  Synthetic oligonucleotide
tgatcaggttatatgtagatgtcccccaactgtaa

SEQ ID NO: 4382 - DNA, 35 bp, Artificial Sequence
  Synthetic oligonucleotide
aaacatacgtggcggttactaactagtatcaatcg

SEQ ID NO: 4383 - DNA, 36 bp, Artificial Sequence
  Synthetic oligonucleotide
accggagcatcgtaggagatatacggtgccgtagga

SEQ ID NO: 4384 - DNA, 36 bp, Artificial Sequence
  Synthetic oligonucleotide
cgacatacgcttgtagcgtatactgggtcaaggata

SEQ ID NO: 4385 - DNA, 36 bp, Artificial Sequence
  Synthetic oligonucleotide
gaataacgagctccaaagattcccaagggcgggaaa

SEQ ID NO: 4386 - DNA, 37 bp, Artificial Sequence
  Synthetic oligonucleotide
gacacaatatgggttccaggccattgcttatggccga

SEQ ID NO: 4387 - DNA, 37 bp, Artificial Sequence
  Synthetic oligonucleotide
gcccttaactgcaggaatatatttaatgtcctggaga

SEQ ID NO: 4388 - DNA, 36 bp, Artificial Sequence
  Synthetic oligonucleotide
gctgagacgtatttgggaggtcgaattatttgttaa

SEQ ID NO: 4389 - DNA, 37 bp, Artificial Sequence
  Synthetic oligonucleotide
gtctggttcacggttacatgttggggggatatgatga

SEQ ID NO: 4390 - DNA, 37 bp, Artificial Sequence
  Synthetic oligonucleotide
gtgaattcggtcgagcaaactatttttcgttacgcga

SEQ ID NO: 4391 - DNA, 35 bp, Artificial Sequence
  Synthetic oligonucleotide
gtgacttcgttcgggctaggtactacgcatcagcg

SEQ ID NO: 4392 - DNA, 37 bp, Artificial Sequence
  Synthetic oligonucleotide
tcacgccactggagaagtcgttacatcaagtttgaga

SEQ ID NO: 4393 - DNA, 35 bp, Artificial Sequence
  Synthetic oligonucleotide
tccaacagagtcataactagtgtgtgggaatagta

SEQ ID NO: 4394 - DNA, 36 bp, Artificial Sequence
  Synthetic oligonucleotide
tccatgttggaacgatacctactatgggctccggta

SEQ ID NO: 4395 - DNA, 36 bp, Artificial Sequence
  Synthetic oligonucleotide
tgcccgcaacttgaggggtcaggcttatgagtatga

SEQ ID NO: 4396 - DNA, 37 bp, Artificial Sequence
  Synthetic oligonucleotide
tttacgctccaagtagtacaagaggagtactgccgga

SEQ ID NO: 4397 - DNA, 36 bp, Artificial Sequence
  Synthetic oligonucleotide
tgcactgtctctaagcattaggggatagtgaatgca

SEQ ID NO: 4398 - DNA, 36 bp, Artificial Sequence
  Synthetic oligonucleotide
actagccttccggttatgtcgaaaagccgtacggca

SEQ ID NO: 4399 - DNA, 35 bp, Artificial Sequence
  Synthetic oligonucleotide
tacggggtatagcgtttcaaggtcattcgctccgc

SEQ ID NO: 4400 - DNA, 37 bp, Artificial Sequence
  Synthetic oligonucleotide
tgacggtggtaaaaatgtaggtttgtgggtccggtga

SEQ ID NO: 4401 - DNA, 36 bp, Artificial Sequence
  Synthetic oligonucleotide
ttgtctagtagcgaacgtagggattcaaaggtcaga

SEQ ID NO: 4402 - DNA, 35 bp, Artificial Sequence
  Synthetic oligonucleotide
aacttccgtctgaaccgtgattggcctcggggagg

SEQ ID NO: 4403 - DNA, 37 bp, Artificial Sequence
  Synthetic oligonucleotide
atacatggtttgctgtgtactttcccagaggtactga

SEQ ID NO: 4404 - DNA, 38 bp, Artificial Sequence
  Synthetic oligonucleotide
atggtcgcatagtgtaggggaacacccctatatagtga

SEQ ID NO: 4405 - DNA, 37 bp, Artificial Sequence
  Synthetic oligonucleotide
catggactggtaatttcacgccgcacctcgagtctga

SEQ ID NO: 4406 - DNA, 37 bp, Artificial Sequence
  Synthetic oligonucleotide
cgcagtacacgttcactaccgtgttttgagcgatgga

SEQ ID NO: 4407 - DNA, 37 bp, Artificial Sequence
  Synthetic oligonucleotide
cgtccaagacgctcgcaggtgctatcccttccttaga

SEQ ID NO: 4408 - DNA, 36 bp, Artificial Sequence
  Synthetic oligonucleotide
gatggaaaccagggtgcgtatggtgtaccctcatga

SEQ ID NO: 4409 - DNA, 35 bp, Artificial Sequence
  Synthetic oligonucleotide
gcaagggagcacagactcaccctcgaacattggtg

SEQ ID NO: 4410 - DNA, 35 bp, Artificial Sequence
  Synthetic oligonucleotide
gcatgttgcgttgcaaatgggcggtcctgataagg

SEQ ID NO: 4411 - DNA, 35 bp, Artificial Sequence
  Synthetic oligonucleotide
gcccaaggactgggatagataaggaatggagacga

SEQ ID NO: 4412 - DNA, 38 bp, Artificial Sequence
  Synthetic oligonucleotide
gctcgaaagcggagtcgagcagtacgcatgggcgttga

SEQ ID NO: 4413 - DNA, 38 bp, Artificial Sequence
  Synthetic oligonucleotide
ggggcgaaacgtgagaaccggagtccttgtatggctga

SEQ ID NO: 4414 - DNA, 35 bp, Artificial Sequence
  Synthetic oligonucleotide
gggtgatggatcaggtgttctatatggccgagaca

SEQ ID NO: 4415 - DNA, 38 bp, Artificial Sequence
  Synthetic oligonucleotide
gtaatgcactcggagattgtgtttgagaaggagggtga

SEQ ID NO: 4416 - DNA, 38 bp, Artificial Sequence
  Synthetic oligonucleotide
gtccgcttggtggcactactgaggtccgttttcaatga

SEQ ID NO: 4417 - DNA, 37 bp, Artificial Sequence
  Synthetic oligonucleotide
gtcggtgtcaccgcaggggtgggagctacgacaaaga

SEQ ID NO: 4418 - DNA, 37 bp, Artificial Sequence
  Synthetic oligonucleotide
tagcatcagtaggcttagtacttgaagtgctggatga

SEQ ID NO: 4419 - DNA, 36 bp, Artificial Sequence
  Synthetic oligonucleotide
tatgacagggatgcgatcgaaagggctacggcctta

SEQ ID NO: 4420 - DNA, 37 bp, Artificial Sequence
  Synthetic oligonucleotide
tccacgcagtcttgagacagaaactcacagagtagga

SEQ ID NO: 4421 - DNA, 35 bp, Artificial Sequence
  Synthetic oligonucleotide
tctagcgtaacgctagagttaactgatggcttgtc

SEQ ID NO: 4422 - DNA, 38 bp, Artificial Sequence
  Synthetic oligonucleotide
tgagcgggtcgcatagaaatatggccattgaacagtga

SEQ ID NO: 4423 - DNA, 35 bp, Artificial Sequence
  Synthetic oligonucleotide
tgtgtgttgcgtttacaatctgaatcactacgctg

SEQ ID NO: 4424 - DNA, 38 bp, Artificial Sequence
  Synthetic oligonucleotide
acctcggtgtgatatcgttcgacagttactgcgggtga

SEQ ID NO: 4425 - DNA, 36 bp, Artificial Sequence
  Synthetic oligonucleotide
ccatggaggtatgcaacgttggcgctcatatctaaa

SEQ ID NO: 4426 - DNA, 35 bp, Artificial Sequence
  Synthetic oligonucleotide
tatactgccgaggggttgactgcgtggtctcgaaa

SEQ ID NO: 4427 - DNA, 36 bp, Artificial Sequence
  Synthetic oligonucleotide
tccgacaagtgtttgggagggtatccgtacaaagga

SEQ ID NO: 4428 - DNA, 38 bp, Artificial Sequence
  Synthetic oligonucleotide
tctgcccgtgccgaagtgccgccggggatcgtaactga

SEQ ID NO: 4429 - DNA, 36 bp, Artificial Sequence
  Synthetic oligonucleotide
gtaagggttgcgattcatgtatgggttggttcatga

SEQ ID NO: 4430 - DNA, 37 bp, Artificial Sequence
  Synthetic oligonucleotide
ttcgtgttgcaattgcacaccggtttggtgatttaga

SEQ ID NO: 4431 - DNA, 36 bp, Artificial Sequence
  Synthetic oligonucleotide
aagaattggggggtgctggctagggagggaactaaa

SEQ ID NO: 4432 - DNA, 35 bp, Artificial Sequence
  Synthetic oligonucleotide
acaaagctcttctccagtaatccgctgcgcttggc

SEQ ID NO: 4433 - DNA, 35 bp, Artificial Sequence
  Synthetic oligonucleotide
acaagcgggattcaattttatgcgttttgggcaaa

SEQ ID NO: 4434 - DNA, 35 bp, Artificial Sequence
  Synthetic oligonucleotide
acttacaggccacaacaccaaggctaggcattctg

SEQ ID NO: 4435 - DNA, 36 bp, Artificial Sequence
  Synthetic oligonucleotide
agaatacggaggtggtggaagtatacaaaaataata

SEQ ID NO: 4436 - DNA, 35 bp, Artificial Sequence
  Synthetic oligonucleotide
atctgcgtcctaagaagagattggtagtggtggga

SEQ ID NO: 4437 - DNA, 38 bp, Artificial Sequence
  Synthetic oligonucleotide
caccgcggggtgagcgagtcattgagaccgacgcatga

SEQ ID NO: 4438 - DNA, 35 bp, Artificial Sequence
  Synthetic oligonucleotide
cgacggacttcttacgcctggtgaatctgtgtgcc

SEQ ID NO: 4439 - DNA, 36 bp, Artificial Sequence
  Synthetic oligonucleotide
cgggagactagcgaccgactaaatgccgctggccaa

SEQ ID NO: 4440 - DNA, 35 bp, Artificial Sequence
  Synthetic oligonucleotide
gaccgtcagtcatgttattatgatatgttggcgag

SEQ ID NO: 4441 - DNA, 38 bp, Artificial Sequence
  Synthetic oligonucleotide
gacctgaaaggagcatcaacgcgggactggcttcgtga

SEQ ID NO: 4442 - DNA, 35 bp, Artificial Sequence
  Synthetic oligonucleotide
gactaccgcatatcaggtttggttcaaatgcgcca

SEQ ID NO: 4443 - DNA, 38 bp, Artificial Sequence
  Synthetic oligonucleotide
gtaggacaggggataccgctggtagttgacgccactga

SEQ ID NO: 4444 - DNA, 36 bp, Artificial Sequence
  Synthetic oligonucleotide
gtcgaaaggcctgtacgcatggggggcgaatgttaa

SEQ ID NO: 4445 - DNA, 36 bp, Artificial Sequence
  Synthetic oligonucleotide
gtggcgtatgaagcttgcattttcttggtgtatcga

SEQ ID NO: 4446 - DNA, 37 bp, Artificial Sequence
  Synthetic oligonucleotide
taagcataaagcccgctcataaggtgggaagccctga

SEQ ID NO: 4447 - DNA, 37 bp, Artificial Sequence
  Synthetic oligonucleotide
taagtaaggggtgatgcttagcacgcccttttttaga

SEQ ID NO: 4448 - DNA, 37 bp, Artificial Sequence
  Synthetic oligonucleotide
tactctcccatgatttcgtacgggtcccattcgcgga

SEQ ID NO: 4449 - DNA, 36 bp, Artificial Sequence
  Synthetic oligonucleotide
tatagcagagcggccggccttagccctgcctgagta

SEQ ID NO: 4450 - DNA, 36 bp, Artificial Sequence
  Synthetic oligonucleotide
tatcgccggtatgtcgactaggggttatggactgta

SEQ ID NO: 4451 - DNA, 37 bp, Artificial Sequence
  Synthetic oligonucleotide
tccacaggacgtaccctcactgatagggccgtagaga

SEQ ID NO: 4452 - DNA, 36 bp, Artificial Sequence
  Synthetic oligonucleotide
tccatgctccgtggatgacgatgtgccagcctcata

SEQ ID NO: 4453 - DNA, 35 bp, Artificial Sequence
  Synthetic oligonucleotide
tcttgtgataggccgggtagtgcgcactactaggg

SEQ ID NO: 4454 - DNA, 37 bp, Artificial Sequence
  Synthetic oligonucleotide
tgtgttaggaaagcgtgctgttcaatcgcaggttcga

SEQ ID NO: 4455 - DNA, 36 bp, Artificial Sequence
  Synthetic oligonucleotide
ttggggtcatcggactccagggtaaaggcaggagta

SEQ ID NO: 4456 - DNA, 36 bp, Artificial Sequence
  Synthetic oligonucleotide
atcatcccaaaacgagtaaaccagaatctggaggta

SEQ ID NO: 4457 - DNA, 35 bp, Artificial Sequence
  Synthetic oligonucleotide
caagccccataagatctggatgtggtgctacggtg

SEQ ID NO: 4458 - DNA, 36 bp, Artificial Sequence
  Synthetic oligonucleotide
gaatcgtcaacgcatttagtgctatccaggggagga

SEQ ID NO: 4459 - DNA, 35 bp, Artificial Sequence
  Synthetic oligonucleotide
gagatgagttaccgcgcaggaaatgacgaatgacg

SEQ ID NO: 4460 - DNA, 36 bp, Artificial Sequence
  Synthetic oligonucleotide
gagtgaaggataaataatggcccttcagttttgaca

SEQ ID NO: 4461 - DNA, 37 bp, Artificial Sequence
  Synthetic oligonucleotide
gcagtccctctcgtgcaaagggttgtgtgatcctaga

SEQ ID NO: 4462 - DNA, 38 bp, Artificial Sequence
  Synthetic oligonucleotide
gccttactagtcataagtccaccaatattgacgtgtga

SEQ ID NO: 4463 - DNA, 36 bp, Artificial Sequence
  Synthetic oligonucleotide
gtcactttacaggccttatgttgtgattgtactaaa

SEQ ID NO: 4464 - DNA, 38 bp, Artificial Sequence
  Synthetic oligonucleotide
gtgtgagtccctggcgcgcacgtgtacagggagtgtga

SEQ ID NO: 4465 - DNA, 36 bp, Artificial Sequence
  Synthetic oligonucleotide
tccggggcatgcactcataggcaatctaacagcata

SEQ ID NO: 4466 - DNA, 36 bp, Artificial Sequence
  Synthetic oligonucleotide
tgtacctggaggggcacctttgcggtcctcgtgtaa

SEQ ID NO: 4467 - DNA, 35 bp, Artificial Sequence
  Synthetic oligonucleotide
tgtgttcgggttggggaattggtgcgtaatataaa

SEQ ID NO: 4468 - DNA, 37 bp, Artificial Sequence
  Synthetic oligonucleotide
ttaggctccgcatctaggaagcgaaaatatacttaga

SEQ ID NO: 4469 - DNA, 38 bp, Artificial Sequence
  Synthetic oligonucleotide
tttacgccaagccaactgatgttacggcctcgtactga

SEQ ID NO: 4470 - DNA, 35 bp, Artificial Sequence
  Synthetic oligonucleotide
aattagtcgcaatgcgtagaagggaggttggctgg

SEQ ID NO: 4471 - DNA, 35 bp, Artificial Sequence
  Synthetic oligonucleotide
acaccgccggctagtcaactccgatcttttcttcg

SEQ ID NO: 4472 - DNA, 37 bp, Artificial Sequence
  Synthetic oligonucleotide
agggtgctagtcaatccaggaaaatccatgactacga

SEQ ID NO: 4473 - DNA, 36 bp, Artificial Sequence
  Synthetic oligonucleotide
ataaggagtgctgtcatgtggttggcgacccctgta

SEQ ID NO: 4474 - DNA, 37 bp, Artificial Sequence
  Synthetic oligonucleotide
attgtgcttggacgctggttaatacttgcagaagtga

SEQ ID NO: 4475 - DNA, 38 bp, Artificial Sequence
  Synthetic oligonucleotide
cacggacgtaaggcggttcacggaagatgactagatga

SEQ ID NO: 4476 - DNA, 35 bp, Artificial Sequence
  Synthetic oligonucleotide
gacggtgcacgatgtgcgcgcacgtgatggtcgac

SEQ ID NO: 4477 - DNA, 35 bp, Artificial Sequence
  Synthetic oligonucleotide
gcagttgtagggtttgtcaggggtccaaaattgaa

SEQ ID NO: 4478 - DNA, 37 bp, Artificial Sequence
  Synthetic oligonucleotide
gccacgtcatccaaactcgtactggaatgttagccga

SEQ ID NO: 4479 - DNA, 38 bp, Artificial Sequence
  Synthetic oligonucleotide
gtatagttagtagcaagggagcaatgggggtccaaaga

SEQ ID NO: 4480 - DNA, 38 bp, Artificial Sequence
  Synthetic oligonucleotide
gtgacggaacggcatcaccttgattatggtcatgctga

SEQ ID NO: 4481 - DNA, 37 bp, Artificial Sequence
  Synthetic oligonucleotide
gtggtgctagattgcgttttaggccgatttacatcga

SEQ ID NO: 4482 - DNA, 35 bp, Artificial Sequence
  Synthetic oligonucleotide
taagcctcggcatgcttatcccagaacggttactg

SEQ ID NO: 4483 - DNA, 38 bp, Artificial Sequence
  Synthetic oligonucleotide
tcaatgggtcaactacttcagattggtccgttaggtga

SEQ ID NO: 4484 - DNA, 36 bp, Artificial Sequence
  Synthetic oligonucleotide
tcacgaaggcatccctggaagtatgaagctatgtga

SEQ ID NO: 4485 - DNA, 35 bp, Artificial Sequence
  Synthetic oligonucleotide
tccgatttacaacgcactcggcgtcctaatactta

SEQ ID NO: 4486 - DNA, 35 bp, Artificial Sequence
  Synthetic oligonucleotide
tgacatcgctgggagtaccgatgcggtaaacgtag

SEQ ID NO: 4487 - DNA, 36 bp, Artificial Sequence
  Synthetic oligonucleotide
tgtcctggtaaaacgtgggctcatgggggatcccga

SEQ ID NO: 4488 - DNA, 36 bp, Artificial Sequence
  Synthetic oligonucleotide
atggtgaagccatatagtgaaagaggctgaattgga

SEQ ID NO: 4489 - DNA, 36 bp, Artificial Sequence
  Synthetic oligonucleotide
atttagggtgttgaccatcaacgatccagtaggtta

SEQ ID NO: 4490 - DNA, 35 bp, Artificial Sequence
  Synthetic oligonucleotide
ttcccctggactaggcgtacaaggtgactgcgtgt

SEQ ID NO: 4491 - DNA, 36 bp, Artificial Sequence
  Synthetic oligonucleotide
ttgccggtaagttctagggcattaaagcgatagtta

SEQ ID NO: 4492 - DNA, 38 bp, Artificial Sequence
  Synthetic oligonucleotide
aaccatcgaattctgatgaatctatgagatgaaggtga

SEQ ID NO: 4493 - DNA, 38 bp, Artificial Sequence
  Synthetic oligonucleotide
accgatatgcagtcaatcttaggagaactatacggtga

SEQ ID NO: 4494 - DNA, 37 bp, Artificial Sequence
  Synthetic oligonucleotide
agaggcgttccaaggaccgtctggggtagggtaacga

SEQ ID NO: 4495 - DNA, 32 bp, Artificial Sequence
  Synthetic oligonucleotide
agagtctaaaaagcgagccacaaacctgtcca

SEQ ID NO: 4496 - DNA, 35 bp, Artificial Sequence
  Synthetic oligonucleotide
agatctacaatagctgtgcctgtcagctggcacat

SEQ ID NO: 4497 - DNA, 36 bp, Artificial Sequence
  Synthetic oligonucleotide
agcccaggcatatgctagttatagtagctggcccga

SEQ ID NO: 4498 - DNA, 35 bp, Artificial Sequence
  Synthetic oligonucleotide
agtatgagcacgagggcgcctaggggtacgaaaga

SEQ ID NO: 4499 - DNA, 36 bp, Artificial Sequence
  Synthetic oligonucleotide
atgttatggtggtcagttggcttaccgggaggtgaa

SEQ ID NO: 4500 - DNA, 37 bp, Artificial Sequence
  Synthetic oligonucleotide
gaaaaggacggctctttctagccaggtgttgatttga

SEQ ID NO: 4501 - DNA, 34 bp, Artificial Sequence
  Synthetic oligonucleotide
gaactgtcaacagtccctacagtgtatactgatt

SEQ ID NO: 4502 - DNA, 37 bp, Artificial Sequence
  Synthetic oligonucleotide
gaccgcaggtcgtataacctaggtccggatcatgcga

SEQ ID NO: 4503 - DNA, 37 bp, Artificial Sequence
  Synthetic oligonucleotide
gctcacttaaggttgttggttcttcgcactaaacgga

SEQ ID NO: 4504 - DNA, 37 bp, Artificial Sequence
  Synthetic oligonucleotide
gctgtctcggagatgtttccccgacttattatgtaga

SEQ ID NO: 4505 - DNA, 38 bp, Artificial Sequence
  Synthetic oligonucleotide
ggagcttggactggatgctgggtcccctgtacagttga

SEQ ID NO: 4506 - DNA, 35 bp, Artificial Sequence
  Synthetic oligonucleotide
gggccagtagcttcatcatctattggttcttacag

SEQ ID NO: 4507 - DNA, 37 bp, Artificial Sequence
  Synthetic oligonucleotide
ggttatacatgtgggatgtgaatgatgtgatggtcga

SEQ ID NO: 4508 - DNA, 35 bp, Artificial Sequence
  Synthetic oligonucleotide
gtcatgctggaaaatggcataatgttattagcacc

SEQ ID NO: 4509 - DNA, 34 bp, Artificial Sequence
  Synthetic oligonucleotide
tcccatagtccacgactggcccccgcctttcccc

SEQ ID NO: 4510 - DNA, 36 bp, Artificial Sequence
  Synthetic oligonucleotide
tgtagtacgagttctacagctagaggtctgttccaa

SEQ ID NO: 4511 - DNA, 35 bp, Artificial Sequence
  Synthetic oligonucleotide
ttgcccaggagcacaacagcagggatgggattaga

SEQ ID NO: 4512 - DNA, 38 bp, Artificial Sequence
  Synthetic oligonucleotide
ttgtgacagttgcttcgaggtacatcccgcatacatga

SEQ ID NO: 4513 - DNA, 36 bp, Artificial Sequence
  Synthetic oligonucleotide
cactgatggactgtgcagacgagcttgctatcttaa

SEQ ID NO: 4514 - DNA, 36 bp, Artificial Sequence
  Synthetic oligonucleotide
atgaactgcggtatttgtacccattggagtggttga

SEQ ID NO: 4515 - DNA, 35 bp, Artificial Sequence
  Synthetic oligonucleotide
aactgctgagtcgtgagataaggtgaaggccaaaa

SEQ ID NO: 4516 - DNA, 35 bp, Artificial Sequence
  Synthetic oligonucleotide
atacggtcggatagatgagactacaagacctaaca

SEQ ID NO: 4517 - DNA, 35 bp, Artificial Sequence
  Synthetic oligonucleotide
atcctgggttgctccagtgtctgccctatggcatg

SEQ ID NO: 4518 - DNA, 37 bp, Artificial Sequence
  Synthetic oligonucleotide
ccggcttcaaattggaattcacataagcaggacggga

SEQ ID NO: 4519 - DNA, 36 bp, Artificial Sequence
  Synthetic oligonucleotide
gtaaaccgacaggaacttcgaactgcacgaaaacca

SEQ ID NO: 4520 - DNA, 38 bp, Artificial Sequence
  Synthetic oligonucleotide
gtaagtaccgcaggcacagatgatatgctatgatgtga

SEQ ID NO: 4521 - DNA, 38 bp, Artificial Sequence
  Synthetic oligonucleotide
gtcttataggagcgggacgagcgtactataacagctga

SEQ ID NO: 4522 - DNA, 35 bp, Artificial Sequence
  Synthetic oligonucleotide
ttacacgagggactgccccataacgtgacctactg

SEQ ID NO: 4523 - DNA, 37 bp, Artificial Sequence
  Synthetic oligonucleotide
ttcgtacagttgagcgcaccaatgtgggaacatgcga

SEQ ID NO: 4524 - DNA, 38 bp, Artificial Sequence
  Synthetic oligonucleotide
ttgtactacgtccgatcactttccagacgctcggttga

SEQ ID NO: 4525 - DNA, 35 bp, Artificial Sequence
  Synthetic oligonucleotide
tttgcgccattagccaaagcagcgcaacgcccatc

SEQ ID NO: 4526 - DNA, 35 bp, Artificial Sequence
  Synthetic oligonucleotide
atgacatattgggtaatcattccttgtatgggagc

SEQ ID NO: 4527 - DNA, 36 bp, Artificial Sequence
  Synthetic oligonucleotide
atacgttggcacatgtataccagttcaggaagtata

SEQ ID NO: 4528 - DNA, 36 bp, Artificial Sequence
  Synthetic oligonucleotide
tgcatgaggcaactgcagtttattcctcataaacga

SEQ ID NO: 4529 - DNA, 38 bp, Artificial Sequence
  Synthetic oligonucleotide
agctcgtagagcttattgcgaacccgctgtgctattga

SEQ ID NO: 4530 - DNA, 37 bp, Artificial Sequence
  Synthetic oligonucleotide
aggtaactgtctaggaaagttgcgaacggggggatga

SEQ ID NO: 4531 - DNA, 35 bp, Artificial Sequence
  Synthetic oligonucleotide
ccatgattcatgagcacaaaagccagctagtccgc

SEQ ID NO: 4532 - DNA, 36 bp, Artificial Sequence
  Synthetic oligonucleotide
gtgagtttttgaaaagctcgtagatagcccccccta

SEQ ID NO: 4533 - DNA, 37 bp, Artificial Sequence
  Synthetic oligonucleotide
gttaattcaaaggcctgtagggtacactcaggattga

SEQ ID NO: 4534 - DNA, 35 bp, Artificial Sequence
  Synthetic oligonucleotide
taatgaccctgagatcgttcgaaagtcccgtcctc

SEQ ID NO: 4535 - DNA, 36 bp, Artificial Sequence
  Synthetic oligonucleotide
tcagtcaggtcgattcaatgaaatcgaggccgtcta

SEQ ID NO: 4536 - DNA, 38 bp, Artificial Sequence
  Synthetic oligonucleotide
tgcatagcccgaccattggaagtgagatatggagctga

SEQ ID NO: 4537 - DNA, 35 bp, Artificial Sequence
  Synthetic oligonucleotide
tggtcattctcgccgtgtcacagcgaaagggcggt

SEQ ID NO: 4538 - DNA, 37 bp, Artificial Sequence
  Synthetic oligonucleotide
tgttgagggatggttaaacgcacaccgaaattctgga

SEQ ID NO: 4539 - DNA, 35 bp, Artificial Sequence
  Synthetic oligonucleotide
tgttgcaacgggaacgctcaggtaggacgaccacg

SEQ ID NO: 4540 - DNA, 37 bp, Artificial Sequence
  Synthetic oligonucleotide
ttagttttgatgggtaataataccggttcatattaga

SEQ ID NO: 4541 - DNA, 37 bp, Artificial Sequence
  Synthetic oligonucleotide
ctccggacggttctacactgcgagccattttggacga

SEQ ID NO: 4542 - DNA, 37 bp, Artificial Sequence
  Synthetic oligonucleotide
aacctctgggtgcatgggcaacgtagcttaaacttga

SEQ ID NO: 4543 - DNA, 37 bp, Artificial Sequence
  Synthetic oligonucleotide
agcaagtaatgcacgtattgttgcgagattgttttga

SEQ ID NO: 4544 - DNA, 37 bp, Artificial Sequence
  Synthetic oligonucleotide
atcaaatacacagtcctgctgctgggatttgatcgga

SEQ ID NO: 4545 - DNA, 35 bp, Artificial Sequence
  Synthetic oligonucleotide
gcacgaaatactgtccggtattaggcccggctttg

SEQ ID NO: 4546 - DNA, 36 bp, Artificial Sequence
  Synthetic oligonucleotide
gcatggggttaacgccggtgttagctctaacagtta

SEQ ID NO: 4547 - DNA, 38 bp, Artificial Sequence
  Synthetic oligonucleotide
gcgctgaggaagtatttgccgctaggtgggcgccgtga

SEQ ID NO: 4548 - DNA, 36 bp, Artificial Sequence
  Synthetic oligonucleotide
tttgcgaagggtaaaacatgcactcattgggacaga

SEQ ID NO: 4549 - DNA, 38 bp, Artificial Sequence
  Synthetic oligonucleotide
gagaaggcattgccccgtttggtacctgtactctttga

SEQ ID NO: 4550 - DNA, 37 bp, Artificial Sequence
  Synthetic oligonucleotide
ggactgcttgcgggtaatacttcctcacctctcttga

SEQ ID NO: 4551 - DNA, 37 bp, Artificial Sequence
  Synthetic oligonucleotide
aaaaatggcatcaacatagctcgtcttcacggagcga

SEQ ID NO: 4552 - DNA, 36 bp, Artificial Sequence
  Synthetic oligonucleotide
acaccgatcctgacgtagtcgtaagagcggatgata

SEQ ID NO: 4553 - DNA, 36 bp, Artificial Sequence
  Synthetic oligonucleotide
accgagtgatttgtatcgtactatctttggagcgaa

SEQ ID NO: 4554 - DNA, 36 bp, Artificial Sequence
  Synthetic oligonucleotide
acctgggaacggttcttggtgtgcgacccacaacaa

SEQ ID NO: 4555 - DNA, 35 bp, Artificial Sequence
  Synthetic oligonucleotide
accttaatcttactgctcgttgatggtgatgttta

SEQ ID NO: 4556 - DNA, 36 bp, Artificial Sequence
  Synthetic oligonucleotide
actgcagccgcgacgtaccctgcaaggagtaacaga

SEQ ID NO: 4557 - DNA, 38 bp, Artificial Sequence
  Synthetic oligonucleotide
actgttaggtggaatgattgaggagtaaatgttcctga

SEQ ID NO: 4558 - DNA, 38 bp, Artificial Sequence
  Synthetic oligonucleotide
agtccttgaaggatatgataactgaggttgattcgtga

SEQ ID NO: 4559 - DNA, 37 bp, Artificial Sequence
  Synthetic oligonucleotide
atccactgaagacgttacaaacgtgttttgcgaggga

SEQ ID NO: 4560 - DNA, 35 bp, Artificial Sequence
  Synthetic oligonucleotide
ccattagaattccccacatgaccgatactgggatg

SEQ ID NO: 4561 - DNA, 35 bp, Artificial Sequence
  Synthetic oligonucleotide
cgggcaattcctctataattccgagatttcatccg

SEQ ID NO: 4562 - DNA, 37 bp, Artificial Sequence
  Synthetic oligonucleotide
ctaggacgtcaaggattcagcgagatttgtgtgggac

SEQ ID NO: 4563 - DNA, 36 bp, Artificial Sequence
  Synthetic oligonucleotide
ggtgttgagattcgtacatccagaactttttcagga

SEQ ID NO: 4564 - DNA, 37 bp, Artificial Sequence
  Synthetic oligonucleotide
gtacgcgggtctgtacccccagtaaacgtctgtctga

SEQ ID NO: 4565 - DNA, 35 bp, Artificial Sequence
  Synthetic oligonucleotide
tagtctttgaaggccgacggatgacttgagaggtc

SEQ ID NO: 4566 - DNA, 38 bp, Artificial Sequence
  Synthetic oligonucleotide
tcatgaaattagtgagctggcatgaaggtcaattatga

SEQ ID NO: 4567 - DNA, 37 bp, Artificial Sequence
  Synthetic oligonucleotide
ttcgccgggcttgtagccatgcctgggtgccttgcga

SEQ ID NO: 4568 - DNA, 35 bp, Artificial Sequence
  Synthetic oligonucleotide
ttttactggagcgcctaaggcttgctacgacctta

SEQ ID NO: 4569 - DNA, 37 bp, Artificial Sequence
  Synthetic oligonucleotide
gtcgtacagttttacgggcaacattagtacgcccaga

SEQ ID NO: 4570 - DNA, 37 bp, Artificial Sequence
  Synthetic oligonucleotide
agggaaacgtagttgaaagtggttaggtcaatagtga

SEQ ID NO: 4571 - DNA, 37 bp, Artificial Sequence
  Synthetic oligonucleotide
cccaaatcaaattgcgacgaggcgctggcgcttaaga

SEQ ID NO: 4572 - DNA, 35 bp, Artificial Sequence
  Synthetic oligonucleotide
ccggactggtcatgaacaccctaaaggaaatggag

SEQ ID NO: 4573 - DNA, 37 bp, Artificial Sequence
  Synthetic oligonucleotide
gacgtaaacttgtcacgacacgaggaggtataacaga

SEQ ID NO: 4574 - DNA, 38 bp, Artificial Sequence
  Synthetic oligonucleotide
gcactgaatgcatctacggctcatgtttgagaacctga

SEQ ID NO: 4575 - DNA, 37 bp, Artificial Sequence
  Synthetic oligonucleotide
gcagatatattcatacgatggacaagcgatgggggga

SEQ ID NO: 4576 - DNA, 38 bp, Artificial Sequence
  Synthetic oligonucleotide
taagtatatccaagtgatgtatgagtagggagagctga

SEQ ID NO: 4577 - DNA, 35 bp, Artificial Sequence
  Synthetic oligonucleotide
tcatcacaggtcgggatgaacactaaatttcttgg

SEQ ID NO: 4578 - DNA, 36 bp, Artificial Sequence
  Synthetic oligonucleotide
ttgactctcagctgccggcataagtacccttgagaa

SEQ ID NO: 4579 - DNA, 38 bp, Artificial Sequence
  Synthetic oligonucleotide
agtacctccgaggcgacacgcaaagctcgtttgtgtga

SEQ ID NO: 4580 - DNA, 38 bp, Artificial Sequence
  Synthetic oligonucleotide
gtgactgtacttggaagtcatgggaggagacagagtga

SEQ ID NO: 4581 - DNA, 36 bp, Artificial Sequence
  Synthetic oligonucleotide
ttgaccgtagggcacgacggcgtaagtaactgaaaa

SEQ ID NO: 4582 - DNA, 37 bp, Artificial Sequence
  Synthetic oligonucleotide
acgataggtgggctgccgatggctgtggttcttgtga

SEQ ID NO: 4583 - DNA, 36 bp, Artificial Sequence
  Synthetic oligonucleotide
gttgtgcacggacggtggttatgcaggtacgtgata

SEQ ID NO: 4584 - DNA, 36 bp, Artificial Sequence
  Synthetic oligonucleotide
taggaggtacaaagacattggagtagtgataggcga

SEQ ID NO: 4585 - DNA, 38 bp, Artificial Sequence
  Synthetic oligonucleotide
tataccgaagtcagtcgctttgttatccgtagtcttga

SEQ ID NO: 4586 - DNA, 35 bp, Artificial Sequence
  Synthetic oligonucleotide
aacatcctcagagtgtgttcatacacgggcgttaa

SEQ ID NO: 4587 - DNA, 36 bp, Artificial Sequence
  Synthetic oligonucleotide
aatcttggaggtagttggtataggcatacctgtata

SEQ ID NO: 4588 - DNA, 36 bp, Artificial Sequence
  Synthetic oligonucleotide
agcacgttggcatacacgaagaacgtgcgtgtgtaa

SEQ ID NO: 4589 - DNA, 38 bp, Artificial Sequence
  Synthetic oligonucleotide
atccgggacacatcgttgcagtacgccctgaaacatga

SEQ ID NO: 4590 - DNA, 38 bp, Artificial Sequence
  Synthetic oligonucleotide
atgtgaactacgggggttgtgcgatgtgagccaagtga

SEQ ID NO: 4591 - DNA, 36 bp, Artificial Sequence
  Synthetic oligonucleotide
cccccgtaccgagagtcgcttgtaattttcacggaa

SEQ ID NO: 4592 - DNA, 36 bp, Artificial Sequence
  Synthetic oligonucleotide
cgcgattgacaagcaaactcgaggtcggggttcgta

SEQ ID NO: 4593 - DNA, 37 bp, Artificial Sequence
  Synthetic oligonucleotide
gcatagtacgttgggatattgtgtcgcgggtaagcga

SEQ ID NO: 4594 - DNA, 36 bp, Artificial Sequence
  Synthetic oligonucleotide
gccgcattccacgtaggtggtagtgctccagcacga

SEQ ID NO: 4595 - DNA, 37 bp, Artificial Sequence
  Synthetic oligonucleotide
ggacacaggactagcgacggagttgtcccgtgagcga

SEQ ID NO: 4596 - DNA, 36 bp, Artificial Sequence
  Synthetic oligonucleotide
ggataaccagatcacgatatgccatgaataggaaca

SEQ ID NO: 4597 - DNA, 36 bp, Artificial Sequence
  Synthetic oligonucleotide
tgaagagtgtagtctttttataggggcgtcgttcga

SEQ ID NO: 4598 - DNA, 36 bp, Artificial Sequence
  Synthetic oligonucleotide
tttatgtgggccaggttcaccccgtatcgtagtaaa

SEQ ID NO: 4599 - DNA, 36 bp, Artificial Sequence
  Synthetic oligonucleotide
gcatgtgagcgcccggggttggtaaggtgctgagta

SEQ ID NO: 4600 - DNA, 37 bp, Artificial Sequence
  Synthetic oligonucleotide
ggtacattggtgcgatcgtagttttgcttatgcccga

SEQ ID NO: 4601 - DNA, 35 bp, Artificial Sequence
  Synthetic oligonucleotide
gctcctaccgatgctaccgctgccgtcaagcctga

SEQ ID NO: 4602 - DNA, 38 bp, Artificial Sequence
  Synthetic oligonucleotide
taatacctcgactcggaggacctttttgagaccggtga

SEQ ID NO: 4603 - DNA, 36 bp, Artificial Sequence
  Synthetic oligonucleotide
cctgatcgtacgaggccgtacatagccacagtaata

SEQ ID NO: 4604 - DNA, 36 bp, Artificial Sequence
  Synthetic oligonucleotide
cacggtacaccactacgaagagggactttgcacgaa

SEQ ID NO: 4605 - DNA, 36 bp, Artificial Sequence
  Synthetic oligonucleotide
aaacagacgcgtagttggccatgtggagccatcgta

SEQ ID NO: 4606 - DNA, 36 bp, Artificial Sequence
  Synthetic oligonucleotide
aaacgctgctgcgggtactaggcggccaaggtttaa

SEQ ID NO: 4607 - DNA, 37 bp, Artificial Sequence
  Synthetic oligonucleotide
acagtacacccactccgcctcaatccaagcccatcga

SEQ ID NO: 4608 - DNA, 36 bp, Artificial Sequence
  Synthetic oligonucleotide
acatttggattttctcagttgtcctgcaggccatga

SEQ ID NO: 4609 - DNA, 38 bp, Artificial Sequence
  Synthetic oligonucleotide
agaggaaacacctgtgaaagtgcattctgtcgctctga

SEQ ID NO: 4610 - DNA, 38 bp, Artificial Sequence
  Synthetic oligonucleotide
agggcatgtacagtagatatggttgttagactccgtga

SEQ ID NO: 4611 - DNA, 36 bp, Artificial Sequence
  Synthetic oligonucleotide
agggtccgtgctttatcattgaaaaggcctagatgt

SEQ ID NO: 4612 - DNA, 35 bp, Artificial Sequence
  Synthetic oligonucleotide
agggtgggggactgtcgtacggggagagtttgttg

SEQ ID NO: 4613 - DNA, 37 bp, Artificial Sequence
  Synthetic oligonucleotide
ataggtctggggcgcttatgcgcgtatttagatcgga

SEQ ID NO: 4614 - DNA, 36 bp, Artificial Sequence
  Synthetic oligonucleotide
atcgaacgcccggaataagcgagcgggacactccga

SEQ ID NO: 4615 - DNA, 36 bp, Artificial Sequence
  Synthetic oligonucleotide
atcggacgtaccttgctttctaggggcatacccgaa

SEQ ID NO: 4616 - DNA, 38 bp, Artificial Sequence
  Synthetic oligonucleotide
attcatcatcagagggagtatgtcgctgaaaactttga

SEQ ID NO: 4617 - DNA, 38 bp, Artificial Sequence
  Synthetic oligonucleotide
atttgggttgtttgacatgctgtttaggacggtattga

SEQ ID NO: 4618 - DNA, 37 bp, Artificial Sequence
  Synthetic oligonucleotide
ccatccgagcacaggacttaccgaagggatggggtga

SEQ ID NO: 4619 - DNA, 37 bp, Artificial Sequence
  Synthetic oligonucleotide
cctggagtgcaggtttgttattagcgtgaaatcacga

SEQ ID NO: 4620 - DNA, 38 bp, Artificial Sequence
  Synthetic oligonucleotide
cgacgagattacgtctctgcggactactgagtgtgtga

SEQ ID NO: 4621 - DNA, 37 bp, Artificial Sequence
  Synthetic oligonucleotide
cgaggtaatactttcaatctcgacttgcagtattaga

SEQ ID NO: 4622 - DNA, 38 bp, Artificial Sequence
  Synthetic oligonucleotide
cgtgggagttttagacgcgcctttctaaagcagattga

SEQ ID NO: 4623 - DNA, 38 bp, Artificial Sequence
  Synthetic oligonucleotide
cttagggcctggaagtgaaagtgtatgctcaactatga

SEQ ID NO: 4624 - DNA, 35 bp, Artificial Sequence
  Synthetic oligonucleotide
gagggtggccccctttctacctttaagtgatgtgg

SEQ ID NO: 4625 - DNA, 35 bp, Artificial Sequence
  Synthetic oligonucleotide
gcaagatgggatgcctaggtctgctcgctgtacta

SEQ ID NO: 4626 - DNA, 36 bp, Artificial Sequence
  Synthetic oligonucleotide
gcatcctaagaatggtgctaacgctctcacgtacaa

SEQ ID NO: 4627 - DNA, 37 bp, Artificial Sequence
  Synthetic oligonucleotide
gccttaagagccttgttatgctacgttaactcttaga

SEQ ID NO: 4628 - DNA, 37 bp, Artificial Sequence
  Synthetic oligonucleotide
gcgatccagcttaacggccgagacgctactgggttga

SEQ ID NO: 4629 - DNA, 38 bp, Artificial Sequence
  Synthetic oligonucleotide
gctgtggggaggtactccggggggcatggaacgcttga

SEQ ID NO: 4630 - DNA, 36 bp, Artificial Sequence
  Synthetic oligonucleotide
ggggctgaggatacacgtccttagccacaggtggta

SEQ ID NO: 4631 - DNA, 37 bp, Artificial Sequence
  Synthetic oligonucleotide
gtcaagcttattgtgctactggattactgcaaatgga

SEQ ID NO: 4632 - DNA, 36 bp, Artificial Sequence
  Synthetic oligonucleotide
gtgcaccagctgcagttaaattttaggcacgactga

SEQ ID NO: 4633 - DNA, 36 bp, Artificial Sequence
  Synthetic oligonucleotide
gtggctacatggacgcactgggctttttatttatga

SEQ ID NO: 4634 - DNA, 37 bp, Artificial Sequence
  Synthetic oligonucleotide
gttgcgcacgtagaggggggagcggtacggtcactga

SEQ ID NO: 4635 - DNA, 36 bp, Artificial Sequence
  Synthetic oligonucleotide
tacaagacagagctaggtgacaacgggccatcttga

SEQ ID NO: 4636 - DNA, 36 bp, Artificial Sequence
  Synthetic oligonucleotide
tacactgggagctgagcatctcccgctacgtagcaa

SEQ ID NO: 4637 - DNA, 37 bp, Artificial Sequence
  Synthetic oligonucleotide
taccgacttagactgaccgccatggtttcatcggcga

SEQ ID NO: 4638 - DNA, 37 bp, Artificial Sequence
  Synthetic oligonucleotide
tccctcagaccggtgtcgtgtaatgcagaacgaatga

SEQ ID NO: 4639 - DNA, 35 bp, Artificial Sequence
  Synthetic oligonucleotide
tggaatacaaatagctccacgctggaccaactgtg

SEQ ID NO: 4640 - DNA, 36 bp, Artificial Sequence
  Synthetic oligonucleotide
tggggttcggccattgaataatagtctcaaacagta

SEQ ID NO: 4641 - DNA, 36 bp, Artificial Sequence
  Synthetic oligonucleotide
tgtcatttcataaacatggctttcatactcagataa

SEQ ID NO: 4642 - DNA, 38 bp, Artificial Sequence
  Synthetic oligonucleotide
tgtccgctgactgacccgaatggtaggactccgtctga

SEQ ID NO: 4643 - DNA, 37 bp, Artificial Sequence
  Synthetic oligonucleotide
ttaacacataacgcataaaggtctgggggggtaccga

SEQ ID NO: 4644 - DNA, 35 bp, Artificial Sequence
  Synthetic oligonucleotide
gtgcgagttacccagtactgagtgcgcgggtttgc

SEQ ID NO: 4645 - DNA, 37 bp, Artificial Sequence
  Synthetic oligonucleotide
tcgtacagaacatgttaatgtaattgggaagttcgga

SEQ ID NO: 4646 - DNA, 36 bp, Artificial Sequence
  Synthetic oligonucleotide
aacagtcttcgcaagaccggtgagtgggtactggaa

SEQ ID NO: 4647 - DNA, 38 bp, Artificial Sequence
  Synthetic oligonucleotide
actttgtgaagcccctccgtccatagtaattcgcgtga

SEQ ID NO: 4648 - DNA, 38 bp, Artificial Sequence
  Synthetic oligonucleotide
agtgctcgaaacacacgctctgtattgttatgatgtga

SEQ ID NO: 4649 - DNA, 37 bp, Artificial Sequence
  Synthetic oligonucleotide
gccctgccgccaaaggacggacgataacttacgtaga

SEQ ID NO: 4650 - DNA, 38 bp, Artificial Sequence
  Synthetic oligonucleotide
gcgggatcgccctcagcgccaacgcgcaacgaaactga

SEQ ID NO: 4651 - DNA, 35 bp, Artificial Sequence
  Synthetic oligonucleotide
gtaggggggtcgttacgcccccggtttcggattgt

SEQ ID NO: 4652 - DNA, 37 bp, Artificial Sequence
  Synthetic oligonucleotide
tagccctcccaactgacgtttctggacttagggtcga

SEQ ID NO: 4653 - DNA, 37 bp, Artificial Sequence
  Synthetic oligonucleotide
tgaactgttagtcaaacgcgctgagttaataccgcga

SEQ ID NO: 4654 - DNA, 37 bp, Artificial Sequence
  Synthetic oligonucleotide
ttgccccgagactctagcatggttcagaattgcgcga

SEQ ID NO: 4655 - DNA, 38 bp, Artificial Sequence
  Synthetic oligonucleotide
ttttagcttgcaaagaagaacagtaagcctttgtctga

SEQ ID NO: 4656 - DNA, 38 bp, Artificial Sequence
  Synthetic oligonucleotide
aagcgtcaataatgcaggaatgctaatctacccagtga

SEQ ID NO: 4657 - DNA, 37 bp, Artificial Sequence
  Synthetic oligonucleotide
accatagtagtctagtgggaactgctgcgctcccgga

SEQ ID NO: 4658 - DNA, 36 bp, Artificial Sequence
  Synthetic oligonucleotide
atatgctttagcttacaggagaaggttaagcacgta

SEQ ID NO: 4659 - DNA, 37 bp, Artificial Sequence
  Synthetic oligonucleotide
atcgtacgaaactcagtaaagcacctgaactacgcga

SEQ ID NO: 4660 - DNA, 37 bp, Artificial Sequence
  Synthetic oligonucleotide
atgaactctgaaatatcacgaaggtcttaggtgccga

SEQ ID NO: 4661 - DNA, 35 bp, Artificial Sequence
  Synthetic oligonucleotide
cacgaacgtggagtagacggtcggtgccacctgtg

SEQ ID NO: 4662 - DNA, 35 bp, Artificial Sequence
  Synthetic oligonucleotide
caggttttgcttgcaaaacttacgactgtacgagg

SEQ ID NO: 4663 - DNA, 37 bp, Artificial Sequence
  Synthetic oligonucleotide
cttagttggagtcgtaaactatgacgccggttatgga

SEQ ID NO: 4664 - DNA, 38 bp, Artificial Sequence
  Synthetic oligonucleotide
gacagccatggtggagttacgtgcttttcgcgttatga

SEQ ID NO: 4665 - DNA, 35 bp, Artificial Sequence
  Synthetic oligonucleotide
gaccgctgttcagtaaaccatgtaaagggtgctgt

SEQ ID NO: 4666 - DNA, 37 bp, Artificial Sequence
  Synthetic oligonucleotide
gcttccggacgcacgacatggagcgcattcaacttga

SEQ ID NO: 4667 - DNA, 38 bp, Artificial Sequence
  Synthetic oligonucleotide
ggaaatcctgcgagcagtccggctggttattctggtga

SEQ ID NO: 4668 - DNA, 38 bp, Artificial Sequence
  Synthetic oligonucleotide
gtgcggctgttactacgcaatcaatgctacgttaatga

SEQ ID NO: 4669 - DNA, 36 bp, Artificial Sequence
  Synthetic oligonucleotide
gtggagcgaagggcaaatgctgctcccacgactgta

SEQ ID NO: 4670 - DNA, 37 bp, Artificial Sequence
  Synthetic oligonucleotide
gttacgtttggttgtcaccgtgggggcgctcacacga

SEQ ID NO: 4671 - DNA, 35 bp, Artificial Sequence
  Synthetic oligonucleotide
gttcctctgaggtgcctattcgaacggatgggttg

SEQ ID NO: 4672 - DNA, 37 bp, Artificial Sequence
  Synthetic oligonucleotide
tgcatccggggaggcttgtctggagtagacataatga

SEQ ID NO: 4673 - DNA, 38 bp, Artificial Sequence
  Synthetic oligonucleotide
tgtgctaaaatccacgttgtaactagtgattatcgtga

SEQ ID NO: 4674 - DNA, 36 bp, Artificial Sequence
  Synthetic oligonucleotide
gagtcgtctgcaactctcgtgccgacgacacaggta

SEQ ID NO: 4675 - DNA, 37 bp, Artificial Sequence
  Synthetic oligonucleotide
tcaagggaagaggcgcacgtacaactacctcacagga

SEQ ID NO: 4676 - DNA, 35 bp, Artificial Sequence
  Synthetic oligonucleotide
agggacggtatcattacgtgtctgatcaaggtttg

SEQ ID NO: 4677 - DNA, 34 bp, Artificial Sequence
  Synthetic oligonucleotide
aacacacccaaagtgaggacggcggagagctcaa

SEQ ID NO: 4678 - DNA, 38 bp, Artificial Sequence
  Synthetic oligonucleotide
acatggagacgtgatacgacgctatggggtacagctga

SEQ ID NO: 4679 - DNA, 36 bp, Artificial Sequence
  Synthetic oligonucleotide
acctccacagggcatgagaaatcgtcatcatttgta

SEQ ID NO: 4680 - DNA, 37 bp, Artificial Sequence
  Synthetic oligonucleotide
acgggttgagggttcccacgtaaagcaagactaggga

SEQ ID NO: 4681 - DNA, 37 bp, Artificial Sequence
  Synthetic oligonucleotide
acggtcatgggctatgatcgggtggtcccacaatcga

SEQ ID NO: 4682 - DNA, 37 bp, Artificial Sequence
  Synthetic oligonucleotide
gaggttgtcacgcatctgctgaagcctggcttctgga

SEQ ID NO: 4683 - DNA, 35 bp, Artificial Sequence
  Synthetic oligonucleotide
gagaacgtcacgtcatgatatttggtacgaacctc

SEQ ID NO: 4684 - DNA, 35 bp, Artificial Sequence
  Synthetic oligonucleotide
acggacctgtactcactggtacgaatacatcggag

SEQ ID NO: 4685 - DNA, 38 bp, Artificial Sequence
  Synthetic oligonucleotide
acgtactgagaggtggaaagggggtgccgctgaaatga

SEQ ID NO: 4686 - DNA, 37 bp, Artificial Sequence
  Synthetic oligonucleotide
actatagggggcgcccatggttccgctagtgccgtga

SEQ ID NO: 4687 - DNA, 35 bp, Artificial Sequence
  Synthetic oligonucleotide
agaggctaccgtttctgtttggctataggtacgta

SEQ ID NO: 4688 - DNA, 38 bp, Artificial Sequence
  Synthetic oligonucleotide
aggcgtgaactgtgctgcacaacttgcgttcttaatga

SEQ ID NO: 4689 - DNA, 38 bp, Artificial Sequence
  Synthetic oligonucleotide
agtatgcccgatgcgccttgcgtacggtgcctgagtga

SEQ ID NO: 4690 - DNA, 35 bp, Artificial Sequence
  Synthetic oligonucleotide
ccagaggaggtcaactaatactgcagttcgggatt

SEQ ID NO: 4691 - DNA, 36 bp, Artificial Sequence
  Synthetic oligonucleotide
gagagtagaattggtctaaaattgctcacaccagta

SEQ ID NO: 4692 - DNA, 36 bp, Artificial Sequence
  Synthetic oligonucleotide
gatcgtactgtgaagctggggcgtattagcacgcca

SEQ ID NO: 4693 - DNA, 37 bp, Artificial Sequence
  Synthetic oligonucleotide
gctattccagccggtaggctatccggtggtgtgtcga

SEQ ID NO: 4694 - DNA, 36 bp, Artificial Sequence
  Synthetic oligonucleotide
tagggtgcactatttagttcatgaactggcctgtta

SEQ ID NO: 4695 - DNA, 36 bp, Artificial Sequence
  Synthetic oligonucleotide
tccgggcacccggagcgacgcggcttactttcaaga

SEQ ID NO: 4696 - DNA, 37 bp, Artificial Sequence
  Synthetic oligonucleotide
ttggcgtatgcacactgaaggacgcttaatcctagga

SEQ ID NO: 4697 - DNA, 37 bp, Artificial Sequence
  Synthetic oligonucleotide
acgccatagagtgttaaacgttaaggcatgagggcga

SEQ ID NO: 4698 - DNA, 35 bp, Artificial Sequence
  Synthetic oligonucleotide
tatgccaatgattaggattatgcacatatttggtc

SEQ ID NO: 4699 - DNA, 37 bp, Artificial Sequence
  Synthetic oligonucleotide
aaacaactgttccgagttcgcgataacgtcttgggga

SEQ ID NO: 4700 - DNA, 35 bp, Artificial Sequence
  Synthetic oligonucleotide
aatagttgttatatgccggatgtgttgggtcaagg

SEQ ID NO: 4701 - DNA, 36 bp, Artificial Sequence
  Synthetic oligonucleotide
aatatgtcactcactaagcgactttctattgcgaca

SEQ ID NO: 4702 - DNA, 38 bp, Artificial Sequence
  Synthetic oligonucleotide
acataagagtgtgacgcggccatgtgcacggattctga

SEQ ID NO: 4703 - DNA, 38 bp, Artificial Sequence
  Synthetic oligonucleotide
accctgtacctacggatcacaagtgttagagtggttga

SEQ ID NO: 4704 - DNA, 38 bp, Artificial Sequence
  Synthetic oligonucleotide
agctggcgtgctgcagcttattgacatctataggctga

SEQ ID NO: 4705 - DNA, 38 bp, Artificial Sequence
  Synthetic oligonucleotide
agggcttagaccacagcataagtacgtggcattcgtga

SEQ ID NO: 4706 - DNA, 35 bp, Artificial Sequence
  Synthetic oligonucleotide
agtcagcagattaaagtaacactttggtacgagaa

SEQ ID NO: 4707 - DNA, 36 bp, Artificial Sequence
  Synthetic oligonucleotide
atcataagcctcatttagctcgtacaaacgggccta

SEQ ID NO: 4708 - DNA, 37 bp, Artificial Sequence
  Synthetic oligonucleotide
cgatcaccccccgcgtacagcaagaagcaatcattga

SEQ ID NO: 4709 - DNA, 36 bp, Artificial Sequence
  Synthetic oligonucleotide
gccatgaagtaaaaatgatatgactggtgggcacga

SEQ ID NO: 4710 - DNA, 38 bp, Artificial Sequence
  Synthetic oligonucleotide
gcggggaagctggtcgggctactaccccggtgaattga

SEQ ID NO: 4711 - DNA, 36 bp, Artificial Sequence
  Synthetic oligonucleotide
ggatatccacgagatgtccgatcaagtgggatctta

SEQ ID NO: 4712 - DNA, 38 bp, Artificial Sequence
  Synthetic oligonucleotide
gggctggagttcggcctactggtcgagaagaaaggtga

SEQ ID NO: 4713 - DNA, 38 bp, Artificial Sequence
  Synthetic oligonucleotide
taccacactgacggcttgcgttacgctgcccggtttga

SEQ ID NO: 4714 - DNA, 35 bp, Artificial Sequence
  Synthetic oligonucleotide
tatgcttcaatcatgcatgtttagcgatgagccgg

SEQ ID NO: 4715 - DNA, 35 bp, Artificial Sequence
  Synthetic oligonucleotide
tattccgaggcattcgcgttgcgaggggattcaac

SEQ ID NO: 4716 - DNA, 36 bp, Artificial Sequence
  Synthetic oligonucleotide
tattggcaattgagtgaggtggacaaagccaagaga

SEQ ID NO: 4717 - DNA, 36 bp, Artificial Sequence
  Synthetic oligonucleotide
tccgaactcgcactgtgagtagtggtagttatatta

SEQ ID NO: 4718 - DNA, 36 bp, Artificial Sequence
  Synthetic oligonucleotide
tgagttaacgccccttgctccgaccagattgagaaa

SEQ ID NO: 4719 - DNA, 38 bp, Artificial Sequence
  Synthetic oligonucleotide
tgcctatttccagccgtatacggtgttacggtttgtga

SEQ ID NO: 4720 - DNA, 35 bp, Artificial Sequence
  Synthetic oligonucleotide
tgggtcgtgcggtcatgggggcgtaacttatgagc

SEQ ID NO: 4721 - DNA, 35 bp, Artificial Sequence
  Synthetic oligonucleotide
ttgcccggtacaagggtaatcctggcgtgtgacgc

SEQ ID NO: 4722 - DNA, 35 bp, Artificial Sequence
  Synthetic oligonucleotide
ttgcttctgagtgctttgtcctggggcgtttatgc

SEQ ID NO: 4723 - DNA, 35 bp, Artificial Sequence
  Synthetic oligonucleotide
ttggcccaaaacatcagtcgttagtttggatggtg

SEQ ID NO: 4724 - DNA, 37 bp, Artificial Sequence
  Synthetic oligonucleotide
ttgttagcccagaacgcacgcggaaaggctagataga

SEQ ID NO: 4725 - DNA, 35 bp, Artificial Sequence
  Synthetic oligonucleotide
gtatggtaccatgtcgcatggtggcgcatgaacgg

SEQ ID NO: 4726 - DNA, 35 bp, Artificial Sequence
  Synthetic oligonucleotide
agaacgcgtgaaaacaacgtgagatccatgtgcgg

SEQ ID NO: 4727 - DNA, 38 bp, Artificial Sequence
  Synthetic oligonucleotide
atcgtgacgtcaggctgtcacgcacttagttcccatga

SEQ ID NO: 4728 - DNA, 38 bp, Artificial Sequence
  Synthetic oligonucleotide
gtaagggttaggccggtatttcgaagatgttatgctga

SEQ ID NO: 4729 - DNA, 37 bp, Artificial Sequence
  Synthetic oligonucleotide
tcctgagagctggacagctcatgcgagtggtttcgga

SEQ ID NO: 4730 - DNA, 35 bp, Artificial Sequence
  Synthetic oligonucleotide
accctgacaatgcataggatatggtgcgggcgact

SEQ ID NO: 4731 - DNA, 35 bp, Artificial Sequence
  Synthetic oligonucleotide
acttcttatgtcgaatcgtgctccgcacaataacg

SEQ ID NO: 4732 - DNA, 38 bp, Artificial Sequence
  Synthetic oligonucleotide
cccgcggtttgggcgagagcgcgacgtatgcagcatga

SEQ ID NO: 4733 - DNA, 37 bp, Artificial Sequence
  Synthetic oligonucleotide
ggtgagtctggaagtctaataaggtaatgagcgtgga

SEQ ID NO: 4734 - DNA, 36 bp, Artificial Sequence
  Synthetic oligonucleotide
tcaccctgggttcattgtttgggtacttaccgagta

SEQ ID NO: 4735 - DNA, 38 bp, Artificial Sequence
  Synthetic oligonucleotide
tgcgtggcatatcacccgcaacaggaaactactggtga

SEQ ID NO: 4736 - DNA, 37 bp, Artificial Sequence
  Synthetic oligonucleotide
agaccgatacgtatgctaacattggactatgtggaga

SEQ ID NO: 4737 - DNA, 38 bp, Artificial Sequence
  Synthetic oligonucleotide
aaaggactgcctcaaaagataacgggccctgtgagtga

SEQ ID NO: 4738 - DNA, 36 bp, Artificial Sequence
  Synthetic oligonucleotide
aaatgcgagactataaaatgtcaagtaggcctttca

SEQ ID NO: 4739 - DNA, 37 bp, Artificial Sequence
  Synthetic oligonucleotide
agaacgatacctaaggatttggcatatgtgttgagga

SEQ ID NO: 4740 - DNA, 37 bp, Artificial Sequence
  Synthetic oligonucleotide
agtctgttacgcagatttaacgaccaagcaccaacga

SEQ ID NO: 4741 - DNA, 35 bp, Artificial Sequence
  Synthetic oligonucleotide
agtgatacgagttgtgctagtatgcatttattgac

SEQ ID NO: 4742 - DNA, 38 bp, Artificial Sequence
  Synthetic oligonucleotide
catgcgaattaacgcgctaatggggtgtgataaattga

SEQ ID NO: 4743 - DNA, 35 bp, Artificial Sequence
  Synthetic oligonucleotide
ctgcggagggtcgttaaacacgtcgtacagtaatg

SEQ ID NO: 4744 - DNA, 36 bp, Artificial Sequence
  Synthetic oligonucleotide
gcaatcgccactacttaggcatatggatacgaccga

SEQ ID NO: 4745 - DNA, 35 bp, Artificial Sequence
  Synthetic oligonucleotide
gcgcgttggagcttaaatcagctacctaccgtcat

SEQ ID NO: 4746 - DNA, 36 bp, Artificial Sequence
  Synthetic oligonucleotide
ggattgcgcattgcatcattacagacggcccgagta

SEQ ID NO: 4747 - DNA, 36 bp, Artificial Sequence
  Synthetic oligonucleotide
ggtagttgttgcccattgttggtgatgcatactgca

SEQ ID NO: 4748 - DNA, 38 bp, Artificial Sequence
  Synthetic oligonucleotide
tacgcccctgactgcactcggactgatgaacctggtga

SEQ ID NO: 4749 - DNA, 37 bp, Artificial Sequence
  Synthetic oligonucleotide
tactcgttaccctcttgtgtagtaatggttcgccgga

SEQ ID NO: 4750 - DNA, 38 bp, Artificial Sequence
  Synthetic oligonucleotide
tcccagatacgttactgctcacctccaacggtgcctga

SEQ ID NO: 4751 - DNA, 36 bp, Artificial Sequence
  Synthetic oligonucleotide
tctgtccctggtcctgatatagttgtcgtatgagca

SEQ ID NO: 4752 - DNA, 38 bp, Artificial Sequence
  Synthetic oligonucleotide
tgcatcgtgccccgcacaggtcaccatccacacactga

SEQ ID NO: 4753 - DNA, 37 bp, Artificial Sequence
  Synthetic oligonucleotide
agaccctgctgagtagccgactaacacaggatagtga

SEQ ID NO: 4754 - DNA, 35 bp, Artificial Sequence
  Synthetic oligonucleotide
agggggtcggtacatgcctgacggcctgcagtttg

SEQ ID NO: 4755 - DNA, 37 bp, Artificial Sequence
  Synthetic oligonucleotide
gtttggatgcttcgtagtgatttcgcgtctgtcggga

SEQ ID NO: 4756 - DNA, 35 bp, Artificial Sequence
  Synthetic oligonucleotide
agagctactgcattattctcaatagacgactagga

SEQ ID NO: 4757 - DNA, 38 bp, Artificial Sequence
  Synthetic oligonucleotide
tacgagtggcaacgattatagcgttctagaagttttga

SEQ ID NO: 4758 - DNA, 37 bp, Artificial Sequence
  Synthetic oligonucleotide
ttataaaagcgcatccttacaaggatctgcgttctga

SEQ ID NO: 4759 - DNA, 35 bp, Artificial Sequence
  Synthetic oligonucleotide
aatcacggctcgaacttttaagtagaagaccatct

SEQ ID NO: 4760 - DNA, 36 bp, Artificial Sequence
  Synthetic oligonucleotide
acctaccttaactctcctcgacggccgccttaagga

SEQ ID NO: 4761 - DNA, 36 bp, Artificial Sequence
  Synthetic oligonucleotide
atgttggtctgtacgtaaacggccagattttgttta

SEQ ID NO: 4762 - DNA, 35 bp, Artificial Sequence
  Synthetic oligonucleotide
atttagtcgcgttataaccacgcatatagtagatg

SEQ ID NO: 4763 - DNA, 31 bp, Artificial Sequence
  Synthetic oligonucleotide
ctcaagctttagtgtacgttctgctggatga

SEQ ID NO: 4764 - DNA, 36 bp, Artificial Sequence
  Synthetic oligonucleotide
gacatcatgccagtgtcatttgttctcaactaagga

SEQ ID NO: 4765 - DNA, 37 bp, Artificial Sequence
  Synthetic oligonucleotide
gacatcgttgcacccgagattcaggtcactgacccga

SEQ ID NO: 4766 - DNA, 36 bp, Artificial Sequence
  Synthetic oligonucleotide
gcaaccgcgatcttacacgtcagggggctttgtcga

SEQ ID NO: 4767 - DNA, 36 bp, Artificial Sequence
  Synthetic oligonucleotide
gcaagtaacgcaaacataaggaccggctacctatga

SEQ ID NO: 4768 - DNA, 36 bp, Artificial Sequence
  Synthetic oligonucleotide
gcaggcgtaagtagcggattgatttaacttcatgga

SEQ ID NO: 4769 - DNA, 35 bp, Artificial Sequence
  Synthetic oligonucleotide
gctccaggccatgagcccctgcccatgagtgatgt

SEQ ID NO: 4770 - DNA, 35 bp, Artificial Sequence
  Synthetic oligonucleotide
gtgccgtgacgaggttcatcgaatagcaaacgttg

SEQ ID NO: 4771 - DNA, 37 bp, Artificial Sequence
  Synthetic oligonucleotide
gttacatcgtaacggtcctacaggtctttaatggcga

SEQ ID NO: 4772 - DNA, 35 bp, Artificial Sequence
  Synthetic oligonucleotide
taaggaaggtgccgaataccgatacggtttccact

SEQ ID NO: 4773 - DNA, 38 bp, Artificial Sequence
  Synthetic oligonucleotide
tcgttgaacacacgatgaacgctatatgaggttggtga

SEQ ID NO: 4774 - DNA, 35 bp, Artificial Sequence
  Synthetic oligonucleotide
tgagcggaccaggattactggtccctcgacacgag

SEQ ID NO: 4775 - DNA, 37 bp, Artificial Sequence
  Synthetic oligonucleotide
tggtagtacatagggcgtcgttctcgataacggatga

SEQ ID NO: 4776 - DNA, 35 bp, Artificial Sequence
  Synthetic oligonucleotide
tgtttcgcgttcggaacgactgttaatgagattag

SEQ ID NO: 4777 - DNA, 36 bp, Artificial Sequence
  Synthetic oligonucleotide
ttgcgatagggagttctgtgacaccaaatgctggga

SEQ ID NO: 4778 - DNA, 35 bp, Artificial Sequence
  Synthetic oligonucleotide
gtgggaggtcatacgtcatggcttcccattccatc

SEQ ID NO: 4779 - DNA, 38 bp, Artificial Sequence
  Synthetic oligonucleotide
attgcgttcacagggacaccacatactgtactacatga

SEQ ID NO: 4780 - DNA, 38 bp, Artificial Sequence
  Synthetic oligonucleotide
ccgtcccatcatgaacgggtaaaacggctggatcgtga

SEQ ID NO: 4781 - DNA, 38 bp, Artificial Sequence
  Synthetic oligonucleotide
ggtgggggactggagttaaatcatgcaaaggtttatga

SEQ ID NO: 4782 - DNA, 35 bp, Artificial Sequence
  Synthetic oligonucleotide
taagcacccctatgtgcaaccaggtgtacgacatg

SEQ ID NO: 4783 - DNA, 38 bp, Artificial Sequence
  Synthetic oligonucleotide
tgattccacgcgggtgaaacatggccaatactgcatga

SEQ ID NO: 4784 - DNA, 38 bp, Artificial Sequence
  Synthetic oligonucleotide
agagtgacaggccatgcgtgtagattaaggaatgttga

SEQ ID NO: 4785 - DNA, 37 bp, Artificial Sequence
  Synthetic oligonucleotide
caggctcactgaccaattgtggtctagcgtagaacga

SEQ ID NO: 4786 - DNA, 37 bp, Artificial Sequence
  Synthetic oligonucleotide
gagccttaggaaatggggttctagtactgacaacaga

SEQ ID NO: 4787 - DNA, 35 bp, Artificial Sequence
  Synthetic oligonucleotide
acgcgctgttgccgtacgtataagggcgagcaacc

SEQ ID NO: 4788 - DNA, 37 bp, Artificial Sequence
  Synthetic oligonucleotide
agaattatacacatagttgacccattgcggagctaga

SEQ ID NO: 4789 - DNA, 38 bp, Artificial Sequence
  Synthetic oligonucleotide
agtgaagtcgctgcgactttgccctttgaccctgttga

SEQ ID NO: 4790 - DNA, 36 bp, Artificial Sequence
  Synthetic oligonucleotide
agtggccgaataccaagggtgggcgctgtggagtga

SEQ ID NO: 4791 - DNA, 37 bp, Artificial Sequence
  Synthetic oligonucleotide
attgctggtcggtctgatagtcgggattggtggggga

SEQ ID NO: 4792 - DNA, 38 bp, Artificial Sequence
  Synthetic oligonucleotide
cacgatcggtttcgtgagtaacttcactactgcaatga

SEQ ID NO: 4793 - DNA, 34 bp, Artificial Sequence
  Synthetic oligonucleotide
cgacgcccacagtgcctcagttcgaggaaaccgg

SEQ ID NO: 4794 - DNA, 35 bp, Artificial Sequence
  Synthetic oligonucleotide
gacttgactccctaagcgatagaacgtttcccccc

SEQ ID NO: 4795 - DNA, 36 bp, Artificial Sequence
  Synthetic oligonucleotide
gagattactacacgattgtgggaatgggcccctcta

SEQ ID NO: 4796 - DNA, 37 bp, Artificial Sequence
  Synthetic oligonucleotide
gcatgtcatatagatacggcatttcgtatgagactga

SEQ ID NO: 4797 - DNA, 35 bp, Artificial Sequence
  Synthetic oligonucleotide
gcccaggtaacgtgttaggggtttgtgctagtgag

SEQ ID NO: 4798 - DNA, 35 bp, Artificial Sequence
  Synthetic oligonucleotide
ggggcgctatgctgcttttgcctcacgacaagtag

SEQ ID NO: 4799 - DNA, 37 bp, Artificial Sequence
  Synthetic oligonucleotide
ggtacgtcacattggactatggctttccaccatagga

SEQ ID NO: 4800 - DNA, 36 bp, Artificial Sequence
  Synthetic oligonucleotide
gtcatcagaatgtattcgtccttcatgaaggcccaa

SEQ ID NO: 4801 - DNA, 38 bp, Artificial Sequence
  Synthetic oligonucleotide
gtgaatatacgcacatacgcacttcatcggagtactga

SEQ ID NO: 4802 - DNA, 35 bp, Artificial Sequence
  Synthetic oligonucleotide
gtgatcaccaatggcgagaattttgtcacacccta

SEQ ID NO: 4803 - DNA, 38 bp, Artificial Sequence
  Synthetic oligonucleotide
gtgtgtcaggaatgtagcgctgccgcgagggggtttga

SEQ ID NO: 4804 - DNA, 36 bp, Artificial Sequence
  Synthetic oligonucleotide
gttaagggcgtaaccccatagtactgttccgtcgga

SEQ ID NO: 4805 - DNA, 35 bp, Artificial Sequence
  Synthetic oligonucleotide
tagttacggctgtggacgctttgagggcgatttcc

SEQ ID NO: 4806 - DNA, 38 bp, Artificial Sequence
  Synthetic oligonucleotide
tcaagaccgagtcagcagaggacacttctgaggtatga

SEQ ID NO: 4807 - DNA, 37 bp, Artificial Sequence
  Synthetic oligonucleotide
tcacgccccctaggtgaccgcggaattactatgcaga

SEQ ID NO: 4808 - DNA, 38 bp, Artificial Sequence
  Synthetic oligonucleotide
tctacgatgatacgctaggtgctcacagatagtactga

SEQ ID NO: 4809 - DNA, 38 bp, Artificial Sequence
  Synthetic oligonucleotide
tgacatgaaggtggggtcaacttctcaaggttgtgtga

SEQ ID NO: 4810 - DNA, 38 bp, Artificial Sequence
  Synthetic oligonucleotide
tgacgttcttatcgttataatgggtcgctgaaggttga

SEQ ID NO: 4811 - DNA, 38 bp, Artificial Sequence
  Synthetic oligonucleotide
tgatccagaggggcaccaaggcatttggggtgctatga

SEQ ID NO: 4812 - DNA, 35 bp, Artificial Sequence
  Synthetic oligonucleotide
tgatctggccagagcgagagtttctcgcgtggacg

SEQ ID NO: 4813 - DNA, 37 bp, Artificial Sequence
  Synthetic oligonucleotide
tgctgggggtgtacggagtacgcacagccgctaagga

SEQ ID NO: 4814 - DNA, 37 bp, Artificial Sequence
  Synthetic oligonucleotide
tgtgtagttttgcttgcgattgctgttgggctgacga

SEQ ID NO: 4815 - DNA, 37 bp, Artificial Sequence
  Synthetic oligonucleotide
ttacgtaacgaatagtcagcacactcattgaatgcga

SEQ ID NO: 4816 - DNA, 36 bp, Artificial Sequence
  Synthetic oligonucleotide
ttcagttccgcggtgtcgcccactgcgtaaattgta

SEQ ID NO: 4817 - DNA, 35 bp, Artificial Sequence
  Synthetic oligonucleotide
aacgcagtagtggtggtcacgtggaataattgaaa

SEQ ID NO: 4818 - DNA, 36 bp, Artificial Sequence
  Synthetic oligonucleotide
acacgagggggggtgctggcggagccccctatagta

SEQ ID NO: 4819 - DNA, 38 bp, Artificial Sequence
  Synthetic oligonucleotide
acctaacaccagtcatgaagtgtcgggtagtacgttga

SEQ ID NO: 4820 - DNA, 37 bp, Artificial Sequence
  Synthetic oligonucleotide
actccagctatctctgacttgactctatcgaggaaga

SEQ ID NO: 4821 - DNA, 35 bp, Artificial Sequence
  Synthetic oligonucleotide
actgtagtacactggttcactgaatggtgcgattg

SEQ ID NO: 4822 - DNA, 36 bp, Artificial Sequence
  Synthetic oligonucleotide
aggctatgcccgtgtccgatcttggagagttgataa

SEQ ID NO: 4823 - DNA, 37 bp, Artificial Sequence
  Synthetic oligonucleotide
gagggtcactgataattgtagtcatgagatacaatga

SEQ ID NO: 4824 - DNA, 35 bp, Artificial Sequence
  Synthetic oligonucleotide
ggaccgtactgcatattaagaagagaagcccacga

SEQ ID NO: 4825 - DNA, 37 bp, Artificial Sequence
  Synthetic oligonucleotide
tagacagtccttcacagttataggaagttgcataaga

SEQ ID NO: 4826 - DNA, 37 bp, Artificial Sequence
  Synthetic oligonucleotide
tgagggccgtgggaagttctccttaacctctgcagga

SEQ ID NO: 4827 - DNA, 37 bp, Artificial Sequence
  Synthetic oligonucleotide
tttgccggtaggaaacccagtcgtgcgggttcctcga

SEQ ID NO: 4828 - DNA, 35 bp, Artificial Sequence
  Synthetic oligonucleotide
acatcgggcctggagaggatagggtgatatgccgg

SEQ ID NO: 4829 - DNA, 37 bp, Artificial Sequence
  Synthetic oligonucleotide
agtcatgattaacgtacaatcgaaacttgtaccagga

SEQ ID NO: 4830 - DNA, 37 bp, Artificial Sequence
  Synthetic oligonucleotide
ggtgcccaattaggttataaagatggtgtcaaagcga

SEQ ID NO: 4831 - DNA, 35 bp, Artificial Sequence
  Synthetic oligonucleotide
tcgtagtcagtcagttagttggatagagcctcact

SEQ ID NO: 4832 - DNA, 35 bp, Artificial Sequence
  Synthetic oligonucleotide
ttggaatttgccagtatatcgttatgttggcccat

SEQ ID NO: 4833 - DNA, 38 bp, Artificial Sequence
  Synthetic oligonucleotide
ggaactcaggactcctagaagccgtagctgctatgtga

SEQ ID NO: 4834 - DNA, 37 bp, Artificial Sequence
  Synthetic oligonucleotide
aacgacgtaagcctccccacggtgattgagttgacga

SEQ ID NO: 4835 - DNA, 38 bp, Artificial Sequence
  Synthetic oligonucleotide
aagcgcccaatataaagtggtgtcaccaaactctgtga

SEQ ID NO: 4836 - DNA, 36 bp, Artificial Sequence
  Synthetic oligonucleotide
aatgtcatgttacccacacacatagcaactttggga

SEQ ID NO: 4837 - DNA, 37 bp, Artificial Sequence
  Synthetic oligonucleotide
accctagagggcttcctaactcttgtgggatggggga

SEQ ID NO: 4838 - DNA, 36 bp, Artificial Sequence
  Synthetic oligonucleotide
acgcccccaccatggattactgcacgaacggtgtta

SEQ ID NO: 4839 - DNA, 35 bp, Artificial Sequence
  Synthetic oligonucleotide
acgtgcctccaacacttgctattattcaagatgca

SEQ ID NO: 4840 - DNA, 35 bp, Artificial Sequence
  Synthetic oligonucleotide
agaattgggcaaattatccgtccaatcaaaggcgc

SEQ ID NO: 4841 - DNA, 36 bp, Artificial Sequence
  Synthetic oligonucleotide
aggtgtatgtgcattatttatagtccgagtgcgaaa

SEQ ID NO: 4842 - DNA, 38 bp, Artificial Sequence
  Synthetic oligonucleotide
agtcgcgagacaaaatgcattagagccgctacagttga

SEQ ID NO: 4843 - DNA, 36 bp, Artificial Sequence
  Synthetic oligonucleotide
agtgtctgctaaatagtacatgcatatttgccgcta

SEQ ID NO: 4844 - DNA, 36 bp, Artificial Sequence
  Synthetic oligonucleotide
ataggcgacgctactcacttggctggggtgtcgtca

SEQ ID NO: 4845 - DNA, 37 bp, Artificial Sequence
  Synthetic oligonucleotide
atcggagagtaatcagagtaagccgcattagctatga

SEQ ID NO: 4846 - DNA, 37 bp, Artificial Sequence
  Synthetic oligonucleotide
attgagcgcacatgtgtaatcatccgcacattacgga

SEQ ID NO: 4847 - DNA, 37 bp, Artificial Sequence
  Synthetic oligonucleotide
catgtagagcctcagttggatgtcaactaatagttga

SEQ ID NO: 4848 - DNA, 38 bp, Artificial Sequence
  Synthetic oligonucleotide
ccgctaatggcggacacgtgctgaatccgagtgtctga

SEQ ID NO: 4849 - DNA, 35 bp, Artificial Sequence
  Synthetic oligonucleotide
cttgcccgagaggtcaatcggtatggttagcatgt

SEQ ID NO: 4850 - DNA, 38 bp, Artificial Sequence
  Synthetic oligonucleotide
gaatggcacaatacgatgaatggccggaggtatgatga

SEQ ID NO: 4851 - DNA, 36 bp, Artificial Sequence
  Synthetic oligonucleotide
gatgcttcggattgtttgggtagcgaatacccacga

SEQ ID NO: 4852 - DNA, 37 bp, Artificial Sequence
  Synthetic oligonucleotide
gattatggttaatatgtacccacgtatgctaggtgga

SEQ ID NO: 4853 - DNA, 38 bp, Artificial Sequence
  Synthetic oligonucleotide
gccaacgaaacgtaagttaggtccttgtaacgacatga

SEQ ID NO: 4854 - DNA, 37 bp, Artificial Sequence
  Synthetic oligonucleotide
gccactgagaaaagtagagcacgtagtatgcgacaga

SEQ ID NO: 4855 - DNA, 35 bp, Artificial Sequence
  Synthetic oligonucleotide
gcgtacagggtttgggtggcacagtccgagcgacc

SEQ ID NO: 4856 - DNA, 37 bp, Artificial Sequence
  Synthetic oligonucleotide
ggcgcgctggagagctgacctttgtgaacgccatcga

SEQ ID NO: 4857 - DNA, 37 bp, Artificial Sequence
  Synthetic oligonucleotide
gtagcgaagaccacaatcgacaggcggggtatcttga

SEQ ID NO: 4858 - DNA, 37 bp, Artificial Sequence
  Synthetic oligonucleotide
gtcacctgggaggtctataattataggtctaagccga

SEQ ID NO: 4859 - DNA, 38 bp, Artificial Sequence
  Synthetic oligonucleotide
gtgattgagcatgtattctggaaagatctgttttctga

SEQ ID NO: 4860 - DNA, 38 bp, Artificial Sequence
  Synthetic oligonucleotide
gttgattgaactaatcatctaaggcgccagtggggtga

SEQ ID NO: 4861 - DNA, 38 bp, Artificial Sequence
  Synthetic oligonucleotide
gtttggggatgttaccgaactaccagaatggtaggtga

SEQ ID NO: 4862 - DNA, 35 bp, Artificial Sequence
  Synthetic oligonucleotide
tacccgacatgatcgttgatgtcggatgtgctggc

SEQ ID NO: 4863 - DNA, 36 bp, Artificial Sequence
  Synthetic oligonucleotide
taggaggttaggtatcctgcatccgcccgaccaaaa

SEQ ID NO: 4864 - DNA, 38 bp, Artificial Sequence
  Synthetic oligonucleotide
tcacgtcctatcgagattggttggacgtatccctctga

SEQ ID NO: 4865 - DNA, 36 bp, Artificial Sequence
  Synthetic oligonucleotide
ttccgaaggcggacgagtgaaattaacatcgcgtca

SEQ ID NO: 4866 - DNA, 37 bp, Artificial Sequence
  Synthetic oligonucleotide
ttgacacggtggattggaaagtgcattagtcatgtga

SEQ ID NO: 4867 - DNA, 36 bp, Artificial Sequence
  Synthetic oligonucleotide
ttgccaacgtgactgggtatcgtccgggatttctaa

SEQ ID NO: 4868 - DNA, 37 bp, Artificial Sequence
  Synthetic oligonucleotide
tttcgtccctagggcattatgcgtagggatattctga

SEQ ID NO: 4869 - DNA, 36 bp, Artificial Sequence
  Synthetic oligonucleotide
acatattgtttcagcagaatgccgtgcacagggtaa

SEQ ID NO: 4870 - DNA, 37 bp, Artificial Sequence
  Synthetic oligonucleotide
agtgtaccgtgcagtctactggttgcgtcctgaggga

SEQ ID NO: 4871 - DNA, 35 bp, Artificial Sequence
  Synthetic oligonucleotide
tacctcgcctcaaaaggtgtaaaagtatcaagtgg

SEQ ID NO: 4872 - DNA, 36 bp, Artificial Sequence
  Synthetic oligonucleotide
aataagggcctgggaccacagggaaaatgtggtata

SEQ ID NO: 4873 - DNA, 37 bp, Artificial Sequence
  Synthetic oligonucleotide
acagtggcgatcagaccggaaggttagcgattcatga

SEQ ID NO: 4874 - DNA, 35 bp, Artificial Sequence
  Synthetic oligonucleotide
atgagagacgtcgtacatgataggggtataataaa

SEQ ID NO: 4875 - DNA, 37 bp, Artificial Sequence
  Synthetic oligonucleotide
catgcgagacgggggttatcggtggaggacaattaga

SEQ ID NO: 4876 - DNA, 37 bp, Artificial Sequence
  Synthetic oligonucleotide
gaccgctggaacagagtgcagaatcatggggcccaga

SEQ ID NO: 4877 - DNA, 37 bp, Artificial Sequence
  Synthetic oligonucleotide
gagaagtgggaattctcgcaagtgaccgctctgctga

SEQ ID NO: 4878 - DNA, 38 bp, Artificial Sequence
  Synthetic oligonucleotide
gccctatttaaggctcggtctgttgtctgggaacctga

SEQ ID NO: 4879 - DNA, 37 bp, Artificial Sequence
  Synthetic oligonucleotide
gcctacggtgggcttatagctaccacgtacatgggga

SEQ ID NO: 4880 - DNA, 36 bp, Artificial Sequence
  Synthetic oligonucleotide
gcgtacggaagcaggatatgaaccgtaaggagtcaa

SEQ ID NO: 4881 - DNA, 36 bp, Artificial Sequence
  Synthetic oligonucleotide
gctcaggtcaaatatttaatgtaacatcaggctgga

SEQ ID NO: 4882 - DNA, 35 bp, Artificial Sequence
  Synthetic oligonucleotide
ggagtactgatttcaaaccttgttgcacccgtaag

SEQ ID NO: 4883 - DNA, 37 bp, Artificial Sequence
  Synthetic oligonucleotide
gtttcatgacgagaattcagccgttcgaaatgaatga

SEQ ID NO: 4884 - DNA, 35 bp, Artificial Sequence
  Synthetic oligonucleotide
tactcctgtatgaggggttttaaggacgcgacgcg

SEQ ID NO: 4885 - DNA, 37 bp, Artificial Sequence
  Synthetic oligonucleotide
taggggactcgtcgtagtttaagcacgctaagatcga

SEQ ID NO: 4886 - DNA, 35 bp, Artificial Sequence
  Synthetic oligonucleotide
tctgcgcaggcgcagggacgtgtacgtcgtcattg

SEQ ID NO: 4887 - DNA, 38 bp, Artificial Sequence
  Synthetic oligonucleotide
gttcataacttcttccggcttcccgatggtcggactga

SEQ ID NO: 4888 - DNA, 36 bp, Artificial Sequence
  Synthetic oligonucleotide
ggtatcaccatcacatacctgctagagtcaacatga

SEQ ID NO: 4889 - DNA, 35 bp, Artificial Sequence
  Synthetic oligonucleotide
tgtgccagcaacgggggtagaaaactttatgcgga

SEQ ID NO: 4890 - DNA, 36 bp, Artificial Sequence
  Synthetic oligonucleotide
ttactgctgttaaatggattgcgatggggcgatgca

SEQ ID NO: 4891 - DNA, 38 bp, Artificial Sequence
  Synthetic oligonucleotide
agtgcaaactcatctgtgggaagtgcattcagggttga

SEQ ID NO: 4892 - DNA, 36 bp, Artificial Sequence
  Synthetic oligonucleotide
gggacgagatacctgcaattttgcgtcattggggta

SEQ ID NO: 4893 - DNA, 37 bp, Artificial Sequence
  Synthetic oligonucleotide
gtttttgactggggtacaagccaattgaacgtacgga

SEQ ID NO: 4894 - DNA, 35 bp, Artificial Sequence
  Synthetic oligonucleotide
taccggttaaattgcaacgggttttgcggtccaag

SEQ ID NO: 4895 - DNA, 35 bp, Artificial Sequence
  Synthetic oligonucleotide
tcaaccgacattggtgcagggcgttcaatctttgt

SEQ ID NO: 4896 - DNA, 37 bp, Artificial Sequence
  Synthetic oligonucleotide
tccgacccttgcctggacattactacatgcccccaga

SEQ ID NO: 4897 - DNA, 37 bp, Artificial Sequence
  Synthetic oligonucleotide
ttagtacgcagggccccgctacagggccgattaccga

SEQ ID NO: 4898 - DNA, 38 bp, Artificial Sequence
  Synthetic oligonucleotide
ttgtgatggggggattaattgacgttatgcccgattga

SEQ ID NO: 4899 - DNA, 37 bp, Artificial Sequence
  Synthetic oligonucleotide
aaccgatccgaaattaggtaagtccttgctgtcttga

SEQ ID NO: 4900 - DNA, 38 bp, Artificial Sequence
  Synthetic oligonucleotide
aacgggtgcacggcaccgtaattcctaatgtagtctga

SEQ ID NO: 4901 - DNA, 38 bp, Artificial Sequence
  Synthetic oligonucleotide
acacaaatagttcatatagtctagattgcagtctgtga

SEQ ID NO: 4902 - DNA, 36 bp, Artificial Sequence
  Synthetic oligonucleotide
accggtgatcctaatgttgacttcagaggacgctta

SEQ ID NO: 4903 - DNA, 37 bp, Artificial Sequence
  Synthetic oligonucleotide
acgccatttaatgacctggtgttaaagatgaagaaga

SEQ ID NO: 4904 - DNA, 38 bp, Artificial Sequence
  Synthetic oligonucleotide
actttggtgaacggtatcggtccttacggttgaggtga

SEQ ID NO: 4905 - DNA, 35 bp, Artificial Sequence
  Synthetic oligonucleotide
aggacagtctgtcacaacgtgtctgtaccgcgagt

SEQ ID NO: 4906 - DNA, 36 bp, Artificial Sequence
  Synthetic oligonucleotide
agtggtgaatggtaacttggagcatctaagagacca

SEQ ID NO: 4907 - DNA, 38 bp, Artificial Sequence
  Synthetic oligonucleotide
agttcaggccaacttgatatgcccgtcatgagagctga

SEQ ID NO: 4908 - DNA, 37 bp, Artificial Sequence
  Synthetic oligonucleotide
atcgccgtgagcgtgacggcggtcctatcgttactga

SEQ ID NO: 4909 - DNA, 35 bp, Artificial Sequence
  Synthetic oligonucleotide
atgcgacaacgagtgcgccggtacggtaagtagag

SEQ ID NO: 4910 - DNA, 37 bp, Artificial Sequence
  Synthetic oligonucleotide
catgaccaagtaaacctatgggtagtacgcagtagga

SEQ ID NO: 4911 - DNA, 36 bp, Artificial Sequence
  Synthetic oligonucleotide
ccatagtgggcgcttgagtttgatttatagttgcaa

SEQ ID NO: 4912 - DNA, 35 bp, Artificial Sequence
  Synthetic oligonucleotide
ccggattgcaatctgagctaaaataacggtacgat

SEQ ID NO: 4913 - DNA, 35 bp, Artificial Sequence
  Synthetic oligonucleotide
ctggactcaggcattgggccacatcgaaatcggcc

SEQ ID NO: 4914 - DNA, 36 bp, Artificial Sequence
  Synthetic oligonucleotide
gaaggactgggcattctagcctggatctgccacgta

SEQ ID NO: 4915 - DNA, 38 bp, Artificial Sequence
  Synthetic oligonucleotide
gactgtcaaatagggtgccgccagggaatcagaaatga

SEQ ID NO: 4916 - DNA, 35 bp, Artificial Sequence
  Synthetic oligonucleotide
gattgttgcgggtattagacgtttgttgaaccggt

SEQ ID NO: 4917 - DNA, 36 bp, Artificial Sequence
  Synthetic oligonucleotide
gcacccgcctcgatctttacagtgtgttcctcttga

SEQ ID NO: 4918 - DNA, 35 bp, Artificial Sequence
  Synthetic oligonucleotide
gcgccccataacaataccgcccctgcgcagcagta

SEQ ID NO: 4919 - DNA, 37 bp, Artificial Sequence
  Synthetic oligonucleotide
gcgcgttccgtagtcatagggaaggttagtgtgctga

SEQ ID NO: 4920 - DNA, 35 bp, Artificial Sequence
  Synthetic oligonucleotide
gctcgccactgtctgacaaacctcgtcgtttcaag

SEQ ID NO: 4921 - DNA, 37 bp, Artificial Sequence
  Synthetic oligonucleotide
gcttggtgacacgatacgcaccttggctacgactcga

SEQ ID NO: 4922 - DNA, 36 bp, Artificial Sequence
  Synthetic oligonucleotide
ggactggcatacggagcgagtggggtcccgggccga

SEQ ID NO: 4923 - DNA, 36 bp, Artificial Sequence
  Synthetic oligonucleotide
ggcatcgattcgcagggcatcttagcatggggccaa

SEQ ID NO: 4924 - DNA, 35 bp, Artificial Sequence
  Synthetic oligonucleotide
ggccccccatgggtactgtactctgtcaaatccaa

SEQ ID NO: 4925 - DNA, 38 bp, Artificial Sequence
  Synthetic oligonucleotide
gggctgtacacagtaacagctaggtaaatgcgacatga

SEQ ID NO: 4926 - DNA, 37 bp, Artificial Sequence
  Synthetic oligonucleotide
gggtcgcgattcgatagttcatcacatccaggaggga

SEQ ID NO: 4927 - DNA, 36 bp, Artificial Sequence
  Synthetic oligonucleotide
ggtaaatccagtgcctggatttcggttcgcacagta

SEQ ID NO: 4928 - DNA, 38 bp, Artificial Sequence
  Synthetic oligonucleotide
ggttctgcgtgctgactcgtttcctgtgcactaaatga

SEQ ID NO: 4929 - DNA, 37 bp, Artificial Sequence
  Synthetic oligonucleotide
gtccgacgttttactatagggcccactcagttcatga

SEQ ID NO: 4930 - DNA, 36 bp, Artificial Sequence
  Synthetic oligonucleotide
gtctatcgagttactcaatgcaacgtatagcggtaa

SEQ ID NO: 4931 - DNA, 37 bp, Artificial Sequence
  Synthetic oligonucleotide
gtgctgactttaacaggactcctcaggctagtcatga

SEQ ID NO: 4932 - DNA, 35 bp, Artificial Sequence
  Synthetic oligonucleotide
gtttcaacgtcatggcaataatccaaaaccggcct

SEQ ID NO: 4933 - DNA, 37 bp, Artificial Sequence
  Synthetic oligonucleotide
taacaaggtagctagaagcacaaccgagctgaaatga

SEQ ID NO: 4934 - DNA, 37 bp, Artificial Sequence
  Synthetic oligonucleotide
taagcgtagcgaaccggtctggagcagtcgctgctga

SEQ ID NO: 4935 - DNA, 35 bp, Artificial Sequence
  Synthetic oligonucleotide
taatggcaaagggactcatgtgagctagcgtgtct

SEQ ID NO: 4936 - DNA, 38 bp, Artificial Sequence
  Synthetic oligonucleotide
tacaggccccgcagatccggatccctcgattaacatga

SEQ ID NO: 4937 - DNA, 35 bp, Artificial Sequence
  Synthetic oligonucleotide
tatggcttagtagtaagtcatggtaagtattttgt

SEQ ID NO: 4938 - DNA, 35 bp, Artificial Sequence
  Synthetic oligonucleotide
tcatgggggtttgggctacagctagtaaaatccga

SEQ ID NO: 4939 - DNA, 37 bp, Artificial Sequence
  Synthetic oligonucleotide
tgagtggtcctgggtccggaacggtcctttactacga

SEQ ID NO: 4940 - DNA, 29 bp, Artificial Sequence
  Synthetic oligonucleotide
ttacgaaccaagagtacggctaatgagga

SEQ ID NO: 4941 - DNA, 38 bp, Artificial Sequence
  Synthetic oligonucleotide
tttatgatgaacgctatgtagtctggaagatgggctga

SEQ ID NO: 4942 - DNA, 36 bp, Artificial Sequence
  Synthetic oligonucleotide
tttcgagaagcagactgatcggcgtagtatatgaga

SEQ ID NO: 4943 - DNA, 36 bp, Artificial Sequence
  Synthetic oligonucleotide
attgcgagggccatggctctgcagatgactgggtta

SEQ ID NO: 4944 - DNA, 37 bp, Artificial Sequence
  Synthetic oligonucleotide
gggtggggactgtgtggagtaaggtaaggcttgttga

SEQ ID NO: 4945 - DNA, 38 bp, Artificial Sequence
  Synthetic oligonucleotide
aagcaatacacggatggtatcggtctggcggttgctga

SEQ ID NO: 4946 - DNA, 36 bp, Artificial Sequence
  Synthetic oligonucleotide
gctcatagacaaaaacgagtgtaagcacacgagtta

SEQ ID NO: 4947 - DNA, 36 bp, Artificial Sequence
  Synthetic oligonucleotide
ttgctctcgagccctcgctgcaggaggctcccagca

SEQ ID NO: 4948 - DNA, 37 bp, Artificial Sequence
  Synthetic oligonucleotide
aagaacgtacgttggaatgtataactgggtaccccga

SEQ ID NO: 4949 - DNA, 38 bp, Artificial Sequence
  Synthetic oligonucleotide
aagtaggattacagctgaaagccctgttgagacattga

SEQ ID NO: 4950 - DNA, 35 bp, Artificial Sequence
  Synthetic oligonucleotide
atcttaagtgagatagctttaccaggtcagtttac

SEQ ID NO: 4951 - DNA, 35 bp, Artificial Sequence
  Synthetic oligonucleotide
atgagagactagtgaagtccctcccccttcgtacc

SEQ ID NO: 4952 - DNA, 36 bp, Artificial Sequence
  Synthetic oligonucleotide
atgtctgcccgcctgtcgaactcagacataccggaa

SEQ ID NO: 4953 - DNA, 36 bp, Artificial Sequence
  Synthetic oligonucleotide
cgcttccacgacacgaccgctagggggtctggctaa

SEQ ID NO: 4954 - DNA, 36 bp, Artificial Sequence
  Synthetic oligonucleotide
ggtacggaatagttgcatgtaaggttttcaaacgta

SEQ ID NO: 4955 - DNA, 37 bp, Artificial Sequence
  Synthetic oligonucleotide
ggtaggtgaagcaggtctggcaagggtaaccgtgaga

SEQ ID NO: 4956 - DNA, 37 bp, Artificial Sequence
  Synthetic oligonucleotide
ggttcatcaggaagaatgtcaagtttgagtcatagga

SEQ ID NO: 4957 - DNA, 36 bp, Artificial Sequence
  Synthetic oligonucleotide
gtctcagcgggcccctaacccgctttggtcgcatca

SEQ ID NO: 4958 - DNA, 38 bp, Artificial Sequence
  Synthetic oligonucleotide
gtgtaactacttcggtacgtgtttagaattgctgctga

SEQ ID NO: 4959 - DNA, 37 bp, Artificial Sequence
  Synthetic oligonucleotide
tcacagggaagccttgcaccctagacctacggaatga

SEQ ID NO: 4960 - DNA, 37 bp, Artificial Sequence
  Synthetic oligonucleotide
tcggttttagaccgggtacttcaggcctgaatcaaga

SEQ ID NO: 4961 - DNA, 36 bp, Artificial Sequence
  Synthetic oligonucleotide
tctagaaactggagggcgtggctaaggtgcgcgcta

SEQ ID NO: 4962 - DNA, 38 bp, Artificial Sequence
  Synthetic oligonucleotide
tgaccacacggaccctgtgtgaatcgaggttcgcttga

SEQ ID NO: 4963 - DNA, 35 bp, Artificial Sequence
  Synthetic oligonucleotide
tgctagtgtctgaggcgcccgtggctagtatcatg

SEQ ID NO: 4964 - DNA, 35 bp, Artificial Sequence
  Synthetic oligonucleotide
tggaataaatggcagtcagtagcgtatcctgagac

SEQ ID NO: 4965 - DNA, 36 bp, Artificial Sequence
  Synthetic oligonucleotide
tgttgatccgcacatgctgcgaactcggtgcacgta

SEQ ID NO: 4966 - DNA, 37 bp, Artificial Sequence
  Synthetic oligonucleotide
ttggtcgatgcgcggttaagcttgttttttcctttga

SEQ ID NO: 4967 - DNA, 37 bp, Artificial Sequence
  Synthetic oligonucleotide
gaccaccgatatacaagtatcgtggtacaatatctga

SEQ ID NO: 4968 - DNA, 35 bp, Artificial Sequence
  Synthetic oligonucleotide
gcgacacgcgcgagaataagaataggctaaactcg

SEQ ID NO: 4969 - DNA, 38 bp, Artificial Sequence
  Synthetic oligonucleotide
gctgcggaaaatttagggtcggtgcactggcttggtga

SEQ ID NO: 4970 - DNA, 35 bp, Artificial Sequence
  Synthetic oligonucleotide
tgttaacgtatccggagtcacgataagacatggtc

SEQ ID NO: 4971 - DNA, 36 bp, Artificial Sequence
  Synthetic oligonucleotide
gcgggtgatttcacgtttcctgaaccagggatatga

SEQ ID NO: 4972 - DNA, 35 bp, Artificial Sequence
  Synthetic oligonucleotide
aaattaggccggaccacgggcattgagaggctaga

SEQ ID NO: 4973 - DNA, 35 bp, Artificial Sequence
  Synthetic oligonucleotide
acgtggtccgacggccgttgcactcaaggggggtg

SEQ ID NO: 4974 - DNA, 37 bp, Artificial Sequence
  Synthetic oligonucleotide
tggggatgacgcctcaagtgttcagagactggagaga

SEQ ID NO: 4975 - DNA, 35 bp, Artificial Sequence
  Synthetic oligonucleotide
tatagcacggtagagatatcattccataggacagt

SEQ ID NO: 4976 - DNA, 35 bp, Artificial Sequence
  Synthetic oligonucleotide
gcctcgctttctataattatcaggaaagtttggtt

SEQ ID NO: 4977 - DNA, 35 bp, Artificial Sequence
  Synthetic oligonucleotide
gcgggaacaaaaccatttttaggggacattttatg

SEQ ID NO: 4978 - DNA, 37 bp, Artificial Sequence
  Synthetic oligonucleotide
gctatgtgacaatcgcgtacaatggtcacgtcgaaga

SEQ ID NO: 4979 - DNA, 38 bp, Artificial Sequence
  Synthetic oligonucleotide
ggaacgggcgaccaagtaatgcgtttagaacgtagtga

SEQ ID NO: 4980 - DNA, 36 bp, Artificial Sequence
  Synthetic oligonucleotide
gtccggttaataagagtccttgtaccggtacgcata

SEQ ID NO: 4981 - DNA, 36 bp, Artificial Sequence
  Synthetic oligonucleotide
gtgtgagcaacctccgagaagatgggcacatgtgta

SEQ ID NO: 4982 - DNA, 37 bp, Artificial Sequence
  Synthetic oligonucleotide
taccagagcttctactttggttaacacgctggaaaga

SEQ ID NO: 4983 - DNA, 35 bp, Artificial Sequence
  Synthetic oligonucleotide
tatcaaacttgagggtaccagtctattgccggact

SEQ ID NO: 4984 - DNA, 37 bp, Artificial Sequence
  Synthetic oligonucleotide
tctactgaggccaactccttgaccacccttgagtaga

SEQ ID NO: 4985 - DNA, 37 bp, Artificial Sequence
  Synthetic oligonucleotide
tcttccctagggggtatgactcggacggccaccatga

SEQ ID NO: 4986 - DNA, 34 bp, Artificial Sequence
  Synthetic oligonucleotide
tcttgactttcattacatgacgtaagtaacagtg

SEQ ID NO: 4987 - DNA, 38 bp, Artificial Sequence
  Synthetic oligonucleotide
tctttggggaacgtcctcatcgcgggcggaaacattga

SEQ ID NO: 4988 - DNA, 37 bp, Artificial Sequence
  Synthetic oligonucleotide
ttgtgcccgtaaaagctgacttgcagtccaaacgcga

SEQ ID NO: 4989 - DNA, 36 bp, Artificial Sequence
  Synthetic oligonucleotide
ttttacggacgcaggttggtcattcactaggtacga

SEQ ID NO: 4990 - DNA, 38 bp, Artificial Sequence
  Synthetic oligonucleotide
tccaagcatggctgatacgtaaggggtcccgtttttga

SEQ ID NO: 4991 - DNA, 38 bp, Artificial Sequence
  Synthetic oligonucleotide
ggtaaccccgctttgtctcgttagtaattagtccatga

SEQ ID NO: 4992 - DNA, 37 bp, Artificial Sequence
  Synthetic oligonucleotide
ggacggtgaggcgacccgcgttggatctatggagaga

SEQ ID NO: 4993 - DNA, 38 bp, Artificial Sequence
  Synthetic oligonucleotide
atatcccacggactgtgtaatttatgtgtcggggatga

SEQ ID NO: 4994 - DNA, 38 bp, Artificial Sequence
  Synthetic oligonucleotide
catagagcatcaggggagccatgcactatggggactga

SEQ ID NO: 4995 - DNA, 37 bp, Artificial Sequence
  Synthetic oligonucleotide
ccgaatgttacgtaacgtttgaggtggaagtcggaga

SEQ ID NO: 4996 - DNA, 38 bp, Artificial Sequence
  Synthetic oligonucleotide
gaactggcggttctatagggtaccgtaagttcacctga

SEQ ID NO: 4997 - DNA, 38 bp, Artificial Sequence
  Synthetic oligonucleotide
gacgcaatgtgaaacctcctaaataagagtagggatga

SEQ ID NO: 4998 - DNA, 35 bp, Artificial Sequence
  Synthetic oligonucleotide
gctgatggacacggactgagattcttacgaagagc

SEQ ID NO: 4999 - DNA, 35 bp, Artificial Sequence
  Synthetic oligonucleotide
ggggtcatgactgggacggcgatcccacgatgaac

SEQ ID NO: 5000 - DNA, 38 bp, Artificial Sequence
  Synthetic oligonucleotide
gtgcatgcatatgtccgcaaacccgaatggaaggctga

SEQ ID NO: 5001 - DNA, 37 bp, Artificial Sequence
  Synthetic oligonucleotide
tcttttcgtagggcgcaaagaacgagcagtggcccga

SEQ ID NO: 5002 - DNA, 38 bp, Artificial Sequence
  Synthetic oligonucleotide
ttatgcgcactgggtggttaagggttttcgcaatctga

SEQ ID NO: 5003 - DNA, 37 bp, Artificial Sequence
  Synthetic oligonucleotide
actattgtgaccgattgcaatggcgctctaatcctga

SEQ ID NO: 5004 - DNA, 36 bp, Artificial Sequence
  Synthetic oligonucleotide
ggagactacctcagaggccatccatatttggtagga

SEQ ID NO: 5005 - DNA, 35 bp, Artificial Sequence
  Synthetic oligonucleotide
gtggtgggtagcttggagccgaatccccgatagca

SEQ ID NO: 5006 - DNA, 36 bp, Artificial Sequence
  Synthetic oligonucleotide
acgtgcctctcactggttctgctactgttggccgta

SEQ ID NO: 5007 - DNA, 36 bp, Artificial Sequence
  Synthetic oligonucleotide
cacaccttcctgtattacgatataccaagcgaacga

SEQ ID NO: 5008 - DNA, 35 bp, Artificial Sequence
  Synthetic oligonucleotide
ccttacggtggtgcctgacccggataatctactta

SEQ ID NO: 5009 - DNA, 37 bp, Artificial Sequence
  Synthetic oligonucleotide
gcacggtactgcctggcggcctaagggtgcttataga

SEQ ID NO: 5010 - DNA, 37 bp, Artificial Sequence
  Synthetic oligonucleotide
gctaacagcacgtgtacttgggtgcaaagatgatgga

SEQ ID NO: 5011 - DNA, 36 bp, Artificial Sequence
  Synthetic oligonucleotide
ggttgggctggggtaagggctgtaggaatcgccata

SEQ ID NO: 5012 - DNA, 36 bp, Artificial Sequence
  Synthetic oligonucleotide
gtgagcaacatgcggaaggcttcgggtttaggcgta

SEQ ID NO: 5013 - DNA, 36 bp, Artificial Sequence
  Synthetic oligonucleotide
aactgttgcctcccaacgtacattatgtcaatccgg

SEQ ID NO: 5014 - DNA, 38 bp, Artificial Sequence
  Synthetic oligonucleotide
gacgagtggtgatgggttgcgtggtaggctagtaatga

SEQ ID NO: 5015 - DNA, 35 bp, Artificial Sequence
  Synthetic oligonucleotide
aacgggactgaaagtcgttgagatcgtgagccgtg

SEQ ID NO: 5016 - DNA, 37 bp, Artificial Sequence
  Synthetic oligonucleotide
aactgaggcactggaacaaattgtgatgcgcagacga

SEQ ID NO: 5017 - DNA, 38 bp, Artificial Sequence
  Synthetic oligonucleotide
aagtgaaaagcagctatgtcatggtttggcgaagttga

SEQ ID NO: 5018 - DNA, 37 bp, Artificial Sequence
  Synthetic oligonucleotide
accttggtttgcatgtcgcggtatctgaaacacggga

SEQ ID NO: 5019 - DNA, 35 bp, Artificial Sequence
  Synthetic oligonucleotide
actattgaccctcaaggtggcgaggcttggagtta

SEQ ID NO: 5020 - DNA, 36 bp, Artificial Sequence
  Synthetic oligonucleotide
agctcctaaaccaggcgatgggtaacatgactagga

SEQ ID NO: 5021 - DNA, 37 bp, Artificial Sequence
  Synthetic oligonucleotide
agtacgatctaatacgtcgttggaatttgaccgaaga

SEQ ID NO: 5022 - DNA, 35 bp, Artificial Sequence
  Synthetic oligonucleotide
agtccgagctaaaccgtgttgaccaaaagatcggt

SEQ ID NO: 5023 - DNA, 37 bp, Artificial Sequence
  Synthetic oligonucleotide
agtgcccaaatggaaagggacaaattaagggactgga

SEQ ID NO: 5024 - DNA, 35 bp, Artificial Sequence
  Synthetic oligonucleotide
atactggaacgtatagttcgttgagtttcagacgc

SEQ ID NO: 5025 - DNA, 35 bp, Artificial Sequence
  Synthetic oligonucleotide
atctcttaggggcaatcgagcggtcccgaggtgtt

SEQ ID NO: 5026 - DNA, 35 bp, Artificial Sequence
  Synthetic oligonucleotide
catgttcgctggcataccgttaagctaagttgtgc

SEQ ID NO: 5027 - DNA, 37 bp, Artificial Sequence
  Synthetic oligonucleotide
ccgggtacagagttactcggcgctacgcggacaacga

SEQ ID NO: 5028 - DNA, 38 bp, Artificial Sequence
  Synthetic oligonucleotide
cgtcgtgccatttaaggaccgaaagtcctatgatgtga

SEQ ID NO: 5029 - DNA, 35 bp, Artificial Sequence
  Synthetic oligonucleotide
gaatcaatcccaattgcttccaactctagacagta

SEQ ID NO: 5030 - DNA, 36 bp, Artificial Sequence
  Synthetic oligonucleotide
gactacaaaggatttttagggcgtgtgcgcagttta

SEQ ID NO: 5031 - DNA, 38 bp, Artificial Sequence
  Synthetic oligonucleotide
gccttctagctggtgtactcggtcatgggtatgtgtga

SEQ ID NO: 5032 - DNA, 36 bp, Artificial Sequence
  Synthetic oligonucleotide
gctggctatccttggctgtgagggtgcctgggcgaa

SEQ ID NO: 5033 - DNA, 36 bp, Artificial Sequence
  Synthetic oligonucleotide
ggacctcgggaagatccgccagttctgcattgagga

SEQ ID NO: 5034 - DNA, 36 bp, Artificial Sequence
  Synthetic oligonucleotide
ggacgttctgatcgtctggcttggtttatttgcgga

SEQ ID NO: 5035 - DNA, 36 bp, Artificial Sequence
  Synthetic oligonucleotide
ggccacagtacaatgcgtaggctactgatgaaccaa

SEQ ID NO: 5036 - DNA, 36 bp, Artificial Sequence
  Synthetic oligonucleotide
ggcccaagtatttgtgtggaccgattttcgtgacaa

SEQ ID NO: 5037 - DNA, 35 bp, Artificial Sequence
  Synthetic oligonucleotide
gggagataaatcaaaagtactgcctgtggtaacca

SEQ ID NO: 5038 - DNA, 37 bp, Artificial Sequence
  Synthetic oligonucleotide
gtcgagcacaggtgattagcgcggaatactggcaaga

SEQ ID NO: 5039 - DNA, 35 bp, Artificial Sequence
  Synthetic oligonucleotide
gtgctggtggaaattctttacacggtacggtcact

SEQ ID NO: 5040 - DNA, 35 bp, Artificial Sequence
  Synthetic oligonucleotide
gtggctaagattgtagttatgctcgaaacccccct

SEQ ID NO: 5041 - DNA, 37 bp, Artificial Sequence
  Synthetic oligonucleotide
gttacgtaaatcccacaccgtctcttctccttcggga

SEQ ID NO: 5042 - DNA, 38 bp, Artificial Sequence
  Synthetic oligonucleotide
gttcaggcaaggttcgaaaagacgtgctggtaacatga

SEQ ID NO: 5043 - DNA, 35 bp, Artificial Sequence
  Synthetic oligonucleotide
gtttcggtgggtatttttacgaaccttggtcggtg

SEQ ID NO: 5044 - DNA, 36 bp, Artificial Sequence
  Synthetic oligonucleotide
tatagccacatatacgacagcaggactcattggtaa

SEQ ID NO: 5045 - DNA, 38 bp, Artificial Sequence
  Synthetic oligonucleotide
tatatagcagaacatgcgacttatgtacttatgtctga

SEQ ID NO: 5046 - DNA, 37 bp, Artificial Sequence
  Synthetic oligonucleotide
tatcccggtcgcgctggaaacgtgcctcctaaacaga

SEQ ID NO: 5047 - DNA, 38 bp, Artificial Sequence
  Synthetic oligonucleotide
tgaaaaaacaacttcagtcggtttctagaatgcaatga

SEQ ID NO: 5048 - DNA, 38 bp, Artificial Sequence
  Synthetic oligonucleotide
tgtcgcccaatcttgggcgtataagcgtagtcttttga

SEQ ID NO: 5049 - DNA, 38 bp, Artificial Sequence
  Synthetic oligonucleotide
ttaaaacaattgaacaacctgcatggcgaagagcctga

SEQ ID NO: 5050 - DNA, 37 bp, Artificial Sequence
  Synthetic oligonucleotide
ttcgggcccgttaagccgattggtgttcacacactga

SEQ ID NO: 5051 - DNA, 38 bp, Artificial Sequence
  Synthetic oligonucleotide
ttgtcgccgttattggtaaacggttaccacaggcatga

SEQ ID NO: 5052 - DNA, 37 bp, Artificial Sequence
  Synthetic oligonucleotide
ccatcgctagctggacgtggtgtatgcgtacccccga

SEQ ID NO: 5053 - DNA, 37 bp, Artificial Sequence
  Synthetic oligonucleotide
gagtgaacggacgctaatgcgacgcgcctaggggaga

SEQ ID NO: 5054 - DNA, 35 bp, Artificial Sequence
  Synthetic oligonucleotide
gtatctgcagggggtacttgtctgacgcaccggta

SEQ ID NO: 5055 - DNA, 35 bp, Artificial Sequence
  Synthetic oligonucleotide
gtggagattttcaggtcagacccgctgggtcattg

SEQ ID NO: 5056 - DNA, 35 bp, Artificial Sequence
  Synthetic oligonucleotide
taaaagcgttcagcagaacattagtactgtgtatc

SEQ ID NO: 5057 - DNA, 37 bp, Artificial Sequence
  Synthetic oligonucleotide
tacgaagtggcctccaccctaggagttgtggccccga

SEQ ID NO: 5058 - DNA, 37 bp, Artificial Sequence
  Synthetic oligonucleotide
tctgagatcagggggtgagtccctagtggcgtgacga

SEQ ID NO: 5059 - DNA, 35 bp, Artificial Sequence
  Synthetic oligonucleotide
gcccgaactcctcatggtcggtggtactgcgacct

SEQ ID NO: 5060 - DNA, 37 bp, Artificial Sequence
  Synthetic oligonucleotide
aacggaggttaaacggagtttcggccttggtgcagga

SEQ ID NO: 5061 - DNA, 35 bp, Artificial Sequence
  Synthetic oligonucleotide
acaatagaaccgtgggttagaatccactaggttga

SEQ ID NO: 5062 - DNA, 38 bp, Artificial Sequence
  Synthetic oligonucleotide
actgcctgattagcactcaccgtacgatcggtatgtga

SEQ ID NO: 5063 - DNA, 36 bp, Artificial Sequence
  Synthetic oligonucleotide
actgggtctgtcatccggtaggactgtacaggatta

SEQ ID NO: 5064 - DNA, 38 bp, Artificial Sequence
  Synthetic oligonucleotide
agcgtgctatggagtatcgtggcacagtaggaagctga

SEQ ID NO: 5065 - DNA, 35 bp, Artificial Sequence
  Synthetic oligonucleotide
agtttctagatgaagtgggaggacctaggcaccat

SEQ ID NO: 5066 - DNA, 38 bp, Artificial Sequence
  Synthetic oligonucleotide
atactggtcacgcattgttaaagactttgttttattga

SEQ ID NO: 5067 - DNA, 35 bp, Artificial Sequence
  Synthetic oligonucleotide
ccgtaagcggtcgcgggtaattcccgcctagtggt

SEQ ID NO: 5068 - DNA, 35 bp, Artificial Sequence
  Synthetic oligonucleotide
ctgtgacgacctcgtgtatacttctctctcaacgc

SEQ ID NO: 5069 - DNA, 36 bp, Artificial Sequence
  Synthetic oligonucleotide
gaacaacaatcccggagttgatgacgatcaacaaaa

SEQ ID NO: 5070 - DNA, 37 bp, Artificial Sequence
  Synthetic oligonucleotide
gatagtcgccaattactgccctttaaccttcttagga

SEQ ID NO: 5071 - DNA, 36 bp, Artificial Sequence
  Synthetic oligonucleotide
gatcccgttgattcgccatgctttcatgatcggata

SEQ ID NO: 5072 - DNA, 38 bp, Artificial Sequence
  Synthetic oligonucleotide
gatgttcccgtctccatttccgcgacaattagatctga

SEQ ID NO: 5073 - DNA, 38 bp, Artificial Sequence
  Synthetic oligonucleotide
gcaaacggacctctgatggttgtcagacaataccgtga

SEQ ID NO: 5074 - DNA, 35 bp, Artificial Sequence
  Synthetic oligonucleotide
gccaatgattagagtgcgggtaggggctcttgaga

SEQ ID NO: 5075 - DNA, 36 bp, Artificial Sequence
  Synthetic oligonucleotide
gccagattatgaggccggtcggggccttccgaatga

SEQ ID NO: 5076 - DNA, 35 bp, Artificial Sequence
  Synthetic oligonucleotide
gcggaacctttgtacaagcacgacattgtacctgg

SEQ ID NO: 5077 - DNA, 35 bp, Artificial Sequence
  Synthetic oligonucleotide
gcttaaagttgcgcatcgtaagaccggccagacgg

SEQ ID NO: 5078 - DNA, 35 bp, Artificial Sequence
  Synthetic oligonucleotide
gctttatcgctatcgtgggtaaagatgtatagaac

SEQ ID NO: 5079 - DNA, 35 bp, Artificial Sequence
  Synthetic oligonucleotide
ggttgacggggcaataggacggtcgacgggtttag

SEQ ID NO: 5080 - DNA, 37 bp, Artificial Sequence
  Synthetic oligonucleotide
gttgctctttattctgttgaggctaagcggtctttga

SEQ ID NO: 5081 - DNA, 37 bp, Artificial Sequence
  Synthetic oligonucleotide
tcacagattaactcagagctgcagtccagttagaaga

SEQ ID NO: 5082 - DNA, 38 bp, Artificial Sequence
  Synthetic oligonucleotide
tccatgatttcagtgttacgtacttcggctgtagatga

SEQ ID NO: 5083 - DNA, 37 bp, Artificial Sequence
  Synthetic oligonucleotide
tccgtcatggtacacccttaagatgggatcgagttga

SEQ ID NO: 5084 - DNA, 37 bp, Artificial Sequence
  Synthetic oligonucleotide
tgcctgtattgttcatcggggcattacccatcctgga

SEQ ID NO: 5085 - DNA, 36 bp, Artificial Sequence
  Synthetic oligonucleotide
tgctggctattggagtaacctgtaacggccctatga

SEQ ID NO: 5086 - DNA, 36 bp, Artificial Sequence
  Synthetic oligonucleotide
tggggggttcatcccatggtcatgagtcgtatcgta

SEQ ID NO: 5087 - DNA, 35 bp, Artificial Sequence
  Synthetic oligonucleotide
tgtactgtccgtggggattcaccccccggtgacat

SEQ ID NO: 5088 - DNA, 36 bp, Artificial Sequence
  Synthetic oligonucleotide
ttatgtacaaggccatggtagagctataatcgacga

SEQ ID NO: 5089 - DNA, 35 bp, Artificial Sequence
  Synthetic oligonucleotide
tgatgatggggctctgtcaaagcgtaagttaacct

SEQ ID NO: 5090 - DNA, 35 bp, Artificial Sequence
  Synthetic oligonucleotide
aagcgcaaatacactacgtactatgggaggagcaa

SEQ ID NO: 5091 - DNA, 37 bp, Artificial Sequence
  Synthetic oligonucleotide
taactcatgtagtaaacagttaatcgtgcttttgcga

SEQ ID NO: 5092 - DNA, 35 bp, Artificial Sequence
  Synthetic oligonucleotide
aaaaagcctaacggattacttgttttatggatagc

SEQ ID NO: 5093 - DNA, 37 bp, Artificial Sequence
  Synthetic oligonucleotide
aaagcaggacgtgatggatccgctgcttttaggtgga

SEQ ID NO: 5094 - DNA, 37 bp, Artificial Sequence
  Synthetic oligonucleotide
aaggttgacgaccgcttgggagttgcgaatcattaga

SEQ ID NO: 5095 - DNA, 37 bp, Artificial Sequence
  Synthetic oligonucleotide
aggtgggtccgtagcgatcccatgtaaacagtactga

SEQ ID NO: 5096 - DNA, 36 bp, Artificial Sequence
  Synthetic oligonucleotide
caagtgggcaatccttgacgtggtggtcactcaaaa

SEQ ID NO: 5097 - DNA, 38 bp, Artificial Sequence
  Synthetic oligonucleotide
catggggtctgactgatttgcgagcttcgtaggcttga

SEQ ID NO: 5098 - DNA, 35 bp, Artificial Sequence
  Synthetic oligonucleotide
gatacaacaacggaactgtataaaagacccggggt

SEQ ID NO: 5099 - DNA, 37 bp, Artificial Sequence
  Synthetic oligonucleotide
gctccgtcacgaaaactaagaatatgagtcggttgga

SEQ ID NO: 5100 - DNA, 38 bp, Artificial Sequence
  Synthetic oligonucleotide
ggccggagagaagcttgcaagcgaccgtcacgtgctga

SEQ ID NO: 5101 - DNA, 36 bp, Artificial Sequence
  Synthetic oligonucleotide
ggcctgcgcttaccacgaaaccgctggacgacccta

SEQ ID NO: 5102 - DNA, 36 bp, Artificial Sequence
  Synthetic oligonucleotide
gtttgtacgcacaggatttgtcacaatcagacacta

SEQ ID NO: 5103 - DNA, 37 bp, Artificial Sequence
  Synthetic oligonucleotide
tcattacggtggtatctagaactcgcatataggtcga

SEQ ID NO: 5104 - DNA, 34 bp, Artificial Sequence
  Synthetic oligonucleotide
tcccgtctcgggcgctcactggttggctgtagtc

SEQ ID NO: 5105 - DNA, 35 bp, Artificial Sequence
  Synthetic oligonucleotide
tgccagctaggtttccgcgtatcacaatgcttcag

SEQ ID NO: 5106 - DNA, 36 bp, Artificial Sequence
  Synthetic oligonucleotide
tgtacagcaacggggaggcattcaagggctatggta

SEQ ID NO: 5107 - DNA, 35 bp, Artificial Sequence
  Synthetic oligonucleotide
ttaatgaatacggaccggttacgtatgcggttggg

SEQ ID NO: 5108 - DNA, 38 bp, Artificial Sequence
  Synthetic oligonucleotide
tttcgggtgatcgtatctttggtgttacgtcacaatga

SEQ ID NO: 5109 - DNA, 38 bp, Artificial Sequence
  Synthetic oligonucleotide
tgttttaagtgacctcgtaaccgcgttccaactactga

SEQ ID NO: 5110 - DNA, 37 bp, Artificial Sequence
  Synthetic oligonucleotide
acgagtacgggtcgctccgaccaagactgtagcacga

SEQ ID NO: 5111 - DNA, 36 bp, Artificial Sequence
  Synthetic oligonucleotide
acgttggctgctcaagctcatgggtgtcactgttca

SEQ ID NO: 5112 - DNA, 36 bp, Artificial Sequence
  Synthetic oligonucleotide
cgctgacgctgaggcgacaacgaagttggagccgga

SEQ ID NO: 5113 - DNA, 38 bp, Artificial Sequence
  Synthetic oligonucleotide
ctcccgagtatagtctcagccgcaggtattagtaaaga

SEQ ID NO: 5114 - DNA, 35 bp, Artificial Sequence
  Synthetic oligonucleotide
ggcacaatgaacgctgaagttcgttgaagcgaacg

SEQ ID NO: 5115 - DNA, 36 bp, Artificial Sequence
  Synthetic oligonucleotide
gtcaactccccccgatccacacgaccgctgcatgta

SEQ ID NO: 5116 - DNA, 38 bp, Artificial Sequence
  Synthetic oligonucleotide
tactcaacgttccttacttgccgatgttggctctgtga

SEQ ID NO: 5117 - DNA, 37 bp, Artificial Sequence
  Synthetic oligonucleotide
tggatccaacgtgatcatacaattttattgggtagga

SEQ ID NO: 5118 - DNA, 37 bp, Artificial Sequence
  Synthetic oligonucleotide
ttagctttcgactccacgggaatcgacaacggccgga

SEQ ID NO: 5119 - DNA, 36 bp, Artificial Sequence
  Synthetic oligonucleotide
ttagttgctatgatgcaaatttaagctggggttgga

SEQ ID NO: 5120 - DNA, 35 bp, Artificial Sequence
  Synthetic oligonucleotide
accgtatggggggctgtccaaaggttctcgtaggt

SEQ ID NO: 5121 - DNA, 38 bp, Artificial Sequence
  Synthetic oligonucleotide
attccagaagttcgcactgcctcgagatcgtaatgtga

SEQ ID NO: 5122 - DNA, 36 bp, Artificial Sequence
  Synthetic oligonucleotide
caacggctcggtgcgatggagcaccagacggacgta

SEQ ID NO: 5123 - DNA, 35 bp, Artificial Sequence
  Synthetic oligonucleotide
cccctacacctgtcgacgacacgtgttgtgcctgg

SEQ ID NO: 5124 - DNA, 34 bp, Artificial Sequence
  Synthetic oligonucleotide
ggagccgactccgccaccctggactggtcctcta

SEQ ID NO: 5125 - DNA, 35 bp, Artificial Sequence
  Synthetic oligonucleotide
gggcattagagcattcagtttctacaggttagttc

SEQ ID NO: 5126 - DNA, 35 bp, Artificial Sequence
  Synthetic oligonucleotide
gtacgcttacggcgacttatgctatcttcaagata

SEQ ID NO: 5127 - DNA, 35 bp, Artificial Sequence
  Synthetic oligonucleotide
gtagggcttgcagttatgttctttgtggtattgtg

SEQ ID NO: 5128 - DNA, 36 bp, Artificial Sequence
  Synthetic oligonucleotide
gtccttaccagcgattacaagacatcctgtcatcga

SEQ ID NO: 5129 - DNA, 36 bp, Artificial Sequence
  Synthetic oligonucleotide
tataagtaagtacgtattacgtcacgcgtggcgaga

SEQ ID NO: 5130 - DNA, 38 bp, Artificial Sequence
  Synthetic oligonucleotide
tatcgttgggcgaatcataaccggctgaagtgcaatga

SEQ ID NO: 5131 - DNA, 37 bp, Artificial Sequence
  Synthetic oligonucleotide
tggtacccattctataaatgaagtggtacaagtacga

SEQ ID NO: 5132 - DNA, 36 bp, Artificial Sequence
  Synthetic oligonucleotide
gtcacgattcatgaccgttactgcacggtgctgata

SEQ ID NO: 5133 - DNA, 38 bp, Artificial Sequence
  Synthetic oligonucleotide
agtaggcgacgagagtagagtgtggtacgtctttatga

SEQ ID NO: 5134 - DNA, 38 bp, Artificial Sequence
  Synthetic oligonucleotide
ccatgtaagtgtgtgtggatagacactgtgggctatga

SEQ ID NO: 5135 - DNA, 38 bp, Artificial Sequence
  Synthetic oligonucleotide
tgccaacatagggttagctgtgtatttcaatgtagtga

SEQ ID NO: 5136 - DNA, 35 bp, Artificial Sequence
  Synthetic oligonucleotide
tgtgtgctccagaatcagggtttatagtctcaaat

SEQ ID NO: 5137 - DNA, 36 bp, Artificial Sequence
  Synthetic oligonucleotide
acgtcgactccagggaccgctctttgggtgttcaca

SEQ ID NO: 5138 - DNA, 36 bp, Artificial Sequence
  Synthetic oligonucleotide
acttcgctaggccctgtcatgggattatgtcttata

SEQ ID NO: 5139 - DNA, 37 bp, Artificial Sequence
  Synthetic oligonucleotide
gagttacacacatggtgtatgcggggaatttctggga

SEQ ID NO: 5140 - DNA, 35 bp, Artificial Sequence
  Synthetic oligonucleotide
tgtgacaagttcggcgtggtataaacgacgcgacg

SEQ ID NO: 5141 - DNA, 35 bp, Artificial Sequence
  Synthetic oligonucleotide
tgaatcgcaacaatgcgggcgtttccaggaagtac

SEQ ID NO: 5142 - DNA, 37 bp, Artificial Sequence
  Synthetic oligonucleotide
aaaaaaggcacgaggaaagaatggtagaacatcggga

SEQ ID NO: 5143 - DNA, 37 bp, Artificial Sequence
  Synthetic oligonucleotide
aaaactggatagtgcggatctgttggggtgccatgga

SEQ ID NO: 5144 - DNA, 37 bp, Artificial Sequence
  Synthetic oligonucleotide
aaacaacacgtttacctcgcagtctgttaactgtcga

SEQ ID NO: 5145 - DNA, 37 bp, Artificial Sequence
  Synthetic oligonucleotide
aacaaatgcattggcgctataccttagtggcaagaga

SEQ ID NO: 5146 - DNA, 37 bp, Artificial Sequence
  Synthetic oligonucleotide
aactctgcgtgtcatagctgttgaaggcttcatgcga

SEQ ID NO: 5147 - DNA, 38 bp, Artificial Sequence
  Synthetic oligonucleotide
aatggtggtatatccttgattggtgcgagagccgatga

SEQ ID NO: 5148 - DNA, 34 bp, Artificial Sequence
  Synthetic oligonucleotide
acacataaagattgctcctccttgcctggcgccc

SEQ ID NO: 5149 - DNA, 36 bp, Artificial Sequence
  Synthetic oligonucleotide
acagctgctagcacgcaggccgctgctgtcctataa

SEQ ID NO: 5150 - DNA, 38 bp, Artificial Sequence
  Synthetic oligonucleotide
acgccggtaaacctattgtacactgcgaggctagatga

SEQ ID NO: 5151 - DNA, 36 bp, Artificial Sequence
  Synthetic oligonucleotide
actgtctgcaaacttttgtctcccgagtcgggctta

SEQ ID NO: 5152 - DNA, 38 bp, Artificial Sequence
  Synthetic oligonucleotide
agtacgcagtgtaaattggggcagatttgtttgggtga

SEQ ID NO: 5153 - DNA, 38 bp, Artificial Sequence
  Synthetic oligonucleotide
atacggaacttaaacggtatgcattcgggtcgacttga

SEQ ID NO: 5154 - DNA, 36 bp, Artificial Sequence
  Synthetic oligonucleotide
atggtccggcggttatctgcagactttaggctccta

SEQ ID NO: 5155 - DNA, 36 bp, Artificial Sequence
  Synthetic oligonucleotide
cacaagacgtgacgtctgccattgtaccgttccgta

SEQ ID NO: 5156 - DNA, 37 bp, Artificial Sequence
  Synthetic oligonucleotide
cacctcccgtaacgttcggtgggactcctacttctga

SEQ ID NO: 5157 - DNA, 35 bp, Artificial Sequence
  Synthetic oligonucleotide
catcctgagggataaaattcgtgttgatcgtaagc

SEQ ID NO: 5158 - DNA, 36 bp, Artificial Sequence
  Synthetic oligonucleotide
ctagctttttgggtactgaatggtcgccttggtgta

SEQ ID NO: 5159 - DNA, 36 bp, Artificial Sequence
  Synthetic oligonucleotide
gaacctctcatcatagtgatgagagtttggctctga

SEQ ID NO: 5160 - DNA, 35 bp, Artificial Sequence
  Synthetic oligonucleotide
gaagcttgggtccgacctcaggctgtttcaataag

SEQ ID NO: 5161 - DNA, 38 bp, Artificial Sequence
  Synthetic oligonucleotide
gagttgagggacctccggtagggtcacccaccgcgtga

SEQ ID NO: 5162 - DNA, 36 bp, Artificial Sequence
  Synthetic oligonucleotide
gatcgctaaggtaataagacatcaagtagtcagcta

SEQ ID NO: 5163 - DNA, 37 bp, Artificial Sequence
  Synthetic oligonucleotide
gcatcgtgtgggtgcgacatcacctggcgcttgcaga

SEQ ID NO: 5164 - DNA, 35 bp, Artificial Sequence
  Synthetic oligonucleotide
gcgacattatagtaacgaatgcctgaggttacggt

SEQ ID NO: 5165 - DNA, 35 bp, Artificial Sequence
  Synthetic oligonucleotide
gcgacggcttcggactgaggatttcactttcacga

SEQ ID NO: 5166 - DNA, 38 bp, Artificial Sequence
  Synthetic oligonucleotide
gctcgagcatagatctgtgctacaagcggatcgcttga

SEQ ID NO: 5167 - DNA, 35 bp, Artificial Sequence
  Synthetic oligonucleotide
gtcaagcttgatcttaaggatcacatgtcactcta

SEQ ID NO: 5168 - DNA, 35 bp, Artificial Sequence
  Synthetic oligonucleotide
gtgggaaactcttcctgttagtagaccgttacgtt

SEQ ID NO: 5169 - DNA, 37 bp, Artificial Sequence
  Synthetic oligonucleotide
gttccactctgtagctcccctgcgttggcgaatggga

SEQ ID NO: 5170 - DNA, 35 bp, Artificial Sequence
  Synthetic oligonucleotide
gttcgctggtgaagggcctactggggaataacttg

SEQ ID NO: 5171 - DNA, 38 bp, Artificial Sequence
  Synthetic oligonucleotide
gttgaggcccgtggttgattgacagtagcttcccttga

SEQ ID NO: 5172 - DNA, 35 bp, Artificial Sequence
  Synthetic oligonucleotide
gttggcattcattggggagtatagggttttttgaa

SEQ ID NO: 5173 - DNA, 37 bp, Artificial Sequence
  Synthetic oligonucleotide
tagagccgtcacaatggtgtcgaagtttgcttatgga

SEQ ID NO: 5174 - DNA, 38 bp, Artificial Sequence
  Synthetic oligonucleotide
tagggtaccaggcactcagtcataacctgcgaggttga

SEQ ID NO: 5175 - DNA, 36 bp, Artificial Sequence
  Synthetic oligonucleotide
tcaatcgtcaatgacccggcgatgggaccgtggcca

SEQ ID NO: 5176 - DNA, 38 bp, Artificial Sequence
  Synthetic oligonucleotide
tcctgagaggttggcgacgcctattctgcaacgagtga

SEQ ID NO: 5177 - DNA, 35 bp, Artificial Sequence
  Synthetic oligonucleotide
tgaagaaaggagtatatcctccttaccgtctttca

SEQ ID NO: 5178 - DNA, 36 bp, Artificial Sequence
  Synthetic oligonucleotide
tgaccaccagtaagtgtcgcggtctgtcatggctta

SEQ ID NO: 5179 - DNA, 35 bp, Artificial Sequence
  Synthetic oligonucleotide
tgagttttgccgcgagtgcgggatcaacatagttt

SEQ ID NO: 5180 - DNA, 36 bp, Artificial Sequence
  Synthetic oligonucleotide
tgccatccacgttgaagcgggctattgaccaaggaa

SEQ ID NO: 5181 - DNA, 35 bp, Artificial Sequence
  Synthetic oligonucleotide
tgcctcaggcaggacggcttctgcaacagggtctg

SEQ ID NO: 5182 - DNA, 37 bp, Artificial Sequence
  Synthetic oligonucleotide
tggaggttgaagaaacgtacgttattagtattgtcga

SEQ ID NO: 5183 - DNA, 36 bp, Artificial Sequence
  Synthetic oligonucleotide
tggggggggaaccagttttgaatcaaatgataacta

SEQ ID NO: 5184 - DNA, 38 bp, Artificial Sequence
  Synthetic oligonucleotide
tgtgacgctgtaggttaatcctataaatccgcgggtga

SEQ ID NO: 5185 - DNA, 37 bp, Artificial Sequence
  Synthetic oligonucleotide
tgtttcgtcggattcccctagattcgagcatgctaga

SEQ ID NO: 5186 - DNA, 37 bp, Artificial Sequence
  Synthetic oligonucleotide
ttagtatgaggctgagtggagcgatgtctaagagcga

SEQ ID NO: 5187 - DNA, 38 bp, Artificial Sequence
  Synthetic oligonucleotide
ttgagtagatcggtgtacttccgcgaactgttaactga

SEQ ID NO: 5188 - DNA, 35 bp, Artificial Sequence
  Synthetic oligonucleotide
ttgctccgggatgaagatatgaatatgtatataac

SEQ ID NO: 5189 - DNA, 35 bp, Artificial Sequence
  Synthetic oligonucleotide
ttgtgatgggcttgctggctgccagacctcaccaa

SEQ ID NO: 5190 - DNA, 37 bp, Artificial Sequence
  Synthetic oligonucleotide
ttttcagccggtcataggtaatcaagcgcaacccgca

SEQ ID NO: 5191 - DNA, 37 bp, Artificial Sequence
  Synthetic oligonucleotide
gtggtcttaaacggtactacactctcgtgagagacga

SEQ ID NO: 5192 - DNA, 35 bp, Artificial Sequence
  Synthetic oligonucleotide
aaaacctgaaggctttgcgcatgcacgttcttgtg

SEQ ID NO: 5193 - DNA, 36 bp, Artificial Sequence
  Synthetic oligonucleotide
aaagggtatccggaccggactccaaattgatcagga

SEQ ID NO: 5194 - DNA, 37 bp, Artificial Sequence
  Synthetic oligonucleotide
aagactcagtatccacacaggtggttggggtgcgtga

SEQ ID NO: 5195 - DNA, 35 bp, Artificial Sequence
  Synthetic oligonucleotide
acaagagcctaagtcgctagtactttgactatctc

SEQ ID NO: 5196 - DNA, 37 bp, Artificial Sequence
  Synthetic oligonucleotide
acacccgtatgtatcagcgggactgtgaataccatga

SEQ ID NO: 5197 - DNA, 38 bp, Artificial Sequence
  Synthetic oligonucleotide
acgaaccgggttcgcgcgtatacgtgggactggcgtga

SEQ ID NO: 5198 - DNA, 37 bp, Artificial Sequence
  Synthetic oligonucleotide
acgtatccgtgtggctgcaagaccatcatggggaaga

SEQ ID NO: 5199 - DNA, 38 bp, Artificial Sequence
  Synthetic oligonucleotide
acgttctggatagcctactgcaagtctttgtctcttga

SEQ ID NO: 5200 - DNA, 36 bp, Artificial Sequence
  Synthetic oligonucleotide
agacgtattcgggacaaggatgtttcgctacggcga

SEQ ID NO: 5201 - DNA, 38 bp, Artificial Sequence
  Synthetic oligonucleotide
agttcataaggctatgggtaatcaagcctcttgtatga

SEQ ID NO: 5202 - DNA, 35 bp, Artificial Sequence
  Synthetic oligonucleotide
atggtcaggtattgttgcgacatatctcgactaat

SEQ ID NO: 5203 - DNA, 37 bp, Artificial Sequence
  Synthetic oligonucleotide
cccgccatgagggtgcccgccctgcactaggacacga

SEQ ID NO: 5204 - DNA, 35 bp, Artificial Sequence
  Synthetic oligonucleotide
cccgctgcaggggggccaaaatgcccgtctgtgtc

SEQ ID NO: 5205 - DNA, 35 bp, Artificial Sequence
  Synthetic oligonucleotide
gactgacgcgtgtatttactatatagtccgctaca

SEQ ID NO: 5206 - DNA, 35 bp, Artificial Sequence
  Synthetic oligonucleotide
gaggagttcgtaaacgtattcagtggggcttgtgc

SEQ ID NO: 5207 - DNA, 36 bp, Artificial Sequence
  Synthetic oligonucleotide
gccaacgagatcaattacgaaagccttaacgtccga

SEQ ID NO: 5208 - DNA, 35 bp, Artificial Sequence
  Synthetic oligonucleotide
gccctctagtttagcttcgtacccgttgatttagc

SEQ ID NO: 5209 - DNA, 38 bp, Artificial Sequence
  Synthetic oligonucleotide
gccgaagaagacggtgtgtggacgataagacattgtga

SEQ ID NO: 5210 - DNA, 35 bp, Artificial Sequence
  Synthetic oligonucleotide
ggctaacgcacgtctatgcagcttaagatacgccc

SEQ ID NO: 5211 - DNA, 35 bp, Artificial Sequence
  Synthetic oligonucleotide
gtaaggtcatgcatgaaaaacagagcggttacttg

SEQ ID NO: 5212 - DNA, 37 bp, Artificial Sequence
  Synthetic oligonucleotide
tacgcaacggtgatatcgtttcccattactcgtcaga

SEQ ID NO: 5213 - DNA, 37 bp, Artificial Sequence
  Synthetic oligonucleotide
taggcatgcacaagtaacggaatggacaataggtgga

SEQ ID NO: 5214 - DNA, 35 bp, Artificial Sequence
  Synthetic oligonucleotide
tagtactgagcgcgggccccaatgccagacggcac

SEQ ID NO: 5215 - DNA, 37 bp, Artificial Sequence
  Synthetic oligonucleotide
tcttgtggtgacccggcgaccggcatggctagaacga

SEQ ID NO: 5216 - DNA, 35 bp, Artificial Sequence
  Synthetic oligonucleotide
tgcaccaattaaagtccggaagtacaacactgcac

SEQ ID NO: 5217 - DNA, 38 bp, Artificial Sequence
  Synthetic oligonucleotide
tgctggggacccaggctagatgagaagtcaccatgtga

SEQ ID NO: 5218 - DNA, 36 bp, Artificial Sequence
  Synthetic oligonucleotide
tagcacgcaagattacttctatgtgctgctgtacta

SEQ ID NO: 5219 - DNA, 36 bp, Artificial Sequence
  Synthetic oligonucleotide
accgtggttcgaaaggtatgcgaagctagtttttga

SEQ ID NO: 5220 - DNA, 38 bp, Artificial Sequence
  Synthetic oligonucleotide
aagctgagacgggtggtggcacaatatctagcacttga

SEQ ID NO: 5221 - DNA, 34 bp, Artificial Sequence
  Synthetic oligonucleotide
aataagggtagtcgattgggcgcagaacgcgcat

SEQ ID NO: 5222 - DNA, 36 bp, Artificial Sequence
  Synthetic oligonucleotide
aatgacaatcaggtaatggttttcaatcgggttaaa

SEQ ID NO: 5223 - DNA, 35 bp, Artificial Sequence
  Synthetic oligonucleotide
aattacgaatcagtgttgattttgctggcacgatg

SEQ ID NO: 5224 - DNA, 35 bp, Artificial Sequence
  Synthetic oligonucleotide
acatctggtgaagctatactgagatatgtactgac

SEQ ID NO: 5225 - DNA, 38 bp, Artificial Sequence
  Synthetic oligonucleotide
agtctgcacaggcgggagttacgcaacggagatcatga

SEQ ID NO: 5226 - DNA, 35 bp, Artificial Sequence
  Synthetic oligonucleotide
atgggccacgttatatttatgtgcgaccgcgttag

SEQ ID NO: 5227 - DNA, 38 bp, Artificial Sequence
  Synthetic oligonucleotide
caactgagcttatggccttcccgagatataatccatga

SEQ ID NO: 5228 - DNA, 35 bp, Artificial Sequence
  Synthetic oligonucleotide
catacagagtcactccctattcgtggtagaggttg

SEQ ID NO: 5229 - DNA, 35 bp, Artificial Sequence
  Synthetic oligonucleotide
cgactacctgtcgcgacattatagttctgagtttc

SEQ ID NO: 5230 - DNA, 36 bp, Artificial Sequence
  Synthetic oligonucleotide
cgttgtaaatggcgtttggaggttcagggtagtaga

SEQ ID NO: 5231 - DNA, 38 bp, Artificial Sequence
  Synthetic oligonucleotide
gattaccaagtttaacagagcggggatgttttttctga

SEQ ID NO: 5232 - DNA, 38 bp, Artificial Sequence
  Synthetic oligonucleotide
gctgctttggtcgattatgttaggcacgtgaaacttga

SEQ ID NO: 5233 - DNA, 38 bp, Artificial Sequence
  Synthetic oligonucleotide
gcttttataagatctttcggggtctgcataataactga

SEQ ID NO: 5234 - DNA, 36 bp, Artificial Sequence
  Synthetic oligonucleotide
gtggtaggtacagttaaatggctggaaacttaccag

SEQ ID NO: 5235 - DNA, 35 bp, Artificial Sequence
  Synthetic oligonucleotide
gttgttttctttttacgaccggacgacaggattgc

SEQ ID NO: 5236 - DNA, 38 bp, Artificial Sequence
  Synthetic oligonucleotide
tcacagccgattaacgactcagtcgtagggggaagtga

SEQ ID NO: 5237 - DNA, 36 bp, Artificial Sequence
  Synthetic oligonucleotide
tccacgtaccttatggtgtcgaagtgcgtagaccga

SEQ ID NO: 5238 - DNA, 37 bp, Artificial Sequence
  Synthetic oligonucleotide
tcttggccctagtatcaggtcaagggcaaagtaaaga

SEQ ID NO: 5239 - DNA, 38 bp, Artificial Sequence
  Synthetic oligonucleotide
tgattggggcctactagcagtcgggaatcggtgtttga

SEQ ID NO: 5240 - DNA, 35 bp, Artificial Sequence
  Synthetic oligonucleotide
tgcgagccaacatcccagggttgcatccgcaacga

SEQ ID NO: 5241 - DNA, 38 bp, Artificial Sequence
  Synthetic oligonucleotide
ttgggatattccatagaccaggctcacctgggtcatga

SEQ ID NO: 5242 - DNA, 37 bp, Artificial Sequence
  Synthetic oligonucleotide
ttgcgtgagcgagtacgtacgaggtgatagtacaaga

SEQ ID NO: 5243 - DNA, 35 bp, Artificial Sequence
  Synthetic oligonucleotide
aatgcggcatggattagggatagaactgcaacagc

SEQ ID NO: 5244 - DNA, 37 bp, Artificial Sequence
  Synthetic oligonucleotide
actcattaacgtccaacaatgagttagataggcctga

SEQ ID NO: 5245 - DNA, 37 bp, Artificial Sequence
  Synthetic oligonucleotide
atgaatcgccatgtcgttaccgaggggttttgacaga

SEQ ID NO: 5246 - DNA, 35 bp, Artificial Sequence
  Synthetic oligonucleotide
ctggtcatttcgtgaatattagggggttccgacgc

SEQ ID NO: 5247 - DNA, 38 bp, Artificial Sequence
  Synthetic oligonucleotide
gacatgggtgttttaagattaagttgggtcgatcatga

SEQ ID NO: 5248 - DNA, 37 bp, Artificial Sequence
  Synthetic oligonucleotide
gagcgcgctgggcgcgataggctatctagagtacaga

SEQ ID NO: 5249 - DNA, 36 bp, Artificial Sequence
  Synthetic oligonucleotide
gagttgtggggttccagatatgtatgtcgcgtataa

SEQ ID NO: 5250 - DNA, 36 bp, Artificial Sequence
  Synthetic oligonucleotide
gatcatgagaagacgatttgtctccaagtacgtcaa

SEQ ID NO: 5251 - DNA, 36 bp, Artificial Sequence
  Synthetic oligonucleotide
ggtaaacggttggctacgcaggcattgggacttgga

SEQ ID NO: 5252 - DNA, 35 bp, Artificial Sequence
  Synthetic oligonucleotide
gtgtgaggtcatgtggttgagggaatcacttttct

SEQ ID NO: 5253 - DNA, 38 bp, Artificial Sequence
  Synthetic oligonucleotide
gttccgccagataacagaccggccgtagtacaccgtga

SEQ ID NO: 5254 - DNA, 36 bp, Artificial Sequence
  Synthetic oligonucleotide
tatgaaaagtacatgtgcatatcacggatgttcgaa

SEQ ID NO: 5255 - DNA, 35 bp, Artificial Sequence
  Synthetic oligonucleotide
tcaccgcctaccgtttcctggaagtacaagtgttt

SEQ ID NO: 5256 - DNA, 35 bp, Artificial Sequence
  Synthetic oligonucleotide
tccatttatagctcacaataccttttacgttgatg

SEQ ID NO: 5257 - DNA, 35 bp, Artificial Sequence
  Synthetic oligonucleotide
tgtacgtggctggaagtttagagatgcttaagggc

SEQ ID NO: 5258 - DNA, 37 bp, Artificial Sequence
  Synthetic oligonucleotide
ttctcactaggaactagccgggaggtgtccgcgttga

SEQ ID NO: 5259 - DNA, 35 bp, Artificial Sequence
  Synthetic oligonucleotide
acaaacaggaggtttgagggattgcgacatttgta

SEQ ID NO: 5260 - DNA, 36 bp, Artificial Sequence
  Synthetic oligonucleotide
cgaaagtctccttagtcatgtgagttccggctttaa

SEQ ID NO: 5261 - DNA, 38 bp, Artificial Sequence
  Synthetic oligonucleotide
gaggatcacgcgacccctttggcttgggcctcatctga

SEQ ID NO: 5262 - DNA, 35 bp, Artificial Sequence
  Synthetic oligonucleotide
gatagtcaagcggtttgaatagtttgcgatctaag

SEQ ID NO: 5263 - DNA, 37 bp, Artificial Sequence
  Synthetic oligonucleotide
gcaaatcgtcgctgcatttgtgcttacggggtaagga

SEQ ID NO: 5264 - DNA, 37 bp, Artificial Sequence
  Synthetic oligonucleotide
gggatgcacgagttttgaggttctgtcatagcacgga

SEQ ID NO: 5265 - DNA, 36 bp, Artificial Sequence
  Synthetic oligonucleotide
gtgcattgtaggagtagaattggcgggtgaatccca

SEQ ID NO: 5266 - DNA, 35 bp, Artificial Sequence
  Synthetic oligonucleotide
agcgttctgcgagcacccacgggtagtcaacttat

SEQ ID NO: 5267 - DNA, 37 bp, Artificial Sequence
  Synthetic oligonucleotide
gaaactccttgtgtgcagtctgtcccccggcggagga

SEQ ID NO: 5268 - DNA, 35 bp, Artificial Sequence
  Synthetic oligonucleotide
gcatactcgggatctaaaatgcttcctgtctgatt

SEQ ID NO: 5269 - DNA, 38 bp, Artificial Sequence
  Synthetic oligonucleotide
ggcctgcgatggggacgagaaggtgcatcacatcgtga

SEQ ID NO: 5270 - DNA, 35 bp, Artificial Sequence
  Synthetic oligonucleotide
tatgaatcttcctcacagaacgcgcggctatggcg

SEQ ID NO: 5271 - DNA, 36 bp, Artificial Sequence
  Synthetic oligonucleotide
tgagctaactccgggcggggtacattattcagtcga

SEQ ID NO: 5272 - DNA, 36 bp, Artificial Sequence
  Synthetic oligonucleotide
tgtacatcgctaagtatggggtgatataggtttaga

SEQ ID NO: 5273 - DNA, 36 bp, Artificial Sequence
  Synthetic oligonucleotide
tgaccacgagtcgtgggtagggaggtgcgggtacta

SEQ ID NO: 5274 - DNA, 36 bp, Artificial Sequence
  Synthetic oligonucleotide
aaacgttcccgcgtacgtgtccgccggcgatataca

SEQ ID NO: 5275 - DNA, 38 bp, Artificial Sequence
  Synthetic oligonucleotide
ggactctgcgagttgcattgttgtcgtcccgttcttga

SEQ ID NO: 5276 - DNA, 36 bp, Artificial Sequence
  Synthetic oligonucleotide
ggtcacttacgtacgcacagtaggcgattggaagaa

SEQ ID NO: 5277 - DNA, 35 bp, Artificial Sequence
  Synthetic oligonucleotide
tgtacaacgccttatgcattacataattgtgcgcc

SEQ ID NO: 5278 - DNA, 38 bp, Artificial Sequence
  Synthetic oligonucleotide
gccacctgctgtggccaggagttgcgcccgccaactga

SEQ ID NO: 5279 - DNA, 35 bp, Artificial Sequence
  Synthetic oligonucleotide
gagaaggtgtgaatctggctgctacttcacgggtg

SEQ ID NO: 5280 - DNA, 35 bp, Artificial Sequence
  Synthetic oligonucleotide
gcccctccccaggtgataatgggagatgcttgttc

SEQ ID NO: 5281 - DNA, 35 bp, Artificial Sequence
  Synthetic oligonucleotide
gtcgccgaatctcggccaagaacattctttcgtta

SEQ ID NO: 5282 - DNA, 37 bp, Artificial Sequence
  Synthetic oligonucleotide
acatacctttcggaatgacgaatgacaggctcggaga

SEQ ID NO: 5283 - DNA, 38 bp, Artificial Sequence
  Synthetic oligonucleotide
gctggacgtcttgggtacttgtgttaggtttttgctga

SEQ ID NO: 5284 - DNA, 36 bp, Artificial Sequence
  Synthetic oligonucleotide
gtacgacgtatgcattgctgtaaggtaacgaaacaa

SEQ ID NO: 5285 - DNA, 37 bp, Artificial Sequence
  Synthetic oligonucleotide
tacacggacgaactcatggttcatggcgacacaggga

SEQ ID NO: 5286 - DNA, 37 bp, Artificial Sequence
  Synthetic oligonucleotide
gagctgcagggaaccaataagctcgcctgtacggaga

SEQ ID NO: 5287 - DNA, 38 bp, Artificial Sequence
  Synthetic oligonucleotide
ttcgaactgctgcgagtggcgccttacgcttagattga

SEQ ID NO: 5288 - DNA, 36 bp, Artificial Sequence
  Synthetic oligonucleotide
agtgaaataaacaccgttccggtcttgcttgattta

SEQ ID NO: 5289 - DNA, 37 bp, Artificial Sequence
  Synthetic oligonucleotide
tcgtgtagactaatgtattgcagcatgtactgggcga

SEQ ID NO: 5290 - DNA, 36 bp, Artificial Sequence
  Synthetic oligonucleotide
gatcatacaactcagcgactggagcgacgaggcgaa

SEQ ID NO: 5291 - DNA, 37 bp, Artificial Sequence
  Synthetic oligonucleotide
actgcatgtcgaggaatgcgttatttaagaccagtga

SEQ ID NO: 5292 - DNA, 36 bp, Artificial Sequence
  Synthetic oligonucleotide
aacgaaccggtgtataatgttactttagagcacggg

SEQ ID NO: 5293 - DNA, 36 bp, Artificial Sequence
  Synthetic oligonucleotide
accatgggttaaccataagccaaacgggggaattga

SEQ ID NO: 5294 - DNA, 36 bp, Artificial Sequence
  Synthetic oligonucleotide
acgtcaggccaggctacagccatttattttggatta

SEQ ID NO: 5295 - DNA, 38 bp, Artificial Sequence
  Synthetic oligonucleotide
agataaagcggggaagcctattcctacagttggagtga

SEQ ID NO: 5296 - DNA, 35 bp, Artificial Sequence
  Synthetic oligonucleotide
aggcgagctaccgtacacatcgggcgctacctctg

SEQ ID NO: 5297 - DNA, 36 bp, Artificial Sequence
  Synthetic oligonucleotide
agttagtgatcggattctatagcggtccttttcgga

SEQ ID NO: 5298 - DNA, 36 bp, Artificial Sequence
  Synthetic oligonucleotide
attgggccgactggtacgactggatatccagacgta

SEQ ID NO: 5299 - DNA, 38 bp, Artificial Sequence
  Synthetic oligonucleotide
cacctgtgactgtctgcgtaaaagtctgcctaggatga

SEQ ID NO: 5300 - DNA, 36 bp, Artificial Sequence
  Synthetic oligonucleotide
catgggaagctcgtcaagggatgaaagggtggaaga

SEQ ID NO: 5301 - DNA, 35 bp, Artificial Sequence
  Synthetic oligonucleotide
ccactggactgtacagtgagttatgcaaggactta

SEQ ID NO: 5302 - DNA, 37 bp, Artificial Sequence
  Synthetic oligonucleotide
cgcataaagtagcggtgtgcttgattgaagtgctcga

SEQ ID NO: 5303 - DNA, 38 bp, Artificial Sequence
  Synthetic oligonucleotide
gacactggctaagttgtgacaatagggggcttcactga

SEQ ID NO: 5304 - DNA, 35 bp, Artificial Sequence
  Synthetic oligonucleotide
gaccagctggtgcgaggggaacgcattcagactac

SEQ ID NO: 5305 - DNA, 38 bp, Artificial Sequence
  Synthetic oligonucleotide
gcttagctacggactccgattctggatcgtgaaattga

SEQ ID NO: 5306 - DNA, 37 bp, Artificial Sequence
  Synthetic oligonucleotide
ggatcgctatgttgtttcaccgccatgccgggcctga

SEQ ID NO: 5307 - DNA, 38 bp, Artificial Sequence
  Synthetic oligonucleotide
ggatctaccattggacgcacatcctgctgctgttatga

SEQ ID NO: 5308 - DNA, 38 bp, Artificial Sequence
  Synthetic oligonucleotide
gggaggcattgaccgcaagggtgactgtaaacacctga

SEQ ID NO: 5309 - DNA, 36 bp, Artificial Sequence
  Synthetic oligonucleotide
gtccctcgttagtacaagggatcaaaggaaggggta

SEQ ID NO: 5310 - DNA, 37 bp, Artificial Sequence
  Synthetic oligonucleotide
gtctagaagcttattactcggtaatctgttgtctgga

SEQ ID NO: 5311 - DNA, 37 bp, Artificial Sequence
  Synthetic oligonucleotide
gttcccttagctgaggggacaaagtaccggtgacaga

SEQ ID NO: 5312 - DNA, 38 bp, Artificial Sequence
  Synthetic oligonucleotide
tccctcgtcagacggctgtcaaggggattattggttga

SEQ ID NO: 5313 - DNA, 38 bp, Artificial Sequence
  Synthetic oligonucleotide
tcgtgcattttgatgctcgtagtctgccacgtgattga

SEQ ID NO: 5314 - DNA, 36 bp, Artificial Sequence
  Synthetic oligonucleotide
tctgattcgtgaacgtattgccaaggggacgtttaa

SEQ ID NO: 5315 - DNA, 37 bp, Artificial Sequence
  Synthetic oligonucleotide
tgcgagtggaatcggccgtgggacgccgatcatggga

SEQ ID NO: 5316 - DNA, 38 bp, Artificial Sequence
  Synthetic oligonucleotide
ttagcatggtcaattcaacggttgctgtcgggtagtga

SEQ ID NO: 5317 - DNA, 36 bp, Artificial Sequence
  Synthetic oligonucleotide
ttatacagctgggataaccgtggtggctaacaggaa

SEQ ID NO: 5318 - DNA, 37 bp, Artificial Sequence
  Synthetic oligonucleotide
aaagatcaggtcgatctgctctgtgtggtactgctga

SEQ ID NO: 5319 - DNA, 35 bp, Artificial Sequence
  Synthetic oligonucleotide
agtacaggttggtccaacatatgacgctattagag

SEQ ID NO: 5320 - DNA, 36 bp, Artificial Sequence
  Synthetic oligonucleotide
agtcactgggatgcatccataagcgtgttgtgcgga

SEQ ID NO: 5321 - DNA, 37 bp, Artificial Sequence
  Synthetic oligonucleotide
ataagtaattccagcattgcggtcatctccgaagtga

SEQ ID NO: 5322 - DNA, 36 bp, Artificial Sequence
  Synthetic oligonucleotide
atggtgcgactcaatttattgtagccccgctgtgca

SEQ ID NO: 5323 - DNA, 37 bp, Artificial Sequence
  Synthetic oligonucleotide
ccctaggggtaggtggtttcctgtaggacagtactga

SEQ ID NO: 5324 - DNA, 36 bp, Artificial Sequence
  Synthetic oligonucleotide
ccgcccgtttcgaggagtgcaggcgctagtatggtc

SEQ ID NO: 5325 - DNA, 36 bp, Artificial Sequence
  Synthetic oligonucleotide
gagggtacctaaccagtacataaaaatctgctccga

SEQ ID NO: 5326 - DNA, 37 bp, Artificial Sequence
  Synthetic oligonucleotide
gcagaaaagcttggtgactagagttaatcagtccgga

SEQ ID NO: 5327 - DNA, 35 bp, Artificial Sequence
  Synthetic oligonucleotide
gccgtagctcgacacaacttgttgtgagttgctgc

SEQ ID NO: 5328 - DNA, 38 bp, Artificial Sequence
  Synthetic oligonucleotide
gcgccggggtaatttattggaggccagttacgatctga

SEQ ID NO: 5329 - DNA, 38 bp, Artificial Sequence
  Synthetic oligonucleotide
gcgtttgcggtcatgttgtttctctaggagtgacctga

SEQ ID NO: 5330 - DNA, 36 bp, Artificial Sequence
  Synthetic oligonucleotide
gctggttgccttcgagaatgatttagatacgggcta

SEQ ID NO: 5331 - DNA, 35 bp, Artificial Sequence
  Synthetic oligonucleotide
gcttaatgtcatgacggttgggtaatgtttcgtta

SEQ ID NO: 5332 - DNA, 35 bp, Artificial Sequence
  Synthetic oligonucleotide
ggaacctgttcgcgggttataatccacgggccttg

SEQ ID NO: 5333 - DNA, 35 bp, Artificial Sequence
  Synthetic oligonucleotide
tcatggtatgtattgggttaattggtgctagggtg

SEQ ID NO: 5334 - DNA, 36 bp, Artificial Sequence
  Synthetic oligonucleotide
tccatcttgggtgacctcccaggtcagaatgaatca

SEQ ID NO: 5335 - DNA, 38 bp, Artificial Sequence
  Synthetic oligonucleotide
tgcgtactagagcaaagggtgtgctaatgcgacagtga

SEQ ID NO: 5336 - DNA, 35 bp, Artificial Sequence
  Synthetic oligonucleotide
tttcatgttattacccaaatcagccgccgatcaca

SEQ ID NO: 5337 - DNA, 38 bp, Artificial Sequence
  Synthetic oligonucleotide
acatcgaagtagagcgcgagaggcgcagctgactttga

SEQ ID NO: 5338 - DNA, 35 bp, Artificial Sequence
  Synthetic oligonucleotide
actacgcagaaaacgttgtctcaaagtaccatgtg

SEQ ID NO: 5339 - DNA, 32 bp, Artificial Sequence
  Synthetic oligonucleotide
agtatgtaaccgcacattagccgacagcttga

SEQ ID NO: 5340 - DNA, 35 bp, Artificial Sequence
  Synthetic oligonucleotide
attgtgcgaaacgtcttaaagagagggattgctgg

SEQ ID NO: 5341 - DNA, 37 bp, Artificial Sequence
  Synthetic oligonucleotide
catccatccagtgtgtggttagattggcgtagacgga

SEQ ID NO: 5342 - DNA, 37 bp, Artificial Sequence
  Synthetic oligonucleotide
cccgtgactttggtttcatgcccgactggttacacga

SEQ ID NO: 5343 - DNA, 35 bp, Artificial Sequence
  Synthetic oligonucleotide
ctaccagtggttaatctctgggagcgttattggcg

SEQ ID NO: 5344 - DNA, 38 bp, Artificial Sequence
  Synthetic oligonucleotide
gacatctttcggtattggcatgcctccatatgtcttga

SEQ ID NO: 5345 - DNA, 35 bp, Artificial Sequence
  Synthetic oligonucleotide
gcgcgatgcttgaatcgacggaccactaggctgtc

SEQ ID NO: 5346 - DNA, 36 bp, Artificial Sequence
  Synthetic oligonucleotide
ggcactcattgcacatggcgcggtgtgattaatgta

SEQ ID NO: 5347 - DNA, 36 bp, Artificial Sequence
  Synthetic oligonucleotide
ggtcactcctgagtaaaatctggtcgtctgtgtaaa

SEQ ID NO: 5348 - DNA, 36 bp, Artificial Sequence
  Synthetic oligonucleotide
gtagggggagacgtggagtggcgtcccctcagcaga

SEQ ID NO: 5349 - DNA, 38 bp, Artificial Sequence
  Synthetic oligonucleotide
gtgcgacaagtggagaccccttcgtagcgtacgtttga

SEQ ID NO: 5350 - DNA, 36 bp, Artificial Sequence
  Synthetic oligonucleotide
tattatatacgagtgcgtatgtgttgttttgctaga

SEQ ID NO: 5351 - DNA, 36 bp, Artificial Sequence
  Synthetic oligonucleotide
tgagtcatcctaagtcattaagtctccatatgggga

SEQ ID NO: 5352 - DNA, 36 bp, Artificial Sequence
  Synthetic oligonucleotide
tggtgcctacaaacaccgtaggggtgtctcagtcaa

SEQ ID NO: 5353 - DNA, 37 bp, Artificial Sequence
  Synthetic oligonucleotide
ttctggaccgggtaactgcgaaaggttagtcgagcga

SEQ ID NO: 5354 - DNA, 36 bp, Artificial Sequence
  Synthetic oligonucleotide
tttaacggaccccagccagtgaaggcggccaaaata

SEQ ID NO: 5355 - DNA, 38 bp, Artificial Sequence
  Synthetic oligonucleotide
aaatgagtcatagattgatcacgaccttatagtaatga

SEQ ID NO: 5356 - DNA, 38 bp, Artificial Sequence
  Synthetic oligonucleotide
acaactgccagttagggaagagccttaagtgaagctga

SEQ ID NO: 5357 - DNA, 35 bp, Artificial Sequence
  Synthetic oligonucleotide
acgacgtgtgtacgggatactaggattgggcaact

SEQ ID NO: 5358 - DNA, 35 bp, Artificial Sequence
  Synthetic oligonucleotide
acgtgggggcctcgtgtatcttgtcgatgcttccc

SEQ ID NO: 5359 - DNA, 37 bp, Artificial Sequence
  Synthetic oligonucleotide
agaacggagcgatagcaatgatgtgagcgatatgtga

SEQ ID NO: 5360 - DNA, 36 bp, Artificial Sequence
  Synthetic oligonucleotide
ccggtcgccccggataacgagtagtcgtttgtacta

SEQ ID NO: 5361 - DNA, 38 bp, Artificial Sequence
  Synthetic oligonucleotide
cggacataccacaagcatgtgtgcgttcgagatggtga

SEQ ID NO: 5362 - DNA, 36 bp, Artificial Sequence
  Synthetic oligonucleotide
gatacggcgtagattgtttttatcggatgcagagta

SEQ ID NO: 5363 - DNA, 37 bp, Artificial Sequence
  Synthetic oligonucleotide
gctcaaactctttggaggattgcatggaattgcgaga

SEQ ID NO: 5364 - DNA, 36 bp, Artificial Sequence
  Synthetic oligonucleotide
gctgtcagcttgtacgtaacacttgcgttgcaacca

SEQ ID NO: 5365 - DNA, 37 bp, Artificial Sequence
  Synthetic oligonucleotide
gctgtccatgctgaacggcgaacgctcccctggacga

SEQ ID NO: 5366 - DNA, 37 bp, Artificial Sequence
  Synthetic oligonucleotide
gggtgacgtacaggtcaagaaaaagtgtcccttgcga

SEQ ID NO: 5367 - DNA, 36 bp, Artificial Sequence
  Synthetic oligonucleotide
gtgggcaacaagcataggaatggagcacgaccggta

SEQ ID NO: 5368 - DNA, 37 bp, Artificial Sequence
  Synthetic oligonucleotide
tagcacaccctgaggtatattaaacaggctcccccga

SEQ ID NO: 5369 - DNA, 35 bp, Artificial Sequence
  Synthetic oligonucleotide
tatgtacttaatccgatagtgtgatacgaagctcg

SEQ ID NO: 5370 - DNA, 37 bp, Artificial Sequence
  Synthetic oligonucleotide
tcttgtggttaaggggtgtaggggaacgcgttcgaga

SEQ ID NO: 5371 - DNA, 36 bp, Artificial Sequence
  Synthetic oligonucleotide
aagcccagtgtctccggtacataacggctgtaaata

SEQ ID NO: 5372 - DNA, 35 bp, Artificial Sequence
  Synthetic oligonucleotide
agaggtctggggggatcaaacatatgcgccgccct

SEQ ID NO: 5373 - DNA, 38 bp, Artificial Sequence
  Synthetic oligonucleotide
atatgtcgaggttacaagtggttattaaggcgtactga

SEQ ID NO: 5374 - DNA, 35 bp, Artificial Sequence
  Synthetic oligonucleotide
gtgatcgtccttcatgtggtacccgggtgctgcac

SEQ ID NO: 5375 - DNA, 38 bp, Artificial Sequence
  Synthetic oligonucleotide
tgattgggctcaacgccagttgaaacatggtagaatga

SEQ ID NO: 5376 - DNA, 37 bp, Artificial Sequence
  Synthetic oligonucleotide
ttggacgaaagagggtttatggtcgacactagtttga

SEQ ID NO: 5377 - DNA, 35 bp, Artificial Sequence
  Synthetic oligonucleotide
aacgcggtagttagtccctatactataggcttcta

SEQ ID NO: 5378 - DNA, 35 bp, Artificial Sequence
  Synthetic oligonucleotide
attacaacgtatggcctcccaagtctttgacggtt

SEQ ID NO: 5379 - DNA, 36 bp, Artificial Sequence
  Synthetic oligonucleotide
ggaaaggttcttgccgctcggagcagaggcgtacga

SEQ ID NO: 5380 - DNA, 37 bp, Artificial Sequence
  Synthetic oligonucleotide
gtccgcattaggttttgcactggggggtatttggaga

SEQ ID NO: 5381 - DNA, 37 bp, Artificial Sequence
  Synthetic oligonucleotide
tcaccacgggtatgcgtagtctgctggcccaagacga

SEQ ID NO: 5382 - DNA, 38 bp, Artificial Sequence
  Synthetic oligonucleotide
tccactgaaacttacgctgatacgcccatgtgccgtga

SEQ ID NO: 5383 - DNA, 35 bp, Artificial Sequence
  Synthetic oligonucleotide
ttagggctaatcaactagcactaccgtctttcagt

SEQ ID NO: 5384 - DNA, 35 bp, Artificial Sequence
  Synthetic oligonucleotide
agatccttgcatccgaagcatgcagatattcctgg

SEQ ID NO: 5385 - DNA, 36 bp, Artificial Sequence
  Synthetic oligonucleotide
agggccggaaacgggacaggcgagataggatatcta

SEQ ID NO: 5386 - DNA, 37 bp, Artificial Sequence
  Synthetic oligonucleotide
agtctaggcctttacgttcacaggatgagggagtaga

SEQ ID NO: 5387 - DNA, 35 bp, Artificial Sequence
  Synthetic oligonucleotide
gcaaaattgatgtattccctaacataccgctggca

SEQ ID NO: 5388 - DNA, 37 bp, Artificial Sequence
  Synthetic oligonucleotide
gggggtgaaatccaggatcagattcaagaatcgacga

SEQ ID NO: 5389 - DNA, 37 bp, Artificial Sequence
  Synthetic oligonucleotide
taaggaccggcctgccttcctatgttctttgctacga

SEQ ID NO: 5390 - DNA, 36 bp, Artificial Sequence
  Synthetic oligonucleotide
tgacccgactacgtgcgcaatgataaagcgtgcgga

SEQ ID NO: 5391 - DNA, 38 bp, Artificial Sequence
  Synthetic oligonucleotide
aaagactttattggagacgggtaggttccgtgacgtga

SEQ ID NO: 5392 - DNA, 36 bp, Artificial Sequence
  Synthetic oligonucleotide
tgtccgttccgggggctagataaggctgaggaatga

SEQ ID NO: 5393 - DNA, 35 bp, Artificial Sequence
  Synthetic oligonucleotide
agatcgaagccaactgcaggaagtagaggtggaat

SEQ ID NO: 5394 - DNA, 36 bp, Artificial Sequence
  Synthetic oligonucleotide
ctaccttggagacgcataacgagcagatccgggcta

SEQ ID NO: 5395 - DNA, 38 bp, Artificial Sequence
  Synthetic oligonucleotide
gtcgcacgtgccgtgtttagaaagggaccgacgggtga

SEQ ID NO: 5396 - DNA, 37 bp, Artificial Sequence
  Synthetic oligonucleotide
gtccggaacgtctgcatgttatcacgcgttgggttga

SEQ ID NO: 5397 - DNA, 35 bp, Artificial Sequence
  Synthetic oligonucleotide
ttcctcggacacagattctcggtcaaggcttcaat

SEQ ID NO: 5398 - DNA, 28 bp, Artificial Sequence
  Synthetic oligonucleotide
gagtgcattacgggtatattttgtactg

SEQ ID NO: 5399 - DNA, 36 bp, Artificial Sequence
  Synthetic oligonucleotide
tcttaccggtctcagagggtcgggagaattaacgta

SEQ ID NO: 5400 - DNA, 38 bp, Artificial Sequence
  Synthetic oligonucleotide
gactccgtggtctgatgaggtgccccgtgctgccctga

SEQ ID NO: 5401 - DNA, 36 bp, Artificial Sequence
  Synthetic oligonucleotide
gcccaccggatgtaagaagtaggagagctaggaaga

SEQ ID NO: 5402 - DNA, 35 bp, Artificial Sequence
  Synthetic oligonucleotide
aaaggctcaaactctatgttatcagtataagtcgt

SEQ ID NO: 5403 - DNA, 37 bp, Artificial Sequence
  Synthetic oligonucleotide
aaccatggttgtaaagggcagagccccgctcagagga

SEQ ID NO: 5404 - DNA, 38 bp, Artificial Sequence
  Synthetic oligonucleotide
aactggctaccagtgtcgttacgtacttcacggggtga

SEQ ID NO: 5405 - DNA, 35 bp, Artificial Sequence
  Synthetic oligonucleotide
aagacaacgggacgcgacacctggtctgcgagata

SEQ ID NO: 5406 - DNA, 37 bp, Artificial Sequence
  Synthetic oligonucleotide
aagcatgccaatatgtgctctgcacgtaaatgcggga

SEQ ID NO: 5407 - DNA, 38 bp, Artificial Sequence
  Synthetic oligonucleotide
aataaggccattgtctctatcgttaaacctctggctga

SEQ ID NO: 5408 - DNA, 37 bp, Artificial Sequence
  Synthetic oligonucleotide
aatacccgtttagagtgacggattttcactttgtcga

SEQ ID NO: 5409 - DNA, 36 bp, Artificial Sequence
  Synthetic oligonucleotide
aatcactctcactgatgggagtgggagattgacgta

SEQ ID NO: 5410 - DNA, 35 bp, Artificial Sequence
  Synthetic oligonucleotide
acaccggtttacgacgtgacggtataatgccctac

SEQ ID NO: 5411 - DNA, 38 bp, Artificial Sequence
  Synthetic oligonucleotide
acatggaccagtcgttggacgaatgcgccgggctatga

SEQ ID NO: 5412 - DNA, 38 bp, Artificial Sequence
  Synthetic oligonucleotide
acgtctgagtgataatctaatgagttcgagctgcatga

SEQ ID NO: 5413 - DNA, 35 bp, Artificial Sequence
  Synthetic oligonucleotide
actcctctaacccaattgcgctgattggtcgctcg

SEQ ID NO: 5414 - DNA, 36 bp, Artificial Sequence
  Synthetic oligonucleotide
acttccgtcaggaataggaccggcggagatgccgta

SEQ ID NO: 5415 - DNA, 35 bp, Artificial Sequence
  Synthetic oligonucleotide
agacgccacgtcctgcgctggcgcctagtgatgta

SEQ ID NO: 5416 - DNA, 36 bp, Artificial Sequence
  Synthetic oligonucleotide
agagtggcgtgatggtcatcctttccctccggtgta

SEQ ID NO: 5417 - DNA, 35 bp, Artificial Sequence
  Synthetic oligonucleotide
agccagattctacggttttcattctcgagcgtgtt

SEQ ID NO: 5418 - DNA, 35 bp, Artificial Sequence
  Synthetic oligonucleotide
agccagtgtatagtctcccttgtatcagcccagag

SEQ ID NO: 5419 - DNA, 35 bp, Artificial Sequence
  Synthetic oligonucleotide
agcctactaggcgcgtgaatgtttgggacgaattc

SEQ ID NO: 5420 - DNA, 35 bp, Artificial Sequence
  Synthetic oligonucleotide
agtgtggatgcttaggaaaaggtctgttcggcact

SEQ ID NO: 5421 - DNA, 35 bp, Artificial Sequence
  Synthetic oligonucleotide
ataacctggggaatatgttcccaggggcgaaaggc

SEQ ID NO: 5422 - DNA, 37 bp, Artificial Sequence
  Synthetic oligonucleotide
atatccaaagtaatcctggagagttgcggtgaggcga

SEQ ID NO: 5423 - DNA, 36 bp, Artificial Sequence
  Synthetic oligonucleotide
atcaggaagccatcggtcgacaggggcatatgccga

SEQ ID NO: 5424 - DNA, 38 bp, Artificial Sequence
  Synthetic oligonucleotide
attatcttcctgctggtaggaggtgcccttgtgtgtga

SEQ ID NO: 5425 - DNA, 37 bp, Artificial Sequence
  Synthetic oligonucleotide
attgagtccagatatgattacacgtcataccgaagga

SEQ ID NO: 5426 - DNA, 36 bp, Artificial Sequence
  Synthetic oligonucleotide
caaaaaaagatgggcttccaattagttgagcgtcaa

SEQ ID NO: 5427 - DNA, 36 bp, Artificial Sequence
  Synthetic oligonucleotide
caagaacgaactaggtcagtacaagaagggtaccga

SEQ ID NO: 5428 - DNA, 35 bp, Artificial Sequence
  Synthetic oligonucleotide
caccaccgacggattctgtagtctcggtcggagtc

SEQ ID NO: 5429 - DNA, 36 bp, Artificial Sequence
  Synthetic oligonucleotide
catccataaataatgtatggacggcgccccccccga

SEQ ID NO: 5430 - DNA, 35 bp, Artificial Sequence
  Synthetic oligonucleotide
ccatggaggtcacggacgcgaagtggttggagctg

SEQ ID NO: 5431 - DNA, 38 bp, Artificial Sequence
  Synthetic oligonucleotide
cccgcgcttcagttcagagcgggcgtatgtaccattga

SEQ ID NO: 5432 - DNA, 38 bp, Artificial Sequence
  Synthetic oligonucleotide
cgggatggtggtggcacttcttatggccgtgttactga

SEQ ID NO: 5433 - DNA, 35 bp, Artificial Sequence
  Synthetic oligonucleotide
gaaaggtctacgatagcgacgtatttgcggtaaac

SEQ ID NO: 5434 - DNA, 38 bp, Artificial Sequence
  Synthetic oligonucleotide
gaacgcacaggtattaattacggtccgaaacgccctga

SEQ ID NO: 5435 - DNA, 37 bp, Artificial Sequence
  Synthetic oligonucleotide
gaactgggtgttacacgtgataagtagtgtagagaga

SEQ ID NO: 5436 - DNA, 37 bp, Artificial Sequence
  Synthetic oligonucleotide
gaatcgggtcagggtctaacggaaaccgacggactga

SEQ ID NO: 5437 - DNA, 36 bp, Artificial Sequence
  Synthetic oligonucleotide
gaattggtcggacaagctttgcagacgatttagcga

SEQ ID NO: 5438 - DNA, 37 bp, Artificial Sequence
  Synthetic oligonucleotide
gacatgctcaacggatgaccgttttctgtaggaaaga

SEQ ID NO: 5439 - DNA, 37 bp, Artificial Sequence
  Synthetic oligonucleotide
gactgcaggtctgcggttccgtgggttactattagga

SEQ ID NO: 5440 - DNA, 38 bp, Artificial Sequence
  Synthetic oligonucleotide
gagggtcatggacgggacgtcaaaacccggaatcttga

SEQ ID NO: 5441 - DNA, 35 bp, Artificial Sequence
  Synthetic oligonucleotide
gcaaccatgcggttggtatgttttcagacacacgt

SEQ ID NO: 5442 - DNA, 35 bp, Artificial Sequence
  Synthetic oligonucleotide
gcacaactcaatttgcaaaatgcctgaggctgtta

SEQ ID NO: 5443 - DNA, 35 bp, Artificial Sequence
  Synthetic oligonucleotide
gcacgggaggtgactcatggagtgctggaaagctc

SEQ ID NO: 5444 - DNA, 36 bp, Artificial Sequence
  Synthetic oligonucleotide
gcatctggggctcccggagcacgtcaaagaaaggta

SEQ ID NO: 5445 - DNA, 38 bp, Artificial Sequence
  Synthetic oligonucleotide
gcatgccaatggttccggtgaattcgtgctgacgctga

SEQ ID NO: 5446 - DNA, 38 bp, Artificial Sequence
  Synthetic oligonucleotide
gcatggacgacgatataggctaatgggctaagagatga

SEQ ID NO: 5447 - DNA, 37 bp, Artificial Sequence
  Synthetic oligonucleotide
gcggatagtactccgggaatgtaccgcgggaattaga

SEQ ID NO: 5448 - DNA, 37 bp, Artificial Sequence
  Synthetic oligonucleotide
gcgtatgttgttagtagataagggagacagtggatga

SEQ ID NO: 5449 - DNA, 36 bp, Artificial Sequence
  Synthetic oligonucleotide
gctacaactaattagtcgataaggttagtggaggta

SEQ ID NO: 5450 - DNA, 37 bp, Artificial Sequence
  Synthetic oligonucleotide
ggctgagaagcaacgatgttattgaataagatcttga

SEQ ID NO: 5451 - DNA, 37 bp, Artificial Sequence
  Synthetic oligonucleotide
gggatggcttcttaactgtgattcagagtcatcttga

SEQ ID NO: 5452 - DNA, 37 bp, Artificial Sequence
  Synthetic oligonucleotide
gggcaactcgtggcatgatttgcgtaagagctgtcga

SEQ ID NO: 5453 - DNA, 35 bp, Artificial Sequence
  Synthetic oligonucleotide
gggctccaccgtggtgccggatccaaatctgaacc

SEQ ID NO: 5454 - DNA, 36 bp, Artificial Sequence
  Synthetic oligonucleotide
ggggaaggacgaggtctgggtcgtagtgcggtttag

SEQ ID NO: 5455 - DNA, 37 bp, Artificial Sequence
  Synthetic oligonucleotide
ggtacgcggtttgtagaccggttttcggatttgccga

SEQ ID NO: 5456 - DNA, 35 bp, Artificial Sequence
  Synthetic oligonucleotide
ggtaggtcagtggactttattccagtgtggtgagg

SEQ ID NO: 5457 - DNA, 38 bp, Artificial Sequence
  Synthetic oligonucleotide
ggtcgttaatctgcaagtgttgggttttccacggctga

SEQ ID NO: 5458 - DNA, 37 bp, Artificial Sequence
  Synthetic oligonucleotide
ggtgtaagttcacactcgtaacgatttgggaggcgga

SEQ ID NO: 5459 - DNA, 36 bp, Artificial Sequence
  Synthetic oligonucleotide
ggttcgcgagcactaagctggaagcggtcgccacta

SEQ ID NO: 5460 - DNA, 35 bp, Artificial Sequence
  Synthetic oligonucleotide
ggttgcgtgaggtgctttcatgcgtttaatgtcac

SEQ ID NO: 5461 - DNA, 36 bp, Artificial Sequence
  Synthetic oligonucleotide
gtaaataacaaagcggagcgtgggaggttgaaggta

SEQ ID NO: 5462 - DNA, 35 bp, Artificial Sequence
  Synthetic oligonucleotide
gtaccacgcgaatgtatccacggttcggatgactg

SEQ ID NO: 5463 - DNA, 36 bp, Artificial Sequence
  Synthetic oligonucleotide
gtagggaggtgctgcgagaaattacatactgacaga

SEQ ID NO: 5464 - DNA, 38 bp, Artificial Sequence
  Synthetic oligonucleotide
gtcccagcaataattaggcacagggaaaaagtaagtga

SEQ ID NO: 5465 - DNA, 36 bp, Artificial Sequence
  Synthetic oligonucleotide
gtcgtttcgaagctctcattctacggtgtcgcacaa

SEQ ID NO: 5466 - DNA, 38 bp, Artificial Sequence
  Synthetic oligonucleotide
gtctgatgacaagctgggtaaacagtaggtctgtctga

SEQ ID NO: 5467 - DNA, 37 bp, Artificial Sequence
  Synthetic oligonucleotide
gtctgattagacgctggtactggacacctaagcacga

SEQ ID NO: 5468 - DNA, 38 bp, Artificial Sequence
  Synthetic oligonucleotide
gtgagcacggtgctatgacggtggtcatgcggatttga

SEQ ID NO: 5469 - DNA, 38 bp, Artificial Sequence
  Synthetic oligonucleotide
gtgatagtccaacagggactatatcagatttacattga

SEQ ID NO: 5470 - DNA, 37 bp, Artificial Sequence
  Synthetic oligonucleotide
gttctgaacgtgtgcaggcattgtattagtactttaa

SEQ ID NO: 5471 - DNA, 36 bp, Artificial Sequence
  Synthetic oligonucleotide
gttcttctagggttataacccagattacgtgcttta

SEQ ID NO: 5472 - DNA, 38 bp, Artificial Sequence
  Synthetic oligonucleotide
taaggagaaagaacttgtcgtactgcgtaacatggcga

SEQ ID NO: 5473 - DNA, 35 bp, Artificial Sequence
  Synthetic oligonucleotide
tacaagtgtgaaacacagtgaatcgtggtaagttc

SEQ ID NO: 5474 - DNA, 37 bp, Artificial Sequence
  Synthetic oligonucleotide
tacagtagacacttttgatttgatggctgttgtggga

SEQ ID NO: 5475 - DNA, 36 bp, Artificial Sequence
  Synthetic oligonucleotide
tagaacatagtgctgttagcaagatgaccgacgaga

SEQ ID NO: 5476 - DNA, 35 bp, Artificial Sequence
  Synthetic oligonucleotide
taggacacgaactgttaggacagcttggaagccgc

SEQ ID NO: 5477 - DNA, 35 bp, Artificial Sequence
  Synthetic oligonucleotide
tatcgcatgatactagtgtgaaaagtcatggtgga

SEQ ID NO: 5478 - DNA, 36 bp, Artificial Sequence
  Synthetic oligonucleotide
tatggagaggcctcgctttcgcgctaggcggttgta

SEQ ID NO: 5479 - DNA, 37 bp, Artificial Sequence
  Synthetic oligonucleotide
tattgtgatgcaacaggttgggtatagacttcaatga

SEQ ID NO: 5480 - DNA, 37 bp, Artificial Sequence
  Synthetic oligonucleotide
tcagaattcatcgtactgttgtgatttttcagtgaga

SEQ ID NO: 5481 - DNA, 37 bp, Artificial Sequence
  Synthetic oligonucleotide
tcatcgcaggatgaggacacgtactgtaatccgctga

SEQ ID NO: 5482 - DNA, 35 bp, Artificial Sequence
  Synthetic oligonucleotide
tccacgatggactgactggaagggggaccccgagc

SEQ ID NO: 5483 - DNA, 35 bp, Artificial Sequence
  Synthetic oligonucleotide
tccgagatccggtgcgatcatctatgctggaatag

SEQ ID NO: 5484 - DNA, 35 bp, Artificial Sequence
  Synthetic oligonucleotide
tccgcgaagtgtattatttcttcggatacgcggtg

SEQ ID NO: 5485 - DNA, 37 bp, Artificial Sequence
  Synthetic oligonucleotide
tccgtggtggcgtagggttcggttagtgataggttga

SEQ ID NO: 5486 - DNA, 37 bp, Artificial Sequence
  Synthetic oligonucleotide
tctgagatttaggaacgagggattggtaggcttttga

SEQ ID NO: 5487 - DNA, 37 bp, Artificial Sequence
  Synthetic oligonucleotide
tctgtatatggatatacctcgtttgcagtcgggtaga

SEQ ID NO: 5488 - DNA, 36 bp, Artificial Sequence
  Synthetic oligonucleotide
tcttaagcgttgcgtacaagggaccacgaaacctaa

SEQ ID NO: 5489 - DNA, 38 bp, Artificial Sequence
  Synthetic oligonucleotide
tgaaacgtccggggtggtttaggaaacacaaaatatga

SEQ ID NO: 5490 - DNA, 35 bp, Artificial Sequence
  Synthetic oligonucleotide
tgagagtcgcatgacgtggcattagggccccggag

SEQ ID NO: 5491 - DNA, 38 bp, Artificial Sequence
  Synthetic oligonucleotide
tgcccagcaacaacgcaacccggtctggaacccgatga

SEQ ID NO: 5492 - DNA, 35 bp, Artificial Sequence
  Synthetic oligonucleotide
tgctcagccgctatgttaaccgtaacggcaataac

SEQ ID NO: 5493 - DNA, 38 bp, Artificial Sequence
  Synthetic oligonucleotide
tggattgattgcagacaccatgcagtttttccgtatga

SEQ ID NO: 5494 - DNA, 35 bp, Artificial Sequence
  Synthetic oligonucleotide
tggtacaagtaaagcgaagaataactgcctacggg

SEQ ID NO: 5495 - DNA, 36 bp, Artificial Sequence
  Synthetic oligonucleotide
tggtgcagacctcgtacaggggcgtggttaggttaa

SEQ ID NO: 5496 - DNA, 35 bp, Artificial Sequence
  Synthetic oligonucleotide
tgtatggcttctacactttggttatgctaggcgac

SEQ ID NO: 5497 - DNA, 36 bp, Artificial Sequence
  Synthetic oligonucleotide
tgtcctgccaaggtaacaaatgtttcttgggcgcta

SEQ ID NO: 5498 - DNA, 38 bp, Artificial Sequence
  Synthetic oligonucleotide
tgtctgggtcgggtttgctatgtacgggtacgtggtga

SEQ ID NO: 5499 - DNA, 36 bp, Artificial Sequence
  Synthetic oligonucleotide
tgttgagtttaaaaaatgtgttggcttgcagaatga

SEQ ID NO: 5500 - DNA, 35 bp, Artificial Sequence
  Synthetic oligonucleotide
ttacggtccaggttttactttgtatttggcgacga

SEQ ID NO: 5501 - DNA, 35 bp, Artificial Sequence
  Synthetic oligonucleotide
ttactccacgggatggactcagtagcttgtctttg

SEQ ID NO: 5502 - DNA, 38 bp, Artificial Sequence
  Synthetic oligonucleotide
ttcaacctggtacaaaggtgctaaggtttaattcctga

SEQ ID NO: 5503 - DNA, 36 bp, Artificial Sequence
  Synthetic oligonucleotide
ttccagtaggaacctccgtatctacattcgagggaa

SEQ ID NO: 5504 - DNA, 38 bp, Artificial Sequence
  Synthetic oligonucleotide
ttgagtgccacgaaaatgtgtccatagtttggtgctga

SEQ ID NO: 5505 - DNA, 36 bp, Artificial Sequence
  Synthetic oligonucleotide
ttgcaaagacagagggtatctttagccagatacata

SEQ ID NO: 5506 - DNA, 36 bp, Artificial Sequence
  Synthetic oligonucleotide
ttggcaataacaggcccctgttgacgtggtgattaa

SEQ ID NO: 5507 - DNA, 35 bp, Artificial Sequence
  Synthetic oligonucleotide
ttggcatgatgacatagggtaaagccgatactagc

SEQ ID NO: 5508 - DNA, 36 bp, Artificial Sequence
  Synthetic oligonucleotide
ttgtttaggactgtctgtagcataatatctaacgca

SEQ ID NO: 5509 - DNA, 35 bp, Artificial Sequence
  Synthetic oligonucleotide
tttcctgtagggtacaacaagcaggtgttcgagtg

SEQ ID NO: 5510 - DNA, 37 bp, Artificial Sequence
  Synthetic oligonucleotide
tgactgaagcttgtatggctacgaaagattagtgtga

SEQ ID NO: 5511 - DNA, 35 bp, Artificial Sequence
  Synthetic oligonucleotide
tccgccttcacacgggcgtgtcattcaggcgcatc

SEQ ID NO: 5512 - DNA, 37 bp, Artificial Sequence
  Synthetic oligonucleotide
tgaagtaacaggctagaccagactgcagaattcttga

SEQ ID NO: 5513 - DNA, 37 bp, Artificial Sequence
  Synthetic oligonucleotide
gttgctcacgcacaacaacgcggtcataatggaccta

SEQ ID NO: 5514 - DNA, 35 bp, Artificial Sequence
  Synthetic oligonucleotide
tcctctggatttgagtggccttgtaggaatacgta

SEQ ID NO: 5515 - DNA, 36 bp, Artificial Sequence
  Synthetic oligonucleotide
gaaggtcaccagagctttggacgatgtcatgaccta

SEQ ID NO: 5516 - DNA, 36 bp, Artificial Sequence
  Synthetic oligonucleotide
actacgtatcgtagactgcagtgaaccagtacaaga

SEQ ID NO: 5517 - DNA, 37 bp, Artificial Sequence
  Synthetic oligonucleotide
ttgagcgagcttaaaccttggggtatcaagaggcgga

SEQ ID NO: 5518 - DNA, 35 bp, Artificial Sequence
  Synthetic oligonucleotide
acgcactttaggattgatcatatgtgtgtcaattg

SEQ ID NO: 5519 - DNA, 36 bp, Artificial Sequence
  Synthetic oligonucleotide
actgcactcatttacaaacagcactttcggcgaaca

SEQ ID NO: 5520 - DNA, 37 bp, Artificial Sequence
  Synthetic oligonucleotide
gccatcatgaggtgacagaattcgaccgccttaagga

SEQ ID NO: 5521 - DNA, 35 bp, Artificial Sequence
  Synthetic oligonucleotide
tctatgttatccggaaggaccaggctgacaggccc

SEQ ID NO: 5522 - DNA, 36 bp, Artificial Sequence
  Synthetic oligonucleotide
atttggtggtgtgcgtacccaggtacaagttttcca

SEQ ID NO: 5523 - DNA, 35 bp, Artificial Sequence
  Synthetic oligonucleotide
gggtctgctagtcaggtttctttgggtggttcgtc

SEQ ID NO: 5524 - DNA, 35 bp, Artificial Sequence
  Synthetic oligonucleotide
tatggacgtacagacatgagtgtttatttcgcctg

SEQ ID NO: 5525 - DNA, 37 bp, Artificial Sequence
  Synthetic oligonucleotide
tatggggccttactccgatgcgtccgcccggcgtgga

SEQ ID NO: 5526 - DNA, 36 bp, Artificial Sequence
  Synthetic oligonucleotide
tattgagtcgttgaatcctggtcgctgttcggtcaa

SEQ ID NO: 5527 - DNA, 35 bp, Artificial Sequence
  Synthetic oligonucleotide
caggctacttacacatacgagacggatgtgcgatt

SEQ ID NO: 5528 - DNA, 36 bp, Artificial Sequence
  Synthetic oligonucleotide
tatagtgcacctaaacgaaagatgaaggttagcgaa

SEQ ID NO: 5529 - DNA, 35 bp, Artificial Sequence
  Synthetic oligonucleotide
tcctgggctcctccagtctaggtttggttcttttt

SEQ ID NO: 5530 - DNA, 35 bp, Artificial Sequence
  Synthetic oligonucleotide
gctatgagtcacagcacactgttatggtgcgaggc

SEQ ID NO: 5531 - DNA, 36 bp, Artificial Sequence
  Synthetic oligonucleotide
gtgtagatatcatgcggatagtagtcgctaagctta

SEQ ID NO: 5532 - DNA, 37 bp, Artificial Sequence
  Synthetic oligonucleotide
ttattacgcactaaaaacgaactgtctcaacgagcga

SEQ ID NO: 5533 - DNA, 35 bp, Artificial Sequence
  Synthetic oligonucleotide
ttgtcgccttaatcagtctgaaaaagtaaggggct

SEQ ID NO: 5534 - DNA, 36 bp, Artificial Sequence
  Synthetic oligonucleotide
accacagactaacgacgcccttgaagtcgaacagga

SEQ ID NO: 5535 - DNA, 35 bp, Artificial Sequence
  Synthetic oligonucleotide
accactggaaagttataagtcttagcgatatacga

SEQ ID NO: 5536 - DNA, 37 bp, Artificial Sequence
  Synthetic oligonucleotide
aggagaaatccggggtgttttatgcgggacatgggga

SEQ ID NO: 5537 - DNA, 36 bp, Artificial Sequence
  Synthetic oligonucleotide
atactgccctgacagggaactgccactgcgcccgga

SEQ ID NO: 5538 - DNA, 34 bp, Artificial Sequence
  Synthetic oligonucleotide
cgataagctaaaggtttaccgagtagacgacgaa

SEQ ID NO: 5539 - DNA, 38 bp, Artificial Sequence
  Synthetic oligonucleotide
ctcgaccgggtgtccgaacgagactgttaaaagcgtga

SEQ ID NO: 5540 - DNA, 35 bp, Artificial Sequence
  Synthetic oligonucleotide
gatggtctgaaggggatccagtaggctatcagatt

SEQ ID NO: 5541 - DNA, 35 bp, Artificial Sequence
  Synthetic oligonucleotide
gcaatctaaaaaaccgtatacagggtccggaatgt

SEQ ID NO: 5542 - DNA, 36 bp, Artificial Sequence
  Synthetic oligonucleotide
gtgcgcttacgagacaatcggtgaatacaacttcta

SEQ ID NO: 5543 - DNA, 38 bp, Artificial Sequence
  Synthetic oligonucleotide
tctaacagcagaactcaattgtccttggcgcgaactga

SEQ ID NO: 5544 - DNA, 36 bp, Artificial Sequence
  Synthetic oligonucleotide
tctgaggccttcaatgttgctaattatgtacccgaa

SEQ ID NO: 5545 - DNA, 36 bp, Artificial Sequence
  Synthetic oligonucleotide
aacgatgttagaaacactccacggtaacggggcgta

SEQ ID NO: 5546 - DNA, 35 bp, Artificial Sequence
  Synthetic oligonucleotide
acgtactcagggcatgtgatgagcgaattcgtgct

SEQ ID NO: 5547 - DNA, 35 bp, Artificial Sequence
  Synthetic oligonucleotide
agtggtgcgtttctgatgaatttacagatgggcgt

SEQ ID NO: 5548 - DNA, 38 bp, Artificial Sequence
  Synthetic oligonucleotide
atttggtcatggcagtccatcgttttcactgtgtgtga

SEQ ID NO: 5549 - DNA, 35 bp, Artificial Sequence
  Synthetic oligonucleotide
ccaacgctgtactcttcgccttgctcaataggctc

SEQ ID NO: 5550 - DNA, 36 bp, Artificial Sequence
  Synthetic oligonucleotide
gagagaaaaggatatccagagctgtaagctaactaa

SEQ ID NO: 5551 - DNA, 38 bp, Artificial Sequence
  Synthetic oligonucleotide
ggaagggtattcctatcactgcgccctgtttggtgtga

SEQ ID NO: 5552 - DNA, 38 bp, Artificial Sequence
  Synthetic oligonucleotide
gggctccttccgaagattcgaactgacgtctttcgtga

SEQ ID NO: 5553 - DNA, 36 bp, Artificial Sequence
  Synthetic oligonucleotide
ggtcgcccacggtcaagcgtaagtaaacgcctggga

SEQ ID NO: 5554 - DNA, 37 bp, Artificial Sequence
  Synthetic oligonucleotide
tacaagggttgagttcaccagaagtccatgctccgga

SEQ ID NO: 5555 - DNA, 37 bp, Artificial Sequence
  Synthetic oligonucleotide
tccctgacccgttcgcggtaggtaggtccttgtccga

SEQ ID NO: 5556 - DNA, 37 bp, Artificial Sequence
  Synthetic oligonucleotide
tgagccttgggcataagtgcttgcgtaatgttgcgga

SEQ ID NO: 5557 - DNA, 35 bp, Artificial Sequence
  Synthetic oligonucleotide
tgtgcgtaagctgtacgtagggtcaacacaacgcg

SEQ ID NO: 5558 - DNA, 36 bp, Artificial Sequence
  Synthetic oligonucleotide
ttctagaccgcctagtttccgggggctcgctgccaa

SEQ ID NO: 5559 - DNA, 37 bp, Artificial Sequence
  Synthetic oligonucleotide
aaaggtgagcacgtgggtgagtgattttttacaagga

SEQ ID NO: 5560 - DNA, 36 bp, Artificial Sequence
  Synthetic oligonucleotide
acataacagggctgccatgacgcctgtgggggacga

SEQ ID NO: 5561 - DNA, 35 bp, Artificial Sequence
  Synthetic oligonucleotide
agttgttggcatgccagggtcatggttttgatacg

SEQ ID NO: 5562 - DNA, 37 bp, Artificial Sequence
  Synthetic oligonucleotide
cggggcatgtacactcccgagtcccgcccagtggcga

SEQ ID NO: 5563 - DNA, 36 bp, Artificial Sequence
  Synthetic oligonucleotide
gacacaagttccagcagggcttccgttggtttctga

SEQ ID NO: 5564 - DNA, 35 bp, Artificial Sequence
  Synthetic oligonucleotide
gatgcctgctcgaagcgggcatggtctgagctatg

SEQ ID NO: 5565 - DNA, 38 bp, Artificial Sequence
  Synthetic oligonucleotide
gcatggtacgtaatcagctaaggaaatgcatcgcgtga

SEQ ID NO: 5566 - DNA, 37 bp, Artificial Sequence
  Synthetic oligonucleotide
gctcgtttcgattgacgaagcaaatttgggggacgga

SEQ ID NO: 5567 - DNA, 38 bp, Artificial Sequence
  Synthetic oligonucleotide
ggattaggccgagcgaagcgtaactcaggccatactga

SEQ ID NO: 5568 - DNA, 36 bp, Artificial Sequence
  Synthetic oligonucleotide
tcaggactgagcaagcgtgctttagacctctccata

SEQ ID NO: 5569 - DNA, 35 bp, Artificial Sequence
  Synthetic oligonucleotide
tcttagactacatagaggtagccatgcataacttc

SEQ ID NO: 5570 - DNA, 37 bp, Artificial Sequence
  Synthetic oligonucleotide
tgtcctgcctaggccaccggaattacggtcgtttcga

SEQ ID NO: 5571 - DNA, 37 bp, Artificial Sequence
  Synthetic oligonucleotide
ttaagcctgcaccacatgtttgaaacggtgattctta

SEQ ID NO: 5572 - DNA, 35 bp, Artificial Sequence
  Synthetic oligonucleotide
aaggtccgatccaattcgaccttgatacgaagccc

SEQ ID NO: 5573 - DNA, 38 bp, Artificial Sequence
  Synthetic oligonucleotide
aaggttaaccttcggttccaaaactagatagtggatga

SEQ ID NO: 5574 - DNA, 36 bp, Artificial Sequence
  Synthetic oligonucleotide
actgctagtattttatggatatgcgtgacgcgagta

SEQ ID NO: 5575 - DNA, 37 bp, Artificial Sequence
  Synthetic oligonucleotide
agagtattgcataagcgcacatggttacaagcctgga

SEQ ID NO: 5576 - DNA, 36 bp, Artificial Sequence
  Synthetic oligonucleotide
agtaattcgtgattcctgtagtaggactggagttca

SEQ ID NO: 5577 - DNA, 38 bp, Artificial Sequence
  Synthetic oligonucleotide
agtactgcaagtactgaatgatgttgagatgtgggtga

SEQ ID NO: 5578 - DNA, 36 bp, Artificial Sequence
  Synthetic oligonucleotide
agtgaaaggtagggaccccgcagacggggtttagta

SEQ ID NO: 5579 - DNA, 36 bp, Artificial Sequence
  Synthetic oligonucleotide
atcgggttatctgccggtcaaggacatagttgttga

SEQ ID NO: 5580 - DNA, 35 bp, Artificial Sequence
  Synthetic oligonucleotide
atgggagaagctcacataactgggagagctgtttt

SEQ ID NO: 5581 - DNA, 36 bp, Artificial Sequence
  Synthetic oligonucleotide
catggaatgaggtacacttgtgacttggtccgaaga

SEQ ID NO: 5582 - DNA, 37 bp, Artificial Sequence
  Synthetic oligonucleotide
ctcgcaacgcgggcccattgacggactttccacccga

SEQ ID NO: 5583 - DNA, 35 bp, Artificial Sequence
  Synthetic oligonucleotide
cttacaccggaacttcacttgtgtaggggtttctc

SEQ ID NO: 5584 - DNA, 36 bp, Artificial Sequence
  Synthetic oligonucleotide
gaacgtaatcacgtagggcttgtgacgatggaacca

SEQ ID NO: 5585 - DNA, 34 bp, Artificial Sequence
  Synthetic oligonucleotide
gaagtagtgccctgttgagtctgctccaccacga

SEQ ID NO: 5586 - DNA, 37 bp, Artificial Sequence
  Synthetic oligonucleotide
gacacgggcgtgactgaaatgggggctcctctcacga

SEQ ID NO: 5587 - DNA, 36 bp, Artificial Sequence
  Synthetic oligonucleotide
gaccgcccaacgttcagttaaagatgggcccttgta

SEQ ID NO: 5588 - DNA, 38 bp, Artificial Sequence
  Synthetic oligonucleotide
gactaaggagatctatttccgccgtgcgatggtgctga

SEQ ID NO: 5589 - DNA, 38 bp, Artificial Sequence
  Synthetic oligonucleotide
gcactttaaataaggggcggaccaggtttgtgtgttga

SEQ ID NO: 5590 - DNA, 35 bp, Artificial Sequence
  Synthetic oligonucleotide
gcatcgcgtaaactttgaatcttgtgcacttctag

SEQ ID NO: 5591 - DNA, 38 bp, Artificial Sequence
  Synthetic oligonucleotide
gcatggaccaaggtttgtggatgatgtttggagattga

SEQ ID NO: 5592 - DNA, 35 bp, Artificial Sequence
  Synthetic oligonucleotide
gcatttccggcccgcgcgctggtgccatgaacgcg

SEQ ID NO: 5593 - DNA, 38 bp, Artificial Sequence
  Synthetic oligonucleotide
gtactggagtatctactctaacattgggcttctgttga

SEQ ID NO: 5594 - DNA, 36 bp, Artificial Sequence
  Synthetic oligonucleotide
gtgatacacgtagtgtcattaagctactgcgtagga

SEQ ID NO: 5595 - DNA, 38 bp, Artificial Sequence
  Synthetic oligonucleotide
gttacggaactagacagctggttagctgtttgacgtga

SEQ ID NO: 5596 - DNA, 34 bp, Artificial Sequence
  Synthetic oligonucleotide
gtttagataacggtaggccgataatttacacttg

SEQ ID NO: 5597 - DNA, 35 bp, Artificial Sequence
  Synthetic oligonucleotide
gtttatcgtgggctatcacaggaacccccacggac

SEQ ID NO: 5598 - DNA, 35 bp, Artificial Sequence
  Synthetic oligonucleotide
taaaggggctcccgtcggagaaacccgtggaaggt

SEQ ID NO: 5599 - DNA, 37 bp, Artificial Sequence
  Synthetic oligonucleotide
taccgattctattgtatacagcatataggtcgtagga

SEQ ID NO: 5600 - DNA, 38 bp, Artificial Sequence
  Synthetic oligonucleotide
tacgtcgagccccagcttcgtaaaaggaaaatgtctga

SEQ ID NO: 5601 - DNA, 35 bp, Artificial Sequence
  Synthetic oligonucleotide
tagttggacacccagtgtgcttaaggggcctgaag

SEQ ID NO: 5602 - DNA, 34 bp, Artificial Sequence
  Synthetic oligonucleotide
tattggcgctcgaataccgttacactggcttcga

SEQ ID NO: 5603 - DNA, 37 bp, Artificial Sequence
  Synthetic oligonucleotide
tcgaggtattcgagctgtacaccgcagaagtcgttga

SEQ ID NO: 5604 - DNA, 36 bp, Artificial Sequence
  Synthetic oligonucleotide
tgcgtccgtcccgtcatgggttttggttcccatcaa

SEQ ID NO: 5605 - DNA, 37 bp, Artificial Sequence
  Synthetic oligonucleotide
ttcggtggggcacttgggcgcagatacaataatttga

SEQ ID NO: 5606 - DNA, 35 bp, Artificial Sequence
  Synthetic oligonucleotide
ttgctttggattcgcagtaatgaggcgccaaacga

SEQ ID NO: 5607 - DNA, 38 bp, Artificial Sequence
  Synthetic oligonucleotide
tttaagtgcgagctgaagttttgctggccatttgatga

SEQ ID NO: 5608 - DNA, 36 bp, Artificial Sequence
  Synthetic oligonucleotide
aacaggcttaatactgtcagggataaaaatagcgga

SEQ ID NO: 5609 - DNA, 36 bp, Artificial Sequence
  Synthetic oligonucleotide
aagagggttggctacgtcgaaaaaggttctgtgaca

SEQ ID NO: 5610 - DNA, 37 bp, Artificial Sequence
  Synthetic oligonucleotide
acaccctagtgggtaatagccgtggtatgctttggga

SEQ ID NO: 5611 - DNA, 35 bp, Artificial Sequence
  Synthetic oligonucleotide
acgttcggggaagttttggagagccgagcgtagaa

SEQ ID NO: 5612 - DNA, 37 bp, Artificial Sequence
  Synthetic oligonucleotide
agagctggagcaccggcgtaagaaggtcgtgcgtaga

SEQ ID NO: 5613 - DNA, 36 bp, Artificial Sequence
  Synthetic oligonucleotide
agagggcctgactgagcttcctaagatgtgcgggaa

SEQ ID NO: 5614 - DNA, 36 bp, Artificial Sequence
  Synthetic oligonucleotide
aggggtgacgcacgtgtatcatacgcgccacagata

SEQ ID NO: 5615 - DNA, 37 bp, Artificial Sequence
  Synthetic oligonucleotide
cagtacttggccgtgctggcgattaatacaagagcaa

SEQ ID NO: 5616 - DNA, 35 bp, Artificial Sequence
  Synthetic oligonucleotide
catggaacaatagactagatgatccgaacgcttac

SEQ ID NO: 5617 - DNA, 35 bp, Artificial Sequence
  Synthetic oligonucleotide
cccggttaaactaaagaatgcttggggcgtagcta

SEQ ID NO: 5618 - DNA, 38 bp, Artificial Sequence
  Synthetic oligonucleotide
gaccacgagcgtgtctaccggttacttctagtaaatga

SEQ ID NO: 5619 - DNA, 34 bp, Artificial Sequence
  Synthetic oligonucleotide
gccgtgctgtttggggacacatcggtacgtatgt

SEQ ID NO: 5620 - DNA, 35 bp, Artificial Sequence
  Synthetic oligonucleotide
ggagtaataactctggtggaaggtatctagtgcta

SEQ ID NO: 5621 - DNA, 35 bp, Artificial Sequence
  Synthetic oligonucleotide
ggtacgtggttgacggtccttaggagttcgcgatt

SEQ ID NO: 5622 - DNA, 36 bp, Artificial Sequence
  Synthetic oligonucleotide
ggtagcatcagctccagtgtaatcgggaggtgatgc

SEQ ID NO: 5623 - DNA, 35 bp, Artificial Sequence
  Synthetic oligonucleotide
gtacgaatatatttcaccggacttaggtgatgttt

SEQ ID NO: 5624 - DNA, 37 bp, Artificial Sequence
  Synthetic oligonucleotide
gtgtcacacgacgtggacaccgagtacggaatgctga

SEQ ID NO: 5625 - DNA, 38 bp, Artificial Sequence
  Synthetic oligonucleotide
gttgggtcaccgatgcggttattcccttgtatgactga

SEQ ID NO: 5626 - DNA, 37 bp, Artificial Sequence
  Synthetic oligonucleotide
tactgcttagtattgtgacgtggaatgtgcttgttga

SEQ ID NO: 5627 - DNA, 35 bp, Artificial Sequence
  Synthetic oligonucleotide
tatgacgctacggcggtgttgttgaaactgggggg

SEQ ID NO: 5628 - DNA, 38 bp, Artificial Sequence
  Synthetic oligonucleotide
tgataagcacaccgagaaagacgagctatcaggcctga

SEQ ID NO: 5629 - DNA, 37 bp, Artificial Sequence
  Synthetic oligonucleotide
tgcccagaagatccaattaagagcccgctgacgaaga

SEQ ID NO: 5630 - DNA, 35 bp, Artificial Sequence
  Synthetic oligonucleotide
ttctgggctcaaacgtttaagcaagatacgaggtt

SEQ ID NO: 5631 - DNA, 35 bp, Artificial Sequence
  Synthetic oligonucleotide
tttatcaccaaaatcgtctggcgtggaggacgcac

SEQ ID NO: 5632 - DNA, 38 bp, Artificial Sequence
  Synthetic oligonucleotide
tgttcgcggggcattggtcatacgattcgcgaacatga

SEQ ID NO: 5633 - DNA, 38 bp, Artificial Sequence
  Synthetic oligonucleotide
atggcgctgggcgcacatgcgttgaaggcgtatattga

SEQ ID NO: 5634 - DNA, 37 bp, Artificial Sequence
  Synthetic oligonucleotide
ttccaagacgttgttttgaatagcatacgctagggga

SEQ ID NO: 5635 - DNA, 37 bp, Artificial Sequence
  Synthetic oligonucleotide
actgcccaacacctaagtcgtctgtcctgactttaga

SEQ ID NO: 5636 - DNA, 37 bp, Artificial Sequence
  Synthetic oligonucleotide
gtatcgtccgaagtccgtgggaagggacagctaatga

SEQ ID NO: 5637 - DNA, 37 bp, Artificial Sequence
  Synthetic oligonucleotide
gttactgccagaccatatccgggacgaccaggctcga

SEQ ID NO: 5638 - DNA, 36 bp, Artificial Sequence
  Synthetic oligonucleotide
gcctgcacacactcgaggcaatgttcttaggcgaga

SEQ ID NO: 5639 - DNA, 35 bp, Artificial Sequence
  Synthetic oligonucleotide
agtgtggcatattttggaagtctccgtttttgggg

SEQ ID NO: 5640 - DNA, 38 bp, Artificial Sequence
  Synthetic oligonucleotide
attagagctgtagacgaagggggacccgctatgagtga

SEQ ID NO: 5641 - DNA, 38 bp, Artificial Sequence
  Synthetic oligonucleotide
ttgctcaccatgtctatcatcgtactgctcaatgatga

SEQ ID NO: 5642 - DNA, 36 bp, Artificial Sequence
  Synthetic oligonucleotide
gcttcgttcaccctaactgcaagcgccatggggcga

SEQ ID NO: 5643 - DNA, 37 bp, Artificial Sequence
  Synthetic oligonucleotide
acagacgtagtataatgttggcgtcatgcgttttgga

SEQ ID NO: 5644 - DNA, 37 bp, Artificial Sequence
  Synthetic oligonucleotide
gcatgggagacgcggacttgggggggggcaataacga

SEQ ID NO: 5645 - DNA, 38 bp, Artificial Sequence
  Synthetic oligonucleotide
atgtaccttggaggggacaagaattttggacctcgtga

SEQ ID NO: 5646 - DNA, 38 bp, Artificial Sequence
  Synthetic oligonucleotide
ccattggccttgtgctccaaatcctggtatacagatga

SEQ ID NO: 5647 - DNA, 38 bp, Artificial Sequence
  Synthetic oligonucleotide
ctaatcagatgaacattccggacgtcaatggcgagtga

SEQ ID NO: 5648 - DNA, 38 bp, Artificial Sequence
  Synthetic oligonucleotide
gaccattggaacgtgccaggagttatttgagtgcttga

SEQ ID NO: 5649 - DNA, 35 bp, Artificial Sequence
  Synthetic oligonucleotide
ggatattaagctgtatcaccatgtcatcctactca

SEQ ID NO: 5650 - DNA, 37 bp, Artificial Sequence
  Synthetic oligonucleotide
ggtaaataggactcatagcataagcgttgtcgctgga

SEQ ID NO: 5651 - DNA, 35 bp, Artificial Sequence
  Synthetic oligonucleotide
ggtagactcggaagtataacctgagaggcgttatg

SEQ ID NO: 5652 - DNA, 36 bp, Artificial Sequence
  Synthetic oligonucleotide
gtggtttgtaaacgtttacgtacaacatccattcta

SEQ ID NO: 5653 - DNA, 37 bp, Artificial Sequence
  Synthetic oligonucleotide
aatacttatcggttgaatcggatgcagggagttcgga

SEQ ID NO: 5654 - DNA, 35 bp, Artificial Sequence
  Synthetic oligonucleotide
acagttcaccgcgagggcccgcatgtatctagtcg

SEQ ID NO: 5655 - DNA, 37 bp, Artificial Sequence
  Synthetic oligonucleotide
agccatgtacgacggtaggtttggcgaggccgaatga

SEQ ID NO: 5656 - DNA, 35 bp, Artificial Sequence
  Synthetic oligonucleotide
agtatcggtaaagtgcaaccctgttttggggttca

SEQ ID NO: 5657 - DNA, 36 bp, Artificial Sequence
  Synthetic oligonucleotide
gaaagcatttgcttgttcaatgtactccgtgacaca

SEQ ID NO: 5658 - DNA, 36 bp, Artificial Sequence
  Synthetic oligonucleotide
tagcatacgtggactattaggtccagaatgctttaa

SEQ ID NO: 5659 - DNA, 36 bp, Artificial Sequence
  Synthetic oligonucleotide
tatgttaacgcaaacgatgtggtgtaccgtactata

SEQ ID NO: 5660 - DNA, 32 bp, Artificial Sequence
  Synthetic oligonucleotide
tggtacatatctgggaaggtagcaacaaacga

SEQ ID NO: 5661 - DNA, 38 bp, Artificial Sequence
  Synthetic oligonucleotide
tggtgcagggaggtgcacttgggcatgcatgggaatga

SEQ ID NO: 5662 - DNA, 34 bp, Artificial Sequence
  Synthetic oligonucleotide
tcactgagaccaccaaccgtccgtcacgaaagga

SEQ ID NO: 5663 - DNA, 35 bp, Artificial Sequence
  Synthetic oligonucleotide
acaacgtaagtgagcaccccaccgacgttagatcc

SEQ ID NO: 5664 - DNA, 35 bp, Artificial Sequence
  Synthetic oligonucleotide
acgcttattcgaacaatgatgttactgttggatga

SEQ ID NO: 5665 - DNA, 37 bp, Artificial Sequence
  Synthetic oligonucleotide
atcggccaaaagcccgtacatcatgctgtcctgacga

SEQ ID NO: 5666 - DNA, 37 bp, Artificial Sequence
  Synthetic oligonucleotide
atgggccgccatttcgttgattgacagaacgagcgga

SEQ ID NO: 5667 - DNA, 38 bp, Artificial Sequence
  Synthetic oligonucleotide
gaatgggcggttagcagtaatatagtaagtcacgatga

SEQ ID NO: 5668 - DNA, 37 bp, Artificial Sequence
  Synthetic oligonucleotide
gctttccgcggacctccccccatcgcggaagagacga

SEQ ID NO: 5669 - DNA, 38 bp, Artificial Sequence
  Synthetic oligonucleotide
gtcctgagcttcggctgctcatcgtgactccccgctga

SEQ ID NO: 5670 - DNA, 36 bp, Artificial Sequence
  Synthetic oligonucleotide
gtctatggttcgtacagctaggactattgagacgga

SEQ ID NO: 5671 - DNA, 35 bp, Artificial Sequence
  Synthetic oligonucleotide
tgcaccaatttcgcattgctgacaggacagtaagc

SEQ ID NO: 5672 - DNA, 35 bp, Artificial Sequence
  Synthetic oligonucleotide
ttagtgctaacgggaacgtgcaatcaagaaaggac

SEQ ID NO: 5673 - DNA, 35 bp, Artificial Sequence
  Synthetic oligonucleotide
tttaaaacgagcttactggcaggtatgtctgggat

SEQ ID NO: 5674 - DNA, 36 bp, Artificial Sequence
  Synthetic oligonucleotide
aatgtaagtggtgtagatactcgagagggcatctaa

SEQ ID NO: 5675 - DNA, 36 bp, Artificial Sequence
  Synthetic oligonucleotide
gtatgatccatccggctcgagtatgcgcaaatgcta

SEQ ID NO: 5676 - DNA, 35 bp, Artificial Sequence
  Synthetic oligonucleotide
gcatctaaatagcgcctacagttcggagtggggaa

SEQ ID NO: 5677 - DNA, 35 bp, Artificial Sequence
  Synthetic oligonucleotide
aagattgcagttcgctggtcctgaaggtgacattc

SEQ ID NO: 5678 - DNA, 36 bp, Artificial Sequence
  Synthetic oligonucleotide
acatgtgcggagtatccacactagttggtgcaggca

SEQ ID NO: 5679 - DNA, 38 bp, Artificial Sequence
  Synthetic oligonucleotide
acgacaagaactatgtgtgttagaactccttctcgtga

SEQ ID NO: 5680 - DNA, 37 bp, Artificial Sequence
  Synthetic oligonucleotide
agcttatgcactcatgtacctttttttggatgactga

SEQ ID NO: 5681 - DNA, 35 bp, Artificial Sequence
  Synthetic oligonucleotide
atccacgtacatgcgatgaaactgagggaccccct

SEQ ID NO: 5682 - DNA, 37 bp, Artificial Sequence
  Synthetic oligonucleotide
atgggaaccttactttgggcattaccattcgatggga

SEQ ID NO: 5683 - DNA, 38 bp, Artificial Sequence
  Synthetic oligonucleotide
catgtacggtaatgacaaatggttcagtagggcattga

SEQ ID NO: 5684 - DNA, 36 bp, Artificial Sequence
  Synthetic oligonucleotide
cccgaatggttgtccttctacattctccggggctaa

SEQ ID NO: 5685 - DNA, 36 bp, Artificial Sequence
  Synthetic oligonucleotide
gagtacagcgcttgaaacgggatccgttctcccaaa

SEQ ID NO: 5686 - DNA, 36 bp, Artificial Sequence
  Synthetic oligonucleotide
gcagtacagaagttggtgatcaaagttctatttata

SEQ ID NO: 5687 - DNA, 36 bp, Artificial Sequence
  Synthetic oligonucleotide
gcatttgcacattaatcggatttgggttccggttga

SEQ ID NO: 5688 - DNA, 36 bp, Artificial Sequence
  Synthetic oligonucleotide
ggtgaagttattcccgcggctcacacggtcgtgtaa

SEQ ID NO: 5689 - DNA, 35 bp, Artificial Sequence
  Synthetic oligonucleotide
gtaccatcacgtagtgactgtagtaaccgatgcga

SEQ ID NO: 5690 - DNA, 38 bp, Artificial Sequence
  Synthetic oligonucleotide
gttaatccccagcactaccggtccgtcttagcttgtga

SEQ ID NO: 5691 - DNA, 37 bp, Artificial Sequence
  Synthetic oligonucleotide
taacataagcggggtcgcccagtcatagagacggcga

SEQ ID NO: 5692 - DNA, 35 bp, Artificial Sequence
  Synthetic oligonucleotide
taagtgctcggacgttttgtggtcaagccagtgtt

SEQ ID NO: 5693 - DNA, 38 bp, Artificial Sequence
  Synthetic oligonucleotide
tactcaggaagggcgcggtggttgtcgccagaggatga

SEQ ID NO: 5694 - DNA, 37 bp, Artificial Sequence
  Synthetic oligonucleotide
taggtatcggctatagcggctaaaagacgaaatttga

SEQ ID NO: 5695 - DNA, 36 bp, Artificial Sequence
  Synthetic oligonucleotide
tctttagacctatggcattctgctcatgtggataca

SEQ ID NO: 5696 - DNA, 37 bp, Artificial Sequence
  Synthetic oligonucleotide
tgatcctatcgacggaaggggttaacgaggtactaga

SEQ ID NO: 5697 - DNA, 37 bp, Artificial Sequence
  Synthetic oligonucleotide
tgttatcagggtctagcgatatcaccgggaccaacga

SEQ ID NO: 5698 - DNA, 36 bp, Artificial Sequence
  Synthetic oligonucleotide
tctggattgcactcacgcggtgttgaccgtaatgaa

SEQ ID NO: 5699 - DNA, 36 bp, Artificial Sequence
  Synthetic oligonucleotide
aaataccgccgttctatttcaacgtggctacttcga

SEQ ID NO: 5700 - DNA, 38 bp, Artificial Sequence
  Synthetic oligonucleotide
aagtatgtagttaataggaagtgtggaataaggtctga

SEQ ID NO: 5701 - DNA, 36 bp, Artificial Sequence
  Synthetic oligonucleotide
aatagagctgacccatgcccgtaaacaattcaagga

SEQ ID NO: 5702 - DNA, 35 bp, Artificial Sequence
  Synthetic oligonucleotide
accgcggaaacggaatctacagtgcgtgggtaatc

SEQ ID NO: 5703 - DNA, 37 bp, Artificial Sequence
  Synthetic oligonucleotide
agtcatgttggagcgaacaagtttaggtattgttgga

SEQ ID NO: 5704 - DNA, 35 bp, Artificial Sequence
  Synthetic oligonucleotide
atgccctgcggtcagtcgaataatatatggtcgtt

SEQ ID NO: 5705 - DNA, 37 bp, Artificial Sequence
  Synthetic oligonucleotide
caatggatcgtctcctcccgtctaagttcggtactga

SEQ ID NO: 5706 - DNA, 35 bp, Artificial Sequence
  Synthetic oligonucleotide
cactattgctctagctgacttgggcatggggaaat

SEQ ID NO: 5707 - DNA, 37 bp, Artificial Sequence
  Synthetic oligonucleotide
ctgggctgaccggaattactgcatggtcatcgggcga

SEQ ID NO: 5708 - DNA, 37 bp, Artificial Sequence
  Synthetic oligonucleotide
gcctttggacgacacgatgcaagaaattgctctacga

SEQ ID NO: 5709 - DNA, 35 bp, Artificial Sequence
  Synthetic oligonucleotide
gctcgtgactagtgaggctatctttggtatcgccc

SEQ ID NO: 5710 - DNA, 37 bp, Artificial Sequence
  Synthetic oligonucleotide
gtactaacacccatggaggggaattaccccggagcga

SEQ ID NO: 5711 - DNA, 34 bp, Artificial Sequence
  Synthetic oligonucleotide
gtggtcacggtacttatgagcattctgaaaatgc

SEQ ID NO: 5712 - DNA, 38 bp, Artificial Sequence
  Synthetic oligonucleotide
tacatgcaggaagatacaaagtaggtgagactgtgtga

SEQ ID NO: 5713 - DNA, 35 bp, Artificial Sequence
  Synthetic oligonucleotide
tactgaaggggacgcacgatattggtcaggctgtg

SEQ ID NO: 5714 - DNA, 36 bp, Artificial Sequence
  Synthetic oligonucleotide
tcaaatggggatcatgctatgtgatatggggcggaa

SEQ ID NO: 5715 - DNA, 37 bp, Artificial Sequence
  Synthetic oligonucleotide
tccctatcgaccacatgcgcgtgtttgcgacccagga

SEQ ID NO: 5716 - DNA, 36 bp, Artificial Sequence
  Synthetic oligonucleotide
tcgtacaggaacgttagaccgggtaagattgttata

SEQ ID NO: 5717 - DNA, 35 bp, Artificial Sequence
  Synthetic oligonucleotide
tctcactaagagaacaagagcgagggtttggtcat

SEQ ID NO: 5718 - DNA, 36 bp, Artificial Sequence
  Synthetic oligonucleotide
tgacacgtcctgcggtatgatggagggtatttttga

SEQ ID NO: 5719 - DNA, 37 bp, Artificial Sequence
  Synthetic oligonucleotide
tgagttacaaagtccgttgcatacctggtcacataga

SEQ ID NO: 5720 - DNA, 36 bp, Artificial Sequence
  Synthetic oligonucleotide
tgtcacctattcatggggtcgcacccttagtttaca

SEQ ID NO: 5721 - DNA, 37 bp, Artificial Sequence
  Synthetic oligonucleotide
ttgggccgacctggggtccatgtagggaccggaggga

SEQ ID NO: 5722 - DNA, 37 bp, Artificial Sequence
  Synthetic oligonucleotide
ttgttcggccgcacccaagcctcccccgtcgaccaga

SEQ ID NO: 5723 - DNA, 35 bp, Artificial Sequence
  Synthetic oligonucleotide
tttgcatggcgttgaatttaggtttcaaagtcggt

SEQ ID NO: 5724 - DNA, 37 bp, Artificial Sequence
  Synthetic oligonucleotide
gattacgccctggtgtcgggttagtcatatgtttaga

SEQ ID NO: 5725 - DNA, 36 bp, Artificial Sequence
  Synthetic oligonucleotide
tgtgcggaactgcggttggttcttctaaaagctgga

SEQ ID NO: 5726 - DNA, 35 bp, Artificial Sequence
  Synthetic oligonucleotide
aaactatagctaaggccgtgctatgcattctctta

SEQ ID NO: 5727 - DNA, 37 bp, Artificial Sequence
  Synthetic oligonucleotide
aaagtgctggttgttagaatctgcctactcgaactga

SEQ ID NO: 5728 - DNA, 36 bp, Artificial Sequence
  Synthetic oligonucleotide
aacgcgtgggatgatcaagcaaggcactagttcgta

SEQ ID NO: 5729 - DNA, 36 bp, Artificial Sequence
  Synthetic oligonucleotide
aaggtttaacaggatgttatttacacaaatagggta

SEQ ID NO: 5730 - DNA, 35 bp, Artificial Sequence
  Synthetic oligonucleotide
accacaggaaccggtcatgcatcaggggaggaaac

SEQ ID NO: 5731 - DNA, 37 bp, Artificial Sequence
  Synthetic oligonucleotide
aggaggagttgttacgagccctggggaatgcacagga

SEQ ID NO: 5732 - DNA, 37 bp, Artificial Sequence
  Synthetic oligonucleotide
agtacaactggcacatcgtgcattggttggcgcatga

SEQ ID NO: 5733 - DNA, 37 bp, Artificial Sequence
  Synthetic oligonucleotide
atatccttatggtttgcgggttagtgaggggcttcga

SEQ ID NO: 5734 - DNA, 37 bp, Artificial Sequence
  Synthetic oligonucleotide
atggtaccttcgttcaagccgggcgtgccgtagtgga

SEQ ID NO: 5735 - DNA, 37 bp, Artificial Sequence
  Synthetic oligonucleotide
attaggctccctgcattcatgtacggtcctgtcgaga

SEQ ID NO: 5736 - DNA, 38 bp, Artificial Sequence
  Synthetic oligonucleotide
catgttatacaacatagttcatggcggggaatgcgtga

SEQ ID NO: 5737 - DNA, 37 bp, Artificial Sequence
  Synthetic oligonucleotide
cctaaagcacgatcttgattgtaggggttgtcttaga

SEQ ID NO: 5738 - DNA, 35 bp, Artificial Sequence
  Synthetic oligonucleotide
ctactggcaaaatgcattacgccgggtccgggaac

SEQ ID NO: 5739 - DNA, 35 bp, Artificial Sequence
  Synthetic oligonucleotide
gaaaaccgtgtaacgtttatgggtgaacgggtatt

SEQ ID NO: 5740 - DNA, 34 bp, Artificial Sequence
  Synthetic oligonucleotide
gaaacacgcaccgttccctggtgtatcaggtgga

SEQ ID NO: 5741 - DNA, 35 bp, Artificial Sequence
  Synthetic oligonucleotide
gaacacgtttgcggcttacactgatgataaaaatc

SEQ ID NO: 5742 - DNA, 35 bp, Artificial Sequence
  Synthetic oligonucleotide
gaattggttagtgtgagttaccaatccgctttatg

SEQ ID NO: 5743 - DNA, 35 bp, Artificial Sequence
  Synthetic oligonucleotide
gagtcaattcggtggggttccgtgctgaacgagtt

SEQ ID NO: 5744 - DNA, 37 bp, Artificial Sequence
  Synthetic oligonucleotide
gatctcagctcaatgttgatcggattggagtcgcgga

SEQ ID NO: 5745 - DNA, 36 bp, Artificial Sequence
  Synthetic oligonucleotide
gcctacagtcccgaaggtcataacgtctcagtttga

SEQ ID NO: 5746 - DNA, 35 bp, Artificial Sequence
  Synthetic oligonucleotide
gcgtcctgcgagggaaaacatttaacgcacgtgtt

SEQ ID NO: 5747 - DNA, 37 bp, Artificial Sequence
  Synthetic oligonucleotide
gctacaaagctatgatgaagcgcactacgatcgggga

SEQ ID NO: 5748 - DNA, 37 bp, Artificial Sequence
  Synthetic oligonucleotide
gctgtttgctactccagaacgcagttccctgtggaga

SEQ ID NO: 5749 - DNA, 36 bp, Artificial Sequence
  Synthetic oligonucleotide
gggtcctaaacctgagttgggatgctcagtgaggta

SEQ ID NO: 5750 - DNA, 37 bp, Artificial Sequence
  Synthetic oligonucleotide
ggtggtgtacaggactaccattcaagttcatgtgaga

SEQ ID NO: 5751 - DNA, 38 bp, Artificial Sequence
  Synthetic oligonucleotide
gtagtccgccatttagctatcaaggtgcttgggcttga

SEQ ID NO: 5752 - DNA, 36 bp, Artificial Sequence
  Synthetic oligonucleotide
gtcagtgaacggacgccattttattccgcccggcca

SEQ ID NO: 5753 - DNA, 35 bp, Artificial Sequence
  Synthetic oligonucleotide
gtgctgtggctcaatcttgtggcaaggtcttagac

SEQ ID NO: 5754 - DNA, 35 bp, Artificial Sequence
  Synthetic oligonucleotide
gtggacgtggcatcacgaacgtgttgcagtaatta

SEQ ID NO: 5755 - DNA, 35 bp, Artificial Sequence
  Synthetic oligonucleotide
taacttaaccgcacatgtgcttgggcaaacacgtg

SEQ ID NO: 5756 - DNA, 36 bp, Artificial Sequence
  Synthetic oligonucleotide
tcacaagacgcagtaccaagtcgacatggtttgaga

SEQ ID NO: 5757 - DNA, 35 bp, Artificial Sequence
  Synthetic oligonucleotide
tctaatctacgtttaagctcggattgggggccgta

SEQ ID NO: 5758 - DNA, 38 bp, Artificial Sequence
  Synthetic oligonucleotide
tgagggaaactactgcggtggggcgggcaacagcttga

SEQ ID NO: 5759 - DNA, 38 bp, Artificial Sequence
  Synthetic oligonucleotide
tgtttgagattaactaattggttccgggcgatagctga

SEQ ID NO: 5760 - DNA, 37 bp, Artificial Sequence
  Synthetic oligonucleotide
ttaacggtaggtttgggtatcagaccaagtttcagga

SEQ ID NO: 5761 - DNA, 37 bp, Artificial Sequence
  Synthetic oligonucleotide
ttagtagaatgaagaatgaatagacgctcggtcaaga

SEQ ID NO: 5762 - DNA, 36 bp, Artificial Sequence
  Synthetic oligonucleotide
ttgcgatagtccgctgctcgcgtaccgcgatcttca

SEQ ID NO: 5763 - DNA, 35 bp, Artificial Sequence
  Synthetic oligonucleotide
tttgcgtcgctagtaccaagagccttgtaagcatc

SEQ ID NO: 5764 - DNA, 38 bp, Artificial Sequence
  Synthetic oligonucleotide
gacgtttttatagtccacaggttctgccgacttgctga

SEQ ID NO: 5765 - DNA, 37 bp, Artificial Sequence
  Synthetic oligonucleotide
gcgtgatacccatgccagttgagtctgtagtaattga

SEQ ID NO: 5766 - DNA, 37 bp, Artificial Sequence
  Synthetic oligonucleotide
tccaatcgtcgattcgcagatccacgtcgggttggga

SEQ ID NO: 5767 - DNA, 38 bp, Artificial Sequence
  Synthetic oligonucleotide
agtgctacgataggtgaattagaaatcgccgaaactga

SEQ ID NO: 5768 - DNA, 35 bp, Artificial Sequence
  Synthetic oligonucleotide
actatacttgctcagccaccacgcttcaaacagcg

SEQ ID NO: 5769 - DNA, 38 bp, Artificial Sequence
  Synthetic oligonucleotide
atcagctacgggttctgcaggacggacacaagggttga

SEQ ID NO: 5770 - DNA, 35 bp, Artificial Sequence
  Synthetic oligonucleotide
atggagcgtggttggggctagtttcagggcgtaat

SEQ ID NO: 5771 - DNA, 34 bp, Artificial Sequence
  Synthetic oligonucleotide
gaaaacacgatgcgcgacctgagccattttttga

SEQ ID NO: 5772 - DNA, 37 bp, Artificial Sequence
  Synthetic oligonucleotide
gtagggatacataaagacgagtgggttacccgggaga

SEQ ID NO: 5773 - DNA, 38 bp, Artificial Sequence
  Synthetic oligonucleotide
gttaggacattaagtagatgttcttaggtgactattga

SEQ ID NO: 5774 - DNA, 37 bp, Artificial Sequence
  Synthetic oligonucleotide
taggagggtttaaactgtacgtaagtcggtaaactga

SEQ ID NO: 5775 - DNA, 37 bp, Artificial Sequence
  Synthetic oligonucleotide
ttcaacggcatgaccgtaaaaaacgcatgttacgtga

SEQ ID NO: 5776 - DNA, 36 bp, Artificial Sequence
  Synthetic oligonucleotide
gaagggggtaatagacgctatgtcgacactttttaa

SEQ ID NO: 5777 - DNA, 37 bp, Artificial Sequence
  Synthetic oligonucleotide
gtacagctcaaaccgcccggttttgctactctcttga

SEQ ID NO: 5778 - DNA, 38 bp, Artificial Sequence
  Synthetic oligonucleotide
acgtccatgtactttagggaaggccgtctggggcctga

SEQ ID NO: 5779 - DNA, 38 bp, Artificial Sequence
  Synthetic oligonucleotide
gactgcgggtgggtacaccaataacgagcgagcactga

SEQ ID NO: 5780 - DNA, 35 bp, Artificial Sequence
  Synthetic oligonucleotide
gatgcaggctggctgtataaccctttgggatgatg

SEQ ID NO: 5781 - DNA, 35 bp, Artificial Sequence
  Synthetic oligonucleotide
ggtcgatagatagcgacacgggccagggccataag

SEQ ID NO: 5782 - DNA, 36 bp, Artificial Sequence
  Synthetic oligonucleotide
gtgtttggtgtcaccatgggaggaggattgcgctaa

SEQ ID NO: 5783 - DNA, 35 bp, Artificial Sequence
  Synthetic oligonucleotide
taaaaaccaaggtggtcacttatgaggagttgtga

SEQ ID NO: 5784 - DNA, 37 bp, Artificial Sequence
  Synthetic oligonucleotide
tatgcagtttcactgggtcccgtaaaagcgtttctga

SEQ ID NO: 5785 - DNA, 33 bp, Artificial Sequence
  Synthetic oligonucleotide
tagccactgcgtatttcttatgattgggcgctc

SEQ ID NO: 5786 - DNA, 38 bp, Artificial Sequence
  Synthetic oligonucleotide
tcctccccgtcgcgatcgtgggagtttactcaccgtga

SEQ ID NO: 5787 - DNA, 38 bp, Artificial Sequence
  Synthetic oligonucleotide
aaacctagatcctgaggtgctgtgcgaaatagggttga

SEQ ID NO: 5788 - DNA, 35 bp, Artificial Sequence
  Synthetic oligonucleotide
acaatcagcaaggagggatgaatgatctacgtcta

SEQ ID NO: 5789 - DNA, 36 bp, Artificial Sequence
  Synthetic oligonucleotide
attgcggaaagcatcgtagatagagtagtagaaaga

SEQ ID NO: 5790 - DNA, 37 bp, Artificial Sequence
  Synthetic oligonucleotide
gatggcggataggtcttgttcccccatacgcgtccga

SEQ ID NO: 5791 - DNA, 35 bp, Artificial Sequence
  Synthetic oligonucleotide
gcctggttgccaaatggttatcgaatagggttagg

SEQ ID NO: 5792 - DNA, 36 bp, Artificial Sequence
  Synthetic oligonucleotide
gctaagagtcagttacgacgtgctcttgggaacaaa

SEQ ID NO: 5793 - DNA, 36 bp, Artificial Sequence
  Synthetic oligonucleotide
tctcgaccggggtcaggccgataatgcaggtttcca

SEQ ID NO: 5794 - DNA, 38 bp, Artificial Sequence
  Synthetic oligonucleotide
ttcgtacttgtcatatagtatactgttccttaatgtga

SEQ ID NO: 5795 - DNA, 37 bp, Artificial Sequence
  Synthetic oligonucleotide
ttgcactatgcatgaaagggtaagtatagggagtcga

SEQ ID NO: 5796 - DNA, 38 bp, Artificial Sequence
  Synthetic oligonucleotide
actgcatccccgtccccgagtagtgagcaacagggtga

SEQ ID NO: 5797 - DNA, 35 bp, Artificial Sequence
  Synthetic oligonucleotide
accgtaacacgtacgggatgagagatatgcaactt

SEQ ID NO: 5798 - DNA, 35 bp, Artificial Sequence
  Synthetic oligonucleotide
agacaccgtagtagccagacagtcggagcacgtta

SEQ ID NO: 5799 - DNA, 35 bp, Artificial Sequence
  Synthetic oligonucleotide
agactttatcgtggaagcattcaattttacggtgc

SEQ ID NO: 5800 - DNA, 38 bp, Artificial Sequence
  Synthetic oligonucleotide
atagtgcttacgtgcagactattggacaacgggcgtga

SEQ ID NO: 5801 - DNA, 35 bp, Artificial Sequence
  Synthetic oligonucleotide
attaatgttttgattagtctggcgctctcctgcgt

SEQ ID NO: 5802 - DNA, 35 bp, Artificial Sequence
  Synthetic oligonucleotide
ccgtgcggcttactgctgtacatgtttcactcagg

SEQ ID NO: 5803 - DNA, 36 bp, Artificial Sequence
  Synthetic oligonucleotide
gacaagagaagctgacttgtaccaggctaaatgcca

SEQ ID NO: 5804 - DNA, 38 bp, Artificial Sequence
  Synthetic oligonucleotide
gcaacggtacttgcccgtagtccagtcttcgagattga

SEQ ID NO: 5805 - DNA, 38 bp, Artificial Sequence
  Synthetic oligonucleotide
gcgcatgatggggcgctgatgactgggtcgtgttttga

SEQ ID NO: 5806 - DNA, 35 bp, Artificial Sequence
  Synthetic oligonucleotide
gctcgagtatacactgcaagggaggatgcaccgaa

SEQ ID NO: 5807 - DNA, 36 bp, Artificial Sequence
  Synthetic oligonucleotide
ggcccgaataatgtgggctttgtacgcagaaagcga

SEQ ID NO: 5808 - DNA, 37 bp, Artificial Sequence
  Synthetic oligonucleotide
tatagactaggagcactatcgatctcttggattgaga

SEQ ID NO: 5809 - DNA, 37 bp, Artificial Sequence
  Synthetic oligonucleotide
tcagtcctgcagtttaaaagcattttcgtgtcgctga

SEQ ID NO: 5810 - DNA, 35 bp, Artificial Sequence
  Synthetic oligonucleotide
tcgtcctggaggataacatacgcaacatcaccggg

SEQ ID NO: 5811 - DNA, 35 bp, Artificial Sequence
  Synthetic oligonucleotide
tgatggtccgagttagtgaccatggaacggctgaa

SEQ ID NO: 5812 - DNA, 38 bp, Artificial Sequence
  Synthetic oligonucleotide
tgtgcgttctgagggcagtgatccggcgttccaaatga

SEQ ID NO: 5813 - DNA, 34 bp, Artificial Sequence
  Synthetic oligonucleotide
tttacgattcgcagattcttagggatacgatttg

SEQ ID NO: 5814 - DNA, 36 bp, Artificial Sequence
  Synthetic oligonucleotide
aacacgagaatcggtgttccccgcaagaaagaagta

SEQ ID NO: 5815 - DNA, 35 bp, Artificial Sequence
  Synthetic oligonucleotide
gcatcactcccgactgtaattaagagcgccaattg

SEQ ID NO: 5816 - DNA, 38 bp, Artificial Sequence
  Synthetic oligonucleotide
taaggactcaatgtcatggggagaatggactggtatga

SEQ ID NO: 5817 - DNA, 37 bp, Artificial Sequence
  Synthetic oligonucleotide
ttgcatccatgtttgtcagtgagctgtaccattctga

SEQ ID NO: 5818 - DNA, 37 bp, Artificial Sequence
  Synthetic oligonucleotide
aatagctatagcttccatacgaccggagcggaacgga

SEQ ID NO: 5819 - DNA, 35 bp, Artificial Sequence
  Synthetic oligonucleotide
acaacctatccctctgtaccgcacatttgtatttc

SEQ ID NO: 5820 - DNA, 36 bp, Artificial Sequence
  Synthetic oligonucleotide
accagagtaaaagtgaaggtaggtcattctagtaga

SEQ ID NO: 5821 - DNA, 36 bp, Artificial Sequence
  Synthetic oligonucleotide
atggtgcgtggtacttaatggattggccctgtggga

SEQ ID NO: 5822 - DNA, 35 bp, Artificial Sequence
  Synthetic oligonucleotide
gcccacttgccttaacagcgtatttacgccgtacg

SEQ ID NO: 5823 - DNA, 38 bp, Artificial Sequence
  Synthetic oligonucleotide
gcgcctaaagttattaagtcatgataagggaaggctga

SEQ ID NO: 5824 - DNA, 37 bp, Artificial Sequence
  Synthetic oligonucleotide
ggagaggtcccagttttctgctacagtattcccaaga

SEQ ID NO: 5825 - DNA, 37 bp, Artificial Sequence
  Synthetic oligonucleotide
gtcgagtgggcggtaccgtagggctgagtcatgagga

SEQ ID NO: 5826 - DNA, 36 bp, Artificial Sequence
  Synthetic oligonucleotide
gttaactcccctcaatgacgcatgctaccggggaaa

SEQ ID NO: 5827 - DNA, 36 bp, Artificial Sequence
  Synthetic oligonucleotide
gttagcctgaatgtgagttcgtataatcggacccga

SEQ ID NO: 5828 - DNA, 35 bp, Artificial Sequence
  Synthetic oligonucleotide
taagggcgtaacatttgccgtgccctttacggatg

SEQ ID NO: 5829 - DNA, 36 bp, Artificial Sequence
  Synthetic oligonucleotide
taatgggcacgtctttttgagtaaccgcttgtctaa

SEQ ID NO: 5830 - DNA, 36 bp, Artificial Sequence
  Synthetic oligonucleotide
tacatccatggactagtccttgccggcacatgagaa

SEQ ID NO: 5831 - DNA, 35 bp, Artificial Sequence
  Synthetic oligonucleotide
tagttggttcaaaatgcgctaggagtaacggcgtg

SEQ ID NO: 5832 - DNA, 35 bp, Artificial Sequence
  Synthetic oligonucleotide
tatgcgtggatggaagtatattgagttgtaatagc

SEQ ID NO: 5833 - DNA, 35 bp, Artificial Sequence
  Synthetic oligonucleotide
gcaatggccattccggggtgtcattcaagactaac

SEQ ID NO: 5834 - DNA, 36 bp, Artificial Sequence
  Synthetic oligonucleotide
ggttacgtacccgacttaagtcatgtgtgtgaaaga

SEQ ID NO: 5835 - DNA, 36 bp, Artificial Sequence
  Synthetic oligonucleotide
aaaggttggtctagactgggcattcataggtaggga

SEQ ID NO: 5836 - DNA, 35 bp, Artificial Sequence
  Synthetic oligonucleotide
acgctcccaggagtgacaaaaaatagttggcttga

SEQ ID NO: 5837 - DNA, 37 bp, Artificial Sequence
  Synthetic oligonucleotide
agacctgtggcgagggtctgcactttgcggttcacga

SEQ ID NO: 5838 - DNA, 35 bp, Artificial Sequence
  Synthetic oligonucleotide
agtacacgccgaccgcttgagatgaactatgtgtt

SEQ ID NO: 5839 - DNA, 37 bp, Artificial Sequence
  Synthetic oligonucleotide
tcgacttccgaaaagtataacgttccaaggtgaacga

SEQ ID NO: 5840 - DNA, 37 bp, Artificial Sequence
  Synthetic oligonucleotide
ttcatgacgggggagggggtacgcgaagtatatggga

SEQ ID NO: 5841 - DNA, 38 bp, Artificial Sequence
  Synthetic oligonucleotide
tttgcatcatgaaacgtgttcggtgactggaggactga

SEQ ID NO: 5842 - DNA, 38 bp, Artificial Sequence
  Synthetic oligonucleotide
tctatcgcatggctataacgcgagctggacaagactga

SEQ ID NO: 5843 - DNA, 37 bp, Artificial Sequence
  Synthetic oligonucleotide
gagctgatggcgccgtagaacaattggacagcatctg

SEQ ID NO: 5844 - DNA, 36 bp, Artificial Sequence
  Synthetic oligonucleotide
gttacgtgcgataaagcatgggtagcaccgggacca

SEQ ID NO: 5845 - DNA, 37 bp, Artificial Sequence
  Synthetic oligonucleotide
aactcctggtaagactatagccaaagggcgtatcgga

SEQ ID NO: 5846 - DNA, 35 bp, Artificial Sequence
  Synthetic oligonucleotide
aagcaagcgctgacgctaagctcgtggagtaacaa

SEQ ID NO: 5847 - DNA, 35 bp, Artificial Sequence
  Synthetic oligonucleotide
aattgcaaacggcaatcaaacgagttaacccccct

SEQ ID NO: 5848 - DNA, 37 bp, Artificial Sequence
  Synthetic oligonucleotide
actattagttctgttgcactaatgtacgggactcgga

SEQ ID NO: 5849 - DNA, 38 bp, Artificial Sequence
  Synthetic oligonucleotide
actgctgaggtttgtctgttggcttgggtggccgatga

SEQ ID NO: 5850 - DNA, 37 bp, Artificial Sequence
  Synthetic oligonucleotide
aggagtgctatgcaatcctttagttattcgcctctga

SEQ ID NO: 5851 - DNA, 35 bp, Artificial Sequence
  Synthetic oligonucleotide
agtaagccgacacggttgacttttgttctgcagta

SEQ ID NO: 5852 - DNA, 35 bp, Artificial Sequence
  Synthetic oligonucleotide
agtacggtttagaaagatcacaccgcaatattact

SEQ ID NO: 5853 - DNA, 35 bp, Artificial Sequence
  Synthetic oligonucleotide
atccaagggcctcggggtaaaaagtgcacgcgaaa

SEQ ID NO: 5854 - DNA, 38 bp, Artificial Sequence
  Synthetic oligonucleotide
atgagtggctctacaccctggtaggatcaacgtggtga

SEQ ID NO: 5855 - DNA, 36 bp, Artificial Sequence
  Synthetic oligonucleotide
attcatggacgttcccagataggcccttagaataaa

SEQ ID NO: 5856 - DNA, 36 bp, Artificial Sequence
  Synthetic oligonucleotide
caaggtcggggacgacgcaaatgattcacctgccta

SEQ ID NO: 5857 - DNA, 35 bp, Artificial Sequence
  Synthetic oligonucleotide
caagtggctattctttagctctgtgatgtttcctg

SEQ ID NO: 5858 - DNA, 37 bp, Artificial Sequence
  Synthetic oligonucleotide
ccggggcgattggtgccaggcgtaccgtttcgattga

SEQ ID NO: 5859 - DNA, 37 bp, Artificial Sequence
  Synthetic oligonucleotide
cttactcgggcaatacacagtctgctactgtacacga

SEQ ID NO: 5860 - DNA, 35 bp, Artificial Sequence
  Synthetic oligonucleotide
gaaatcacggacctggatccatagggatagcgacc

SEQ ID NO: 5861 - DNA, 36 bp, Artificial Sequence
  Synthetic oligonucleotide
gaacgcggaacgagcagagcctcgtatgttggagca

SEQ ID NO: 5862 - DNA, 37 bp, Artificial Sequence
  Synthetic oligonucleotide
gaagcatgcgttttatagggatcatgtattgagcgga

SEQ ID NO: 5863 - DNA, 35 bp, Artificial Sequence
  Synthetic oligonucleotide
gacacacattatttcgtgttcactttcgccctagg

SEQ ID NO: 5864 - DNA, 37 bp, Artificial Sequence
  Synthetic oligonucleotide
gactctgttagaggtcacggcgtaaagcagtagtaga

SEQ ID NO: 5865 - DNA, 37 bp, Artificial Sequence
  Synthetic oligonucleotide
gcaaaatgctggagcggactgcttatgctacaaagga

SEQ ID NO: 5866 - DNA, 37 bp, Artificial Sequence
  Synthetic oligonucleotide
gcccaccgctgggtccaagcagatcaatcggccctga

SEQ ID NO: 5867 - DNA, 37 bp, Artificial Sequence
  Synthetic oligonucleotide
gcggtctgtgggtccctaacatacctggcacatccga

SEQ ID NO: 5868 - DNA, 38 bp, Artificial Sequence
  Synthetic oligonucleotide
gctgtcaatcgtattcgcgcttgttgaaattagattga

SEQ ID NO: 5869 - DNA, 35 bp, Artificial Sequence
  Synthetic oligonucleotide
ggacccagtctggcgcccaggctacggcaaccatc

SEQ ID NO: 5870 - DNA, 38 bp, Artificial Sequence
  Synthetic oligonucleotide
gtcataacttgcgaaatgatagggttcaccacgtttga

SEQ ID NO: 5871 - DNA, 37 bp, Artificial Sequence
  Synthetic oligonucleotide
gtggtcatgtttaggatatggcgattctcatcgaaga

SEQ ID NO: 5872 - DNA, 36 bp, Artificial Sequence
  Synthetic oligonucleotide
taaattatgtgggcgaaggtcccataagttaccgta

SEQ ID NO: 5873 - DNA, 35 bp, Artificial Sequence
  Synthetic oligonucleotide
tcatgcgatggttcatgttacgtccaaagggtact

SEQ ID NO: 5874 - DNA, 37 bp, Artificial Sequence
  Synthetic oligonucleotide
tcgcctgcagatgctctaaatacgtagtgaacttgga

SEQ ID NO: 5875 - DNA, 37 bp, Artificial Sequence
  Synthetic oligonucleotide
tctcctcgagcagttgaggtctggtggccgaagccga

SEQ ID NO: 5876 - DNA, 38 bp, Artificial Sequence
  Synthetic oligonucleotide
tggacggtgacaatgcatcattgacgtcttaggcctga

SEQ ID NO: 5877 - DNA, 36 bp, Artificial Sequence
  Synthetic oligonucleotide
tggagccttaagcaggtacctctcccctccgtgtaa

SEQ ID NO: 5878 - DNA, 38 bp, Artificial Sequence
  Synthetic oligonucleotide
ttaaagctgccccccgttagcgagacgctaatgcctga

SEQ ID NO: 5879 - DNA, 35 bp, Artificial Sequence
  Synthetic oligonucleotide
ttaacggacgcacatggcttgtgtcggaatttttc

SEQ ID NO: 5880 - DNA, 35 bp, Artificial Sequence
  Synthetic oligonucleotide
atggaaattgtttaggatggcgctgaccacgtact

SEQ ID NO: 5881 - DNA, 35 bp, Artificial Sequence
  Synthetic oligonucleotide
aaaagaagcgtacaacgtgcgaactcggttggcta

SEQ ID NO: 5882 - DNA, 35 bp, Artificial Sequence
  Synthetic oligonucleotide
aaatgcatcggtagaatgatacacgttcgctgttg

SEQ ID NO: 5883 - DNA, 35 bp, Artificial Sequence
  Synthetic oligonucleotide
aaggggggggctcgaaggttgggatcaataactcc

SEQ ID NO: 5884 - DNA, 38 bp, Artificial Sequence
  Synthetic oligonucleotide
aatctgggtgataggtaagagtacggctacgggcgtga

SEQ ID NO: 5885 - DNA, 36 bp, Artificial Sequence
  Synthetic oligonucleotide
actgcacatattgtggcttttcgattcgtactggga

SEQ ID NO: 5886 - DNA, 38 bp, Artificial Sequence
  Synthetic oligonucleotide
agtcgcgactgatataccagtgtttgtagggaagttga

SEQ ID NO: 5887 - DNA, 35 bp, Artificial Sequence
  Synthetic oligonucleotide
agtgctgcaggcgttgggtatccgtgaaaaattta

SEQ ID NO: 5888 - DNA, 37 bp, Artificial Sequence
  Synthetic oligonucleotide
atcaagccgtagaaacgcaacatttctatcgcttcga

SEQ ID NO: 5889 - DNA, 36 bp, Artificial Sequence
  Synthetic oligonucleotide
atccgacagtcctgggatttgtatgactaagcagga

SEQ ID NO: 5890 - DNA, 37 bp, Artificial Sequence
  Synthetic oligonucleotide
atcgatgttgggcttccggcgtcgtatgtatgcagga

SEQ ID NO: 5891 - DNA, 35 bp, Artificial Sequence
  Synthetic oligonucleotide
atgctatactttgaacgaaatcagttgtggtaggg

SEQ ID NO: 5892 - DNA, 36 bp, Artificial Sequence
  Synthetic oligonucleotide
atgtggtctcggaacgtggaaccgcatgtagcaaaa

SEQ ID NO: 5893 - DNA, 38 bp, Artificial Sequence
  Synthetic oligonucleotide
attgtggacgcgcgcaggccatgacggaatgctggtga

SEQ ID NO: 5894 - DNA, 38 bp, Artificial Sequence
  Synthetic oligonucleotide
cacatctgattgcatagagcaaacccggatagctgtga

SEQ ID NO: 5895 - DNA, 35 bp, Artificial Sequence
  Synthetic oligonucleotide
cacggctccccagcgtatctgaacttgtcatcatg

SEQ ID NO: 5896 - DNA, 35 bp, Artificial Sequence
  Synthetic oligonucleotide
cataaggtgatcgcgatgattgcttccccccgaga

SEQ ID NO: 5897 - DNA, 35 bp, Artificial Sequence
  Synthetic oligonucleotide
gaagtcatgaatgtaatcgagactagctagcgctg

SEQ ID NO: 5898 - DNA, 38 bp, Artificial Sequence
  Synthetic oligonucleotide
gacatcagtatgatctatacgcaagtgctggatcgtta

SEQ ID NO: 5899 - DNA, 35 bp, Artificial Sequence
  Synthetic oligonucleotide
gaccgggctggcattctacgtactgcaggtatacc

SEQ ID NO: 5900 - DNA, 35 bp, Artificial Sequence
  Synthetic oligonucleotide
gaccttgccgtatgtgacacgacaccgcctttctg

SEQ ID NO: 5901 - DNA, 37 bp, Artificial Sequence
  Synthetic oligonucleotide
gacggggaggcctgagtaacgtcctaccacgttggga

SEQ ID NO: 5902 - DNA, 38 bp, Artificial Sequence
  Synthetic oligonucleotide
gattcgaaaacacacggccagtttctgtcaggtcgtga

SEQ ID NO: 5903 - DNA, 37 bp, Artificial Sequence
  Synthetic oligonucleotide
gcatggtattattcggtatcaagctttggtcgagaga

SEQ ID NO: 5904 - DNA, 35 bp, Artificial Sequence
  Synthetic oligonucleotide
gccgcgaatgcaagtacagctacgatggcaatagc

SEQ ID NO: 5905 - DNA, 36 bp, Artificial Sequence
  Synthetic oligonucleotide
gcctaggatgacaacggcctgccatctgtgatggga

SEQ ID NO: 5906 - DNA, 35 bp, Artificial Sequence
  Synthetic oligonucleotide
gcgcaccgagtttccgtgtgtattgacccgccttc

SEQ ID NO: 5907 - DNA, 37 bp, Artificial Sequence
  Synthetic oligonucleotide
gcgcggtggccatatgacgtgtcgcccagcacggtga

SEQ ID NO: 5908 - DNA, 37 bp, Artificial Sequence
  Synthetic oligonucleotide
gcttactactttaaggtcttagatgatatttgagaga

SEQ ID NO: 5909 - DNA, 36 bp, Artificial Sequence
  Synthetic oligonucleotide
ggaattactacaatgacggaaatgcctggggcacaa

SEQ ID NO: 5910 - DNA, 35 bp, Artificial Sequence
  Synthetic oligonucleotide
gggtggaccaatactgcgacgacgcgaccacgaag

SEQ ID NO: 5911 - DNA, 36 bp, Artificial Sequence
  Synthetic oligonucleotide
ggttctgtcgagagtcgtagtgcaagtgtgctacta

SEQ ID NO: 5912 - DNA, 35 bp, Artificial Sequence
  Synthetic oligonucleotide
gtaaacagtggctacggtggattgcacctaagtag

SEQ ID NO: 5913 - DNA, 38 bp, Artificial Sequence
  Synthetic oligonucleotide
gtagtatgaagcgagcgcctatccgattacaccggtga

SEQ ID NO: 5914 - DNA, 35 bp, Artificial Sequence
  Synthetic oligonucleotide
gtccggaaattcttcgagggtaacgcctggctttt

SEQ ID NO: 5915 - DNA, 38 bp, Artificial Sequence
  Synthetic oligonucleotide
gttggaactggagaaggtttggatctggagaagcatga

SEQ ID NO: 5916 - DNA, 37 bp, Artificial Sequence
  Synthetic oligonucleotide
gttgggccatattggtgggtttcgagagtagccctga

SEQ ID NO: 5917 - DNA, 36 bp, Artificial Sequence
  Synthetic oligonucleotide
gtttgtggatgcggggaacttgttggtggcaacaca

SEQ ID NO: 5918 - DNA, 37 bp, Artificial Sequence
  Synthetic oligonucleotide
taaactggatggtctctaccgtgtgcaactgccgtga

SEQ ID NO: 5919 - DNA, 36 bp, Artificial Sequence
  Synthetic oligonucleotide
tacacttcatagctaccttgtataggatgtctgcaa

SEQ ID NO: 5920 - DNA, 35 bp, Artificial Sequence
  Synthetic oligonucleotide
tacctgtggtctatcaggagagttactgaaggtcg

SEQ ID NO: 5921 - DNA, 35 bp, Artificial Sequence
  Synthetic oligonucleotide
tactccaactgatcagagttcgttcggatacggta

SEQ ID NO: 5922 - DNA, 38 bp, Artificial Sequence
  Synthetic oligonucleotide
tatgtttcagtaagggtcgaaacgataggacgtaatga

SEQ ID NO: 5923 - DNA, 36 bp, Artificial Sequence
  Synthetic oligonucleotide
tattgcattgtgagcgatgggttggactattacata

SEQ ID NO: 5924 - DNA, 38 bp, Artificial Sequence
  Synthetic oligonucleotide
tcagtgacgcgaaccgcccgcggaatgatttatggtga

SEQ ID NO: 5925 - DNA, 35 bp, Artificial Sequence
  Synthetic oligonucleotide
tcatgcccaaatgatttcgaaatctaggtttggga

SEQ ID NO: 5926 - DNA, 36 bp, Artificial Sequence
  Synthetic oligonucleotide
tccactgattacgcgactggcgttttgtcattatca

SEQ ID NO: 5927 - DNA, 36 bp, Artificial Sequence
  Synthetic oligonucleotide
tcgtaacgtacgggagattagcgggctggagggaga

SEQ ID NO: 5928 - DNA, 37 bp, Artificial Sequence
  Synthetic oligonucleotide
tcgtacagacatagctggtgcgacaaattgccaggga

SEQ ID NO: 5929 - DNA, 38 bp, Artificial Sequence
  Synthetic oligonucleotide
tcgtacgtataccaagggtcagataaaatttagtttga

SEQ ID NO: 5930 - DNA, 38 bp, Artificial Sequence
  Synthetic oligonucleotide
tgagaattaccgagtttgtatgtcacgtacctgtctga

SEQ ID NO: 5931 - DNA, 37 bp, Artificial Sequence
  Synthetic oligonucleotide
tgcaatgcaccggacgtctactcagatgataacttga

SEQ ID NO: 5932 - DNA, 35 bp, Artificial Sequence
  Synthetic oligonucleotide
tggatgatctggacggtattggtggtcgttttgac

SEQ ID NO: 5933 - DNA, 35 bp, Artificial Sequence
  Synthetic oligonucleotide
tgtatcgcacgagtcgacaacaaggctgcctgcct

SEQ ID NO: 5934 - DNA, 35 bp, Artificial Sequence
  Synthetic oligonucleotide
tgttctagattgcgccggattaatgacgagcaatc

SEQ ID NO: 5935 - DNA, 35 bp, Artificial Sequence
  Synthetic oligonucleotide
ttaaccgacacggtgtgctccaggtttggcgagag

SEQ ID NO: 5936 - DNA, 35 bp, Artificial Sequence
  Synthetic oligonucleotide
ttcaatggctagatgagctgccaattatgcgacgc

SEQ ID NO: 5937 - DNA, 37 bp, Artificial Sequence
  Synthetic oligonucleotide
ttggcaaaccggcaaatcctgcagatggaaaggttga

SEQ ID NO: 5938 - DNA, 37 bp, Artificial Sequence
  Synthetic oligonucleotide
gcgctaagcgcggacgtccgtcatacaaccgttggga

SEQ ID NO: 5939 - DNA, 38 bp, Artificial Sequence
  Synthetic oligonucleotide
aacgaagtaacggacgtacgcgagttagggggtcgtga

SEQ ID NO: 5940 - DNA, 35 bp, Artificial Sequence
  Synthetic oligonucleotide
actgtactacggaatcacgcgttggtattggtgac

SEQ ID NO: 5941 - DNA, 36 bp, Artificial Sequence
  Synthetic oligonucleotide
agcccctatcaatagtgccggcactgcgtataataa

SEQ ID NO: 5942 - DNA, 36 bp, Artificial Sequence
  Synthetic oligonucleotide
ataatgcagaggggtaatgcagttgtctggggtgta

SEQ ID NO: 5943 - DNA, 37 bp, Artificial Sequence
  Synthetic oligonucleotide
gatcgggctgtggatgctcttgagagatattttggga

SEQ ID NO: 5944 - DNA, 37 bp, Artificial Sequence
  Synthetic oligonucleotide
gcactcacagcttaaatggcccctaacgtgcgagaga

SEQ ID NO: 5945 - DNA, 36 bp, Artificial Sequence
  Synthetic oligonucleotide
gtccactctactgggaggtatgggggttacgggcca

SEQ ID NO: 5946 - DNA, 36 bp, Artificial Sequence
  Synthetic oligonucleotide
gtgggaggtggttatttttcggacgtctagggacga

SEQ ID NO: 5947 - DNA, 37 bp, Artificial Sequence
  Synthetic oligonucleotide
tcccccaaattcttcgcgctcctcgatagggtaaaga

SEQ ID NO: 5948 - DNA, 35 bp, Artificial Sequence
  Synthetic oligonucleotide
tgacataacgtcgggtgattgaggtcgctaaggag

SEQ ID NO: 5949 - DNA, 38 bp, Artificial Sequence
  Synthetic oligonucleotide
tgtcaaggtagctatcctttctaaattagattacgtga

SEQ ID NO: 5950 - DNA, 36 bp, Artificial Sequence
  Synthetic oligonucleotide
atgcgttccagcccttgtgaaacttaatggcaataa

SEQ ID NO: 5951 - DNA, 36 bp, Artificial Sequence
  Synthetic oligonucleotide
ttaggactacgcagctaggtttgtaactgaaacgga

SEQ ID NO: 5952 - DNA, 36 bp, Artificial Sequence
  Synthetic oligonucleotide
agtgaatgtaatgagtaagctaagttgtacaacaga

SEQ ID NO: 5953 - DNA, 38 bp, Artificial Sequence
  Synthetic oligonucleotide
aatgcgtagtctaccccgggacgtctcgtcgcggatga

SEQ ID NO: 5954 - DNA, 36 bp, Artificial Sequence
  Synthetic oligonucleotide
acaggggcgtgaccatctccgtagtcggccagttaa

SEQ ID NO: 5955 - DNA, 35 bp, Artificial Sequence
  Synthetic oligonucleotide
gttgttacagcatctaggaggtgattacaggcgtt

SEQ ID NO: 5956 - DNA, 38 bp, Artificial Sequence
  Synthetic oligonucleotide
ttgtggtgatcatgtagaggtgcaccggaggtgcgtga

SEQ ID NO: 5957 - DNA, 36 bp, Artificial Sequence
  Synthetic oligonucleotide
gagaatcgtgcatgcccagcaaggcatgatgcttca

SEQ ID NO: 5958 - DNA, 38 bp, Artificial Sequence
  Synthetic oligonucleotide
aaagttggtccatccggatgctgttttgacgagagtga

SEQ ID NO: 5959 - DNA, 36 bp, Artificial Sequence
  Synthetic oligonucleotide
aacgcatttacaacttggccaaggggaggtgccgga

SEQ ID NO: 5960 - DNA, 35 bp, Artificial Sequence
  Synthetic oligonucleotide
aacttccaagaccctcggtaccaggccagttgggg

SEQ ID NO: 5961 - DNA, 35 bp, Artificial Sequence
  Synthetic oligonucleotide
acactgggttacaatgcagggggttgacgtaatgt

SEQ ID NO: 5962 - DNA, 37 bp, Artificial Sequence
  Synthetic oligonucleotide
actattcgtagcacgatatcgaaagggtaggcccgga

SEQ ID NO: 5963 - DNA, 36 bp, Artificial Sequence
  Synthetic oligonucleotide
agtttcgcagatgcgaggaaattagtgggagtggta

SEQ ID NO: 5964 - DNA, 38 bp, Artificial Sequence
  Synthetic oligonucleotide
gactcatagggtcatagtaacagctactacggaattga

SEQ ID NO: 5965 - DNA, 35 bp, Artificial Sequence
  Synthetic oligonucleotide
gacttaattgacacatgacccaggagccccccccc

SEQ ID NO: 5966 - DNA, 37 bp, Artificial Sequence
  Synthetic oligonucleotide
ggacgagccaagtactgaactcaaggatacgaatgga

SEQ ID NO: 5967 - DNA, 38 bp, Artificial Sequence
  Synthetic oligonucleotide
ggtgacatagtcctcgttgtcgtcttccaaaatgcaga

SEQ ID NO: 5968 - DNA, 37 bp, Artificial Sequence
  Synthetic oligonucleotide
taggtgggtggctgtcggattaggctgacactctgga

SEQ ID NO: 5969 - DNA, 38 bp, Artificial Sequence
  Synthetic oligonucleotide
tcaacgggatagagagtgcgtgaacttgccttccatga

SEQ ID NO: 5970 - DNA, 35 bp, Artificial Sequence
  Synthetic oligonucleotide
tgccatccgcgattggtggtaactcaacgttgaaa

SEQ ID NO: 5971 - DNA, 37 bp, Artificial Sequence
  Synthetic oligonucleotide
tgtccattacaatggaatttggacgaatcaggacaga

SEQ ID NO: 5972 - DNA, 38 bp, Artificial Sequence
  Synthetic oligonucleotide
ttaaaacgtccgggagggtcatgaaccatgcagcttga

SEQ ID NO: 5973 - DNA, 37 bp, Artificial Sequence
  Synthetic oligonucleotide
ttcgagaatccaactggtctcgacgtaacttttcgta

SEQ ID NO: 5974 - DNA, 36 bp, Artificial Sequence
  Synthetic oligonucleotide
ttcgtcgatagggactggcttcggtcgttgttagaa

SEQ ID NO: 5975 - DNA, 35 bp, Artificial Sequence
  Synthetic oligonucleotide
gctaagcgtaccgtgctttttgtgtgattcttcct

SEQ ID NO: 5976 - DNA, 36 bp, Artificial Sequence
  Synthetic oligonucleotide
ggggattcctccttttgttaagcgtaacaggggaca

SEQ ID NO: 5977 - DNA, 36 bp, Artificial Sequence
  Synthetic oligonucleotide
gggtgcacgactagattactgtgggacatgatgata

SEQ ID NO: 5978 - DNA, 37 bp, Artificial Sequence
  Synthetic oligonucleotide
gaacgtactgtacatggggaaagtaatgaaatgaaga

SEQ ID NO: 5979 - DNA, 35 bp, Artificial Sequence
  Synthetic oligonucleotide
tcgacgtactgcaaaggtacaaagaaaggccggta

SEQ ID NO: 5980 - DNA, 36 bp, Artificial Sequence
  Synthetic oligonucleotide
ttccaccttgaggggttgtattcgcgtgtcaagaca

SEQ ID NO: 5981 - DNA, 36 bp, Artificial Sequence
  Synthetic oligonucleotide
aactgctgacacatgtcgaaggatgataggtagtca

SEQ ID NO: 5982 - DNA, 35 bp, Artificial Sequence
  Synthetic oligonucleotide
actagcgtacgggacctggacgggtcaccatgatc

SEQ ID NO: 5983 - DNA, 38 bp, Artificial Sequence
  Synthetic oligonucleotide
acttatcttgatgaggtatccgtgcctgtagttcgtga

SEQ ID NO: 5984 - DNA, 35 bp, Artificial Sequence
  Synthetic oligonucleotide
agagcccactacgcttgttaccagactaggacgta

SEQ ID NO: 5985 - DNA, 35 bp, Artificial Sequence
  Synthetic oligonucleotide
agtgcgcttagtcatgacattaccccgacccgacc

SEQ ID NO: 5986 - DNA, 35 bp, Artificial Sequence
  Synthetic oligonucleotide
attgtttgatctatgtctaaagtcgagccacgtga

SEQ ID NO: 5987 - DNA, 35 bp, Artificial Sequence
  Synthetic oligonucleotide
gcagttctctggatacatagcgtagttggaaacga

SEQ ID NO: 5988 - DNA, 36 bp, Artificial Sequence
  Synthetic oligonucleotide
gcccacgtaataggcaatctaagtaccgagtgcgga

SEQ ID NO: 5989 - DNA, 35 bp, Artificial Sequence
  Synthetic oligonucleotide
gcggtcagggatcgtagatacgcgagatttacggt

SEQ ID NO: 5990 - DNA, 35 bp, Artificial Sequence
  Synthetic oligonucleotide
gctaagtgctagatgcaactggagtgggggataaa

SEQ ID NO: 5991 - DNA, 35 bp, Artificial Sequence
  Synthetic oligonucleotide
ggacgtgaaggctctaacgtcgcgtatggctatgt

SEQ ID NO: 5992 - DNA, 36 bp, Artificial Sequence
  Synthetic oligonucleotide
gggaaccaagactgagggccctttggtctgtctgta

SEQ ID NO: 5993 - DNA, 35 bp, Artificial Sequence
  Synthetic oligonucleotide
gtgcaaaaaatgtacgttgcttggaaaaaacgcgt

SEQ ID NO: 5994 - DNA, 37 bp, Artificial Sequence
  Synthetic oligonucleotide
gttcctacccctcccatcaatctgcgtaaggcccaga

SEQ ID NO: 5995 - DNA, 37 bp, Artificial Sequence
  Synthetic oligonucleotide
tacgtgcgctcaaacgttgtttgtaaagcctcgcaga

SEQ ID NO: 5996 - DNA, 37 bp, Artificial Sequence
  Synthetic oligonucleotide
tccagaataaggggcgccggtctgggagagctatgga

SEQ ID NO: 5997 - DNA, 37 bp, Artificial Sequence
  Synthetic oligonucleotide
tccggtgaccgattgagtcactaaaatatgtctgtga

SEQ ID NO: 5998 - DNA, 36 bp, Artificial Sequence
  Synthetic oligonucleotide
tttggcatttctcattcgtcgttctccgtttcgcaa

SEQ ID NO: 5999 - DNA, 35 bp, Artificial Sequence
  Synthetic oligonucleotide
atgttggtactatggtcctgagtatcaggtgttcc

SEQ ID NO: 6000 - DNA, 36 bp, Artificial Sequence
  Synthetic oligonucleotide
ttgtggtggggaagttgaaaggttgactcttaataa

SEQ ID NO: 6001 - DNA, 36 bp, Artificial Sequence
  Synthetic oligonucleotide
gcaagtaggttagcataaatatagttttcgaggcaa

SEQ ID NO: 6002 - DNA, 37 bp, Artificial Sequence
  Synthetic oligonucleotide
taacacgaggacacgctgccgcttacgctggttgata

SEQ ID NO: 6003 - DNA, 35 bp, Artificial Sequence
  Synthetic oligonucleotide
acagtgtacgtgagcgcctagacattcacggctcc

SEQ ID NO: 6004 - DNA, 35 bp, Artificial Sequence
  Synthetic oligonucleotide
acataatcgttcttccggccgtggccgttggattt

SEQ ID NO: 6005 - DNA, 38 bp, Artificial Sequence
  Synthetic oligonucleotide
acggtatcaacttcagcgagttcacgtgccagacatga

SEQ ID NO: 6006 - DNA, 36 bp, Artificial Sequence
  Synthetic oligonucleotide
atacaacagacctgatatatgatattcttggaggta

SEQ ID NO: 6007 - DNA, 38 bp, Artificial Sequence
  Synthetic oligonucleotide
atcacgatacgaacaaagtggaaagctgtggggggtga

SEQ ID NO: 6008 - DNA, 37 bp, Artificial Sequence
  Synthetic oligonucleotide
atgggtagattcatcccccgtgatctgtgagtagcga

SEQ ID NO: 6009 - DNA, 35 bp, Artificial Sequence
  Synthetic oligonucleotide
attagaaggcgttgctatcttatgcgttactgaca

SEQ ID NO: 6010 - DNA, 37 bp, Artificial Sequence
  Synthetic oligonucleotide
catgggcgttatgctactactgatcaacgttttcaga

SEQ ID NO: 6011 - DNA, 35 bp, Artificial Sequence
  Synthetic oligonucleotide
ccaagggtacgtgggttgtagaaatggatatttag

SEQ ID NO: 6012 - DNA, 36 bp, Artificial Sequence
  Synthetic oligonucleotide
cccggatattatccgctggtacggtcatgttttcaa

SEQ ID NO: 6013 - DNA, 36 bp, Artificial Sequence
  Synthetic oligonucleotide
ctctacatggacttcatgtgaaagctcgcggcggta

SEQ ID NO: 6014 - DNA, 35 bp, Artificial Sequence
  Synthetic oligonucleotide
gaaacttgcgcggtagtagtcaacgatcggctctg

SEQ ID NO: 6015 - DNA, 37 bp, Artificial Sequence
  Synthetic oligonucleotide
gaaaggacagagtcgtattcggatccttcagggacga

SEQ ID NO: 6016 - DNA, 35 bp, Artificial Sequence
  Synthetic oligonucleotide
gaactaagttctgtgtacttattcaacatacatgc

SEQ ID NO: 6017 - DNA, 35 bp, Artificial Sequence
  Synthetic oligonucleotide
gattgagcgtaagcacatgtttcgtgtcggagttc

SEQ ID NO: 6018 - DNA, 35 bp, Artificial Sequence
  Synthetic oligonucleotide
gccacggtcaaaatgagcagttagttcctcagttg

SEQ ID NO: 6019 - DNA, 38 bp, Artificial Sequence
  Synthetic oligonucleotide
gccagagtaaaggagacaatccaggagtccgagtttga

SEQ ID NO: 6020 - DNA, 37 bp, Artificial Sequence
  Synthetic oligonucleotide
gcctagcttaagcgatcctggggtaaggttatgtgga

SEQ ID NO: 6021 - DNA, 35 bp, Artificial Sequence
  Synthetic oligonucleotide
gcctgcatcattgaatgtcccgtgggtattgagtg

SEQ ID NO: 6022 - DNA, 37 bp, Artificial Sequence
  Synthetic oligonucleotide
gcgaggacttactcacggtatctactagacaggtcga

SEQ ID NO: 6023 - DNA, 36 bp, Artificial Sequence
  Synthetic oligonucleotide
gcggaaccatttcctgcacacagcattcgcgggtga

SEQ ID NO: 6024 - DNA, 36 bp, Artificial Sequence
  Synthetic oligonucleotide
gcttagatgtggttggaccgctcgcggcgaccccga

SEQ ID NO: 6025 - DNA, 38 bp, Artificial Sequence
  Synthetic oligonucleotide
ggattcacgactgcacggcgagtggccttaagagttga

SEQ ID NO: 6026 - DNA, 35 bp, Artificial Sequence
  Synthetic oligonucleotide
gtacttgagccaagtgtctcccatgtcacgcagtc

SEQ ID NO: 6027 - DNA, 37 bp, Artificial Sequence
  Synthetic oligonucleotide
gtcgtgatccctcacgtctgatccgctgaccgttcga

SEQ ID NO: 6028 - DNA, 35 bp, Artificial Sequence
  Synthetic oligonucleotide
gtgagcgacaagcggcacatgtaggaatttatgtt

SEQ ID NO: 6029 - DNA, 37 bp, Artificial Sequence
  Synthetic oligonucleotide
taagcgaggcgatgcttaattcccgctggtggcatta

SEQ ID NO: 6030 - DNA, 37 bp, Artificial Sequence
  Synthetic oligonucleotide
tcaaccgggtcagtctgatcgggtaattgtcactaga

SEQ ID NO: 6031 - DNA, 36 bp, Artificial Sequence
  Synthetic oligonucleotide
tccacatgagggccagaacttccgtgaacgtaagta

SEQ ID NO: 6032 - DNA, 38 bp, Artificial Sequence
  Synthetic oligonucleotide
tgagcactgcctttagggccaaaaagggtcaaaactga

SEQ ID NO: 6033 - DNA, 35 bp, Artificial Sequence
  Synthetic oligonucleotide
tgaggcggttatagcctaattgtgggcaaacgacc

SEQ ID NO: 6034 - DNA, 36 bp, Artificial Sequence
  Synthetic oligonucleotide
tgcaaagccgagtaatggtacgtcccgtgaaagcga

SEQ ID NO: 6035 - DNA, 38 bp, Artificial Sequence
  Synthetic oligonucleotide
tgtatcccacggataaaaggcttcccgtatgtgcatga

SEQ ID NO: 6036 - DNA, 36 bp, Artificial Sequence
  Synthetic oligonucleotide
tgtcacgtcctacgattcaagccacaggcgtgccga

SEQ ID NO: 6037 - DNA, 37 bp, Artificial Sequence
  Synthetic oligonucleotide
tttgccaagtcgtgaattgaaatctcttcgcgttgga

SEQ ID NO: 6038 - DNA, 37 bp, Artificial Sequence
  Synthetic oligonucleotide
aacgactggtttagttgagtttataatcgcgtacaga

SEQ ID NO: 6039 - DNA, 37 bp, Artificial Sequence
  Synthetic oligonucleotide
acgacgctattcggaacctttattggtgctgtactga

SEQ ID NO: 6040 - DNA, 35 bp, Artificial Sequence
  Synthetic oligonucleotide
actatgagcaatatagctgtcataaatacttgcgg

SEQ ID NO: 6041 - DNA, 36 bp, Artificial Sequence
  Synthetic oligonucleotide
ccaaaatttgggtagggacgtctgtgggcgactgca

SEQ ID NO: 6042 - DNA, 36 bp, Artificial Sequence
  Synthetic oligonucleotide
ggtggttggtagagctagatatgcggcccgccagta

SEQ ID NO: 6043 - DNA, 38 bp, Artificial Sequence
  Synthetic oligonucleotide
aatcatcgggaatggcttaacgtgcactgcatatttga

SEQ ID NO: 6044 - DNA, 35 bp, Artificial Sequence
  Synthetic oligonucleotide
acagccccgcgcgttccagggatactacaggcttt

SEQ ID NO: 6045 - DNA, 37 bp, Artificial Sequence
  Synthetic oligonucleotide
cccggagtaatcttgccgcgcggtactgtgatgcaga

SEQ ID NO: 6046 - DNA, 36 bp, Artificial Sequence
  Synthetic oligonucleotide
gaactgaaagtatgtctgaaaagtcatagatggtaa

SEQ ID NO: 6047 - DNA, 37 bp, Artificial Sequence
  Synthetic oligonucleotide
gagtacctttagggctgagtttacacacaatgtgaga

SEQ ID NO: 6048 - DNA, 36 bp, Artificial Sequence
  Synthetic oligonucleotide
ggaatggatacaatgtaacggggtcggtaccacgta

SEQ ID NO: 6049 - DNA, 35 bp, Artificial Sequence
  Synthetic oligonucleotide
ggggtgcttagacggctgtaagaagtcacgggttc

SEQ ID NO: 6050 - DNA, 35 bp, Artificial Sequence
  Synthetic oligonucleotide
gtcccgccacgggtctgccccgagattatggagta

SEQ ID NO: 6051 - DNA, 35 bp, Artificial Sequence
  Synthetic oligonucleotide
tgaggagtggttcctttgcaatcgcttagggctgg

SEQ ID NO: 6052 - DNA, 37 bp, Artificial Sequence
  Synthetic oligonucleotide
tgtatagcgggcgggttgaacgccttatcttatagga

SEQ ID NO: 6053 - DNA, 38 bp, Artificial Sequence
  Synthetic oligonucleotide
aaaccgtggtacgcgagaccacgcgtggttgagtttga

SEQ ID NO: 6054 - DNA, 38 bp, Artificial Sequence
  Synthetic oligonucleotide
aaggtggttcggggataataaatgacagatgtacatga

SEQ ID NO: 6055 - DNA, 36 bp, Artificial Sequence
  Synthetic oligonucleotide
aatgtatgcgactaactcagccgtaaacaacgcgta

SEQ ID NO: 6056 - DNA, 35 bp, Artificial Sequence
  Synthetic oligonucleotide
acacattagtcaccgactggccgagttaggaccca

SEQ ID NO: 6057 - DNA, 37 bp, Artificial Sequence
  Synthetic oligonucleotide
acgaaggtttgggggaactgcccgatcatgggtttga

SEQ ID NO: 6058 - DNA, 38 bp, Artificial Sequence
  Synthetic oligonucleotide
acgacgccctttcgcccctttggctttagtcgagctga

SEQ ID NO: 6059 - DNA, 37 bp, Artificial Sequence
  Synthetic oligonucleotide
acggaaaatttgtaacttcatcgagcgtccaccggga

SEQ ID NO: 6060 - DNA, 37 bp, Artificial Sequence
  Synthetic oligonucleotide
acggagcgcaccagtgtgctcttatttttacggacga

SEQ ID NO: 6061 - DNA, 36 bp, Artificial Sequence
  Synthetic oligonucleotide
actgacagaaatgcaagagtctcctttgagtcacta

SEQ ID NO: 6062 - DNA, 36 bp, Artificial Sequence
  Synthetic oligonucleotide
actgatgcagtctggcttttaatgtgtgaagagata

SEQ ID NO: 6063 - DNA, 38 bp, Artificial Sequence
  Synthetic oligonucleotide
actttgcactcagtttggcaatgacgcgagcgaattga

SEQ ID NO: 6064 - DNA, 36 bp, Artificial Sequence
  Synthetic oligonucleotide
agaagtcctgccataacgcgtagtcctgtagggtaa

SEQ ID NO: 6065 - DNA, 35 bp, Artificial Sequence
  Synthetic oligonucleotide
agacacgaggcgtgaagtcatccaatatgtatcat

SEQ ID NO: 6066 - DNA, 36 bp, Artificial Sequence
  Synthetic oligonucleotide
agacgcggatacgtacatcgtaggtgctcaggcaaa

SEQ ID NO: 6067 - DNA, 36 bp, Artificial Sequence
  Synthetic oligonucleotide
agggcggactccagtaggatcattatcgaagtttta

SEQ ID NO: 6068 - DNA, 35 bp, Artificial Sequence
  Synthetic oligonucleotide
agtcatcacgcaggacgcacgcgaaaatagtagtg

SEQ ID NO: 6069 - DNA, 37 bp, Artificial Sequence
  Synthetic oligonucleotide
atcgcccacgtgctattgagtttagagtgaacataga

SEQ ID NO: 6070 - DNA, 36 bp, Artificial Sequence
  Synthetic oligonucleotide
atcgttttgtgtcggtcctaacacgtatatgaggta

SEQ ID NO: 6071 - DNA, 36 bp, Artificial Sequence
  Synthetic oligonucleotide
atttggtctggccggtgtcttttcaaggcaagcaca

SEQ ID NO: 6072 - DNA, 36 bp, Artificial Sequence
  Synthetic oligonucleotide
cctgcctggaggcgtactgatattcacgaccggtga

SEQ ID NO: 6073 - DNA, 35 bp, Artificial Sequence
  Synthetic oligonucleotide
gaccagcttgccttgagtaacctccaaagtcagtt

SEQ ID NO: 6074 - DNA, 37 bp, Artificial Sequence
  Synthetic oligonucleotide
gactgcccgaaaccgattgctcttgttgagagaacga

SEQ ID NO: 6075 - DNA, 35 bp, Artificial Sequence
  Synthetic oligonucleotide
gaggacttgtcctcggctatagtcaatgggtgtgt

SEQ ID NO: 6076 - DNA, 37 bp, Artificial Sequence
  Synthetic oligonucleotide
gatcaacagaagcaatcgtggggattatacgcataga

SEQ ID NO: 6077 - DNA, 38 bp, Artificial Sequence
  Synthetic oligonucleotide
gcaacgaaggggatccacagtggcatatcctgccgtga

SEQ ID NO: 6078 - DNA, 36 bp, Artificial Sequence
  Synthetic oligonucleotide
gcaacttcctacactatacggtcgcattagcggaga

SEQ ID NO: 6079 - DNA, 38 bp, Artificial Sequence
  Synthetic oligonucleotide
gcacatcaggctgggcttttgacgtactgacaagctga

SEQ ID NO: 6080 - DNA, 37 bp, Artificial Sequence
  Synthetic oligonucleotide
gcacctgggtgtcacgtaattagctgacagggtggga

SEQ ID NO: 6081 - DNA, 37 bp, Artificial Sequence
  Synthetic oligonucleotide
gccacaggacttatcctacgtacatgtcatggaaaga

SEQ ID NO: 6082 - DNA, 37 bp, Artificial Sequence
  Synthetic oligonucleotide
gccactgtacaagctgagtcttcctccgacacgatga

SEQ ID NO: 6083 - DNA, 36 bp, Artificial Sequence
  Synthetic oligonucleotide
gccatctccgttattgtggctaggacctacagcaga

SEQ ID NO: 6084 - DNA, 38 bp, Artificial Sequence
  Synthetic oligonucleotide
gctgtctgcgttccgacccaagccgctgatctgtttga

SEQ ID NO: 6085 - DNA, 35 bp, Artificial Sequence
  Synthetic oligonucleotide
ggagacctgcgctgagtttattttgaggggttaac

SEQ ID NO: 6086 - DNA, 37 bp, Artificial Sequence
  Synthetic oligonucleotide
ggtgaccacagtaaagtagaacgcggaggcccttgga

SEQ ID NO: 6087 - DNA, 35 bp, Artificial Sequence
  Synthetic oligonucleotide
gtaagtaattgttaatacgtgtcatgcagctcatg

SEQ ID NO: 6088 - DNA, 38 bp, Artificial Sequence
  Synthetic oligonucleotide
gtacacccgtgtttttggtgcatacgagtctgacgtga

SEQ ID NO: 6089 - DNA, 37 bp, Artificial Sequence
  Synthetic oligonucleotide
gtagatagcaggtaatgggtgcgcggtgtattctaga

SEQ ID NO: 6090 - DNA, 35 bp, Artificial Sequence
  Synthetic oligonucleotide
gtcttgataaacgggttgcccagggcgtcccgaga

SEQ ID NO: 6091 - DNA, 38 bp, Artificial Sequence
  Synthetic oligonucleotide
gttctgaactacgtacgaaagtcgttatatgggtatga

SEQ ID NO: 6092 - DNA, 35 bp, Artificial Sequence
  Synthetic oligonucleotide
taatggtgctatttcggtgtatagctcgggggggc

SEQ ID NO: 6093 - DNA, 34 bp, Artificial Sequence
  Synthetic oligonucleotide
tcgtgtgtgtttctctacaggaacgttgatcaat

SEQ ID NO: 6094 - DNA, 37 bp, Artificial Sequence
  Synthetic oligonucleotide
tctgacagagctagtgtttgaacgctccgtcaaggga

SEQ ID NO: 6095 - DNA, 37 bp, Artificial Sequence
  Synthetic oligonucleotide
tgacaatttattcccaatcacgtctggggggtatgga

SEQ ID NO: 6096 - DNA, 35 bp, Artificial Sequence
  Synthetic oligonucleotide
tgcgtcctctaggaccatatgggatacgtagtcaa

SEQ ID NO: 6097 - DNA, 38 bp, Artificial Sequence
  Synthetic oligonucleotide
ttgggagattgttctaggcgtaggatcagacggtctga

SEQ ID NO: 6098 - DNA, 37 bp, Artificial Sequence
  Synthetic oligonucleotide
ccgtcatggtggagtaaggtataggacttgctttcga

SEQ ID NO: 6099 - DNA, 36 bp, Artificial Sequence
  Synthetic oligonucleotide
acggtttcacgggccccatagttaagagaccgtgta

SEQ ID NO: 6100 - DNA, 36 bp, Artificial Sequence
  Synthetic oligonucleotide
gcaaccattcgttggaagatcatatgcggttttcta

SEQ ID NO: 6101 - DNA, 38 bp, Artificial Sequence
  Synthetic oligonucleotide
ggttcttggcggattcgcttcacttgggggtaatctga

SEQ ID NO: 6102 - DNA, 37 bp, Artificial Sequence
  Synthetic oligonucleotide
taaggataattgcgggcaggtggccccgcttctagga

SEQ ID NO: 6103 - DNA, 37 bp, Artificial Sequence
  Synthetic oligonucleotide
tccgtccttaggtcttgcgtggtctcagataagaaga

SEQ ID NO: 6104 - DNA, 37 bp, Artificial Sequence
  Synthetic oligonucleotide
tctctcgggccataattcgattggcgaagtaagtcga

SEQ ID NO: 6105 - DNA, 36 bp, Artificial Sequence
  Synthetic oligonucleotide
tgatatgggtcagtcatggtgttggcgcaccactaa

SEQ ID NO: 6106 - DNA, 37 bp, Artificial Sequence
  Synthetic oligonucleotide
aacgttggttcgtacaaggggtactttccgtaggcga

SEQ ID NO: 6107 - DNA, 37 bp, Artificial Sequence
  Synthetic oligonucleotide
tctatcaagaacgttctgcggggagatatacacgcga

SEQ ID NO: 6108 - DNA, 37 bp, Artificial Sequence
  Synthetic oligonucleotide
catgcggaactgagttttggctcctagtgtgacaaga

SEQ ID NO: 6109 - DNA, 35 bp, Artificial Sequence
  Synthetic oligonucleotide
ttggactgcagaacattcgatacggaccatgtcgt

SEQ ID NO: 6110 - DNA, 37 bp, Artificial Sequence
  Synthetic oligonucleotide
aactgtaaacagcaatctaagtatggacctgatttga

SEQ ID NO: 6111 - DNA, 35 bp, Artificial Sequence
  Synthetic oligonucleotide
aagtacggcatacaagggttcgtgattccctgcgt

SEQ ID NO: 6112 - DNA, 35 bp, Artificial Sequence
  Synthetic oligonucleotide
acgaacttagcacattgtgaggtgactgtggaagc

SEQ ID NO: 6113 - DNA, 35 bp, Artificial Sequence
  Synthetic oligonucleotide
actgccgttggagatacggtcattgaatacctcgc

SEQ ID NO: 6114 - DNA, 37 bp, Artificial Sequence
  Synthetic oligonucleotide
agtcacagttaggtgtaaggataacgtccagttatga

SEQ ID NO: 6115 - DNA, 38 bp, Artificial Sequence
  Synthetic oligonucleotide
agtcgtcgccgcgaggcttgcatgtgtggcgcatttga

SEQ ID NO: 6116 - DNA, 35 bp, Artificial Sequence
  Synthetic oligonucleotide
atacccgcggtatactggagtgcattggggtatgt

SEQ ID NO: 6117 - DNA, 37 bp, Artificial Sequence
  Synthetic oligonucleotide
atgtcataaagctggtctgatagttcagcccctgtga

SEQ ID NO: 6118 - DNA, 38 bp, Artificial Sequence
  Synthetic oligonucleotide
gaatagtggacgatgctgtcaagggagtccgggtatga

SEQ ID NO: 6119 - DNA, 36 bp, Artificial Sequence
  Synthetic oligonucleotide
gaggttaaggtcatcgtccgcgacgtaatcatcaga

SEQ ID NO: 6120 - DNA, 35 bp, Artificial Sequence
  Synthetic oligonucleotide
gccttcgagttagaggttttaggattgcgttgttt

SEQ ID NO: 6121 - DNA, 37 bp, Artificial Sequence
  Synthetic oligonucleotide
ggtaaggtgctgtattcttcgaccgagggagtgtaga

SEQ ID NO: 6122 - DNA, 35 bp, Artificial Sequence
  Synthetic oligonucleotide
gtagagcaactagggattaaacctttatgggacca

SEQ ID NO: 6123 - DNA, 35 bp, Artificial Sequence
  Synthetic oligonucleotide
tagagtttgttttatcgttagacaacctcggagtt

SEQ ID NO: 6124 - DNA, 37 bp, Artificial Sequence
  Synthetic oligonucleotide
tgacaccactagcggccaagattgtgagtcagacgga

SEQ ID NO: 6125 - DNA, 38 bp, Artificial Sequence
  Synthetic oligonucleotide
tgacacgagatgcacggtggagtgggggggaatgttga

SEQ ID NO: 6126 - DNA, 35 bp, Artificial Sequence
  Synthetic oligonucleotide
tgcaaaaatagcaacgtagcacacacaagctaaaa

SEQ ID NO: 6127 - DNA, 36 bp, Artificial Sequence
  Synthetic oligonucleotide
tggatgcctacaaagaattcaaaaggacaccgcgga

SEQ ID NO: 6128 - DNA, 37 bp, Artificial Sequence
  Synthetic oligonucleotide
ttgcattggtttagcgaacttgcccgtcatgggttga

SEQ ID NO: 6129 - DNA, 38 bp, Artificial Sequence
  Synthetic oligonucleotide
gtgctgggctggggaccgttttgttcccaacaatgtga

SEQ ID NO: 6130 - DNA, 33 bp, Artificial Sequence
  Synthetic oligonucleotide
catggtcaactgattaggctctgtcctccatgt

SEQ ID NO: 6131 - DNA, 36 bp, Artificial Sequence
  Synthetic oligonucleotide
acacgaactttgaataacgtacttctctgacgagaa

SEQ ID NO: 6132 - DNA, 35 bp, Artificial Sequence
  Synthetic oligonucleotide
tacagtcattaagtacctcagtatatgggtatgag

SEQ ID NO: 6133 - DNA, 38 bp, Artificial Sequence
  Synthetic oligonucleotide
actacagaaaaggtccagagcaagagctaggcggatga

SEQ ID NO: 6134 - DNA, 35 bp, Artificial Sequence
  Synthetic oligonucleotide
agtggctcattaggtagaagacaattgccccacag

SEQ ID NO: 6135 - DNA, 37 bp, Artificial Sequence
  Synthetic oligonucleotide
gcacagcacgtggaattcttgttttagcgtgagccga

SEQ ID NO: 6136 - DNA, 37 bp, Artificial Sequence
  Synthetic oligonucleotide
gcgaccaacgggtacatttaaaaagtagttacaggga

SEQ ID NO: 6137 - DNA, 38 bp, Artificial Sequence
  Synthetic oligonucleotide
ggttcctcctcgaactaacatcaatgcaataactttga

SEQ ID NO: 6138 - DNA, 34 bp, Artificial Sequence
  Synthetic oligonucleotide
gtcggaaccggagcagtttgacgactctatgggg

SEQ ID NO: 6139 - DNA, 36 bp, Artificial Sequence
  Synthetic oligonucleotide
gtttaatgatggagtgctatgcagtagatgacgtaa

SEQ ID NO: 6140 - DNA, 36 bp, Artificial Sequence
  Synthetic oligonucleotide
tagcgggaaatgggagtagcgcgttatttagtatta

SEQ ID NO: 6141 - DNA, 36 bp, Artificial Sequence
  Synthetic oligonucleotide
gtatcccgtaatggaaagctgtactgcaaggtagta

SEQ ID NO: 6142 - DNA, 35 bp, Artificial Sequence
  Synthetic oligonucleotide
taacgtaaagcgtatgcgggtcatacgggctgtac

SEQ ID NO: 6143 - DNA, 38 bp, Artificial Sequence
  Synthetic oligonucleotide
aagaccccggacggattcattagtacttgcgttagtga

SEQ ID NO: 6144 - DNA, 37 bp, Artificial Sequence
  Synthetic oligonucleotide
aaacgactagcttaaggtaaatgcatatgtctaccga

SEQ ID NO: 6145 - DNA, 36 bp, Artificial Sequence
  Synthetic oligonucleotide
aaatcacatcgatacgctatgcgacagcttcgacga

SEQ ID NO: 6146 - DNA, 37 bp, Artificial Sequence
  Synthetic oligonucleotide
aaggtactgttagtacggcacaaggcctcgggtacga

SEQ ID NO: 6147 - DNA, 38 bp, Artificial Sequence
  Synthetic oligonucleotide
aagttcatatgcagttggccgacaaatagtcgctatga

SEQ ID NO: 6148 - DNA, 35 bp, Artificial Sequence
  Synthetic oligonucleotide
aatggcgacgttcttgtttggagcctgaggagtca

SEQ ID NO: 6149 - DNA, 37 bp, Artificial Sequence
  Synthetic oligonucleotide
acaagttatgtccttcgtcaagccattaattcctgga

SEQ ID NO: 6150 - DNA, 38 bp, Artificial Sequence
  Synthetic oligonucleotide
actcgggacatggtgccatggcctcggtcttttcttga

SEQ ID NO: 6151 - DNA, 37 bp, Artificial Sequence
  Synthetic oligonucleotide
agttggcgggagcatctgtcacgcattggtgattgga

SEQ ID NO: 6152 - DNA, 38 bp, Artificial Sequence
  Synthetic oligonucleotide
agtttgattaccaggaggataccgtacggtaatcatga

SEQ ID NO: 6153 - DNA, 37 bp, Artificial Sequence
  Synthetic oligonucleotide
cagggctctcatgataccccccgaaacctgagcccga

SEQ ID NO: 6154 - DNA, 37 bp, Artificial Sequence
  Synthetic oligonucleotide
ctactagaggcaatcgggtcttttgagtcaagggaga

SEQ ID NO: 6155 - DNA, 35 bp, Artificial Sequence
  Synthetic oligonucleotide
gagcaagtaaatactgcattctctcttcaatacgg

SEQ ID NO: 6156 - DNA, 35 bp, Artificial Sequence
  Synthetic oligonucleotide
gatcacgaaggcagtcagctctgttaacgtcacga

SEQ ID NO: 6157 - DNA, 36 bp, Artificial Sequence
  Synthetic oligonucleotide
gcaacaactggaagccagtgtctagacacaaaacaa

SEQ ID NO: 6158 - DNA, 37 bp, Artificial Sequence
  Synthetic oligonucleotide
gccaatcttggaaaaaagtagtcgcggtttagtgcga

SEQ ID NO: 6159 - DNA, 38 bp, Artificial Sequence
  Synthetic oligonucleotide
gtctcagactgtttcccgcgattgagaacaattactga

SEQ ID NO: 6160 - DNA, 37 bp, Artificial Sequence
  Synthetic oligonucleotide
gttgcgtggtaaggagaataacttcggctttggctga

SEQ ID NO: 6161 - DNA, 38 bp, Artificial Sequence
  Synthetic oligonucleotide
taaaagtgatcatgaagtggcgagattaggttacatga

SEQ ID NO: 6162 - DNA, 36 bp, Artificial Sequence
  Synthetic oligonucleotide
tactgcggttagacatattgtagcaacaatggtcga

SEQ ID NO: 6163 - DNA, 35 bp, Artificial Sequence
  Synthetic oligonucleotide
tctcgtctcaaatgaaggtgtgatagaccgcatga

SEQ ID NO: 6164 - DNA, 38 bp, Artificial Sequence
  Synthetic oligonucleotide
tgtcgttttacgcctcgagtgcgagcgaccgcaactga

SEQ ID NO: 6165 - DNA, 37 bp, Artificial Sequence
  Synthetic oligonucleotide
tgtggtactacgtagaaccgaaatttatacagtgaga

SEQ ID NO: 6166 - DNA, 35 bp, Artificial Sequence
  Synthetic oligonucleotide
ttcttaaacgtatcgcaggccgtctagatttgggt

SEQ ID NO: 6167 - DNA, 35 bp, Artificial Sequence
  Synthetic oligonucleotide
ttgattcacgagggcgggtgcgaccggcgtaactg

SEQ ID NO: 6168 - DNA, 38 bp, Artificial Sequence
  Synthetic oligonucleotide
acacgagactgcactcttcagacaaattagggcgttga

SEQ ID NO: 6169 - DNA, 36 bp, Artificial Sequence
  Synthetic oligonucleotide
actgcatttgctgtagtaatatcccgttagtgaaca

SEQ ID NO: 6170 - DNA, 36 bp, Artificial Sequence
  Synthetic oligonucleotide
agctaaagctagatgcgacaatgatatggcaacgta

SEQ ID NO: 6171 - DNA, 37 bp, Artificial Sequence
  Synthetic oligonucleotide
gaagtggccgggatgtaccttagaaacttcggtccga

SEQ ID NO: 6172 - DNA, 38 bp, Artificial Sequence
  Synthetic oligonucleotide
gagtcatacagatataggagtccgggtttcggtcttga

SEQ ID NO: 6173 - DNA, 37 bp, Artificial Sequence
  Synthetic oligonucleotide
tagtgactcgatgggagccttttcatgttaattttga

SEQ ID NO: 6174 - DNA, 37 bp, Artificial Sequence
  Synthetic oligonucleotide
tatcagggtgctcacacgtcttgtgagcctcagtgga

SEQ ID NO: 6175 - DNA, 36 bp, Artificial Sequence
  Synthetic oligonucleotide
tccgcggtccaccggaggtagaaactcggttgagta

SEQ ID NO: 6176 - DNA, 35 bp, Artificial Sequence
  Synthetic oligonucleotide
tggtagagtacactatacttgagagatgccatggt

SEQ ID NO: 6177 - DNA, 38 bp, Artificial Sequence
  Synthetic oligonucleotide
atcggggcagtcatgtatgatgtagccctgtttggtga

SEQ ID NO: 6178 - DNA, 35 bp, Artificial Sequence
  Synthetic oligonucleotide
gatttcgacagatccatttatcattcagaggaggg

SEQ ID NO: 6179 - DNA, 36 bp, Artificial Sequence
  Synthetic oligonucleotide
accgccagggaactatggaggttcagggaccggtta

SEQ ID NO: 6180 - DNA, 36 bp, Artificial Sequence
  Synthetic oligonucleotide
ggaggctataccgatcccccgcgcataccccatgta

SEQ ID NO: 6181 - DNA, 36 bp, Artificial Sequence
  Synthetic oligonucleotide
tgctggggctgccaacgatccaaatataatgcgcga

SEQ ID NO: 6182 - DNA, 36 bp, Artificial Sequence
  Synthetic oligonucleotide
ttctatgtccagtttaggctggtgctattattagca

SEQ ID NO: 6183 - DNA, 37 bp, Artificial Sequence
  Synthetic oligonucleotide
ggaactgttgatcatggtagattaatcgactttgaga

SEQ ID NO: 6184 - DNA, 38 bp, Artificial Sequence
  Synthetic oligonucleotide
aagcacggaatagacctaattggtcaagaggaagctga

SEQ ID NO: 6185 - DNA, 38 bp, Artificial Sequence
  Synthetic oligonucleotide
acactacaaatgcaggtctgggttaaatgtacgcttga

SEQ ID NO: 6186 - DNA, 36 bp, Artificial Sequence
  Synthetic oligonucleotide
acagctacatgcagtccgtgatttgccagtcatgta

SEQ ID NO: 6187 - DNA, 36 bp, Artificial Sequence
  Synthetic oligonucleotide
acatggttacgagtgcagagaaagtgtcgagggtga

SEQ ID NO: 6188 - DNA, 38 bp, Artificial Sequence
  Synthetic oligonucleotide
acggatggacattgtagctggggacatccgacgaatga

SEQ ID NO: 6189 - DNA, 36 bp, Artificial Sequence
  Synthetic oligonucleotide
acgtcgttctttcgctgcgggagcccgggtggtgca

SEQ ID NO: 6190 - DNA, 37 bp, Artificial Sequence
  Synthetic oligonucleotide
acttggagtgaagggttgggcccgttaggtgcgttga

SEQ ID NO: 6191 - DNA, 35 bp, Artificial Sequence
  Synthetic oligonucleotide
aggactgtggcttactttattggaatgtggtacgc

SEQ ID NO: 6192 - DNA, 38 bp, Artificial Sequence
  Synthetic oligonucleotide
aggaggtttgggaggttggcatatgagtacggtaatga

SEQ ID NO: 6193 - DNA, 38 bp, Artificial Sequence
  Synthetic oligonucleotide
atgctggacctccgcacataggccggactgtaagctga

SEQ ID NO: 6194 - DNA, 38 bp, Artificial Sequence
  Synthetic oligonucleotide
catgggcccagtcaagcgtggtatggtatgatgtatga

SEQ ID NO: 6195 - DNA, 38 bp, Artificial Sequence
  Synthetic oligonucleotide
cccgtgcactagagttcccccttgacgggatagtctga

SEQ ID NO: 6196 - DNA, 35 bp, Artificial Sequence
  Synthetic oligonucleotide
ccgaaatatcgattgtttgtctcgtactcagtggt

SEQ ID NO: 6197 - DNA, 35 bp, Artificial Sequence
  Synthetic oligonucleotide
ccttacgcatgtgagtgataatgcgctatgcctaa

SEQ ID NO: 6198 - DNA, 35 bp, Artificial Sequence
  Synthetic oligonucleotide
cgcccaggaggcactgaggcttagtactaaattgg

SEQ ID NO: 6199 - DNA, 37 bp, Artificial Sequence
  Synthetic oligonucleotide
cgcccgcctacggttttcgacagtgcccgatactcga

SEQ ID NO: 6200 - DNA, 35 bp, Artificial Sequence
  Synthetic oligonucleotide
ctccacgaatagaagttctagcacaggggtggcac

SEQ ID NO: 6201 - DNA, 36 bp, Artificial Sequence
  Synthetic oligonucleotide
gacagccactacccatctgaagtttccggtagaaga

SEQ ID NO: 6202 - DNA, 36 bp, Artificial Sequence
  Synthetic oligonucleotide
gagtgtgacgccgtcgcctgtataggggtcttgcta

SEQ ID NO: 6203 - DNA, 37 bp, Artificial Sequence
  Synthetic oligonucleotide
gatattcggtctgtagcttgcgatactaaaggtccga

SEQ ID NO: 6204 - DNA, 37 bp, Artificial Sequence
  Synthetic oligonucleotide
gcataattattatcacgcttagagtatgggatgaaga

SEQ ID NO: 6205 - DNA, 37 bp, Artificial Sequence
  Synthetic oligonucleotide
gcatacttgggacgcttgccgcatggggtttaataga

SEQ ID NO: 6206 - DNA, 35 bp, Artificial Sequence
  Synthetic oligonucleotide
ggatacgtggctctcgttacgacttaagaggctcg

SEQ ID NO: 6207 - DNA, 37 bp, Artificial Sequence
  Synthetic oligonucleotide
gggaatgttagtgatgttagcgtttaggacactagga

SEQ ID NO: 6208 - DNA, 36 bp, Artificial Sequence
  Synthetic oligonucleotide
gggtggattgcaggtttttatgtttatgttctaaga

SEQ ID NO: 6209 - DNA, 35 bp, Artificial Sequence
  Synthetic oligonucleotide
gtacctttgcatggctaagtaatgcttttttaaaa

SEQ ID NO: 6210 - DNA, 35 bp, Artificial Sequence
  Synthetic oligonucleotide
gtacgcttgatagagggtccatccacgactggtaa

SEQ ID NO: 6211 - DNA, 35 bp, Artificial Sequence
  Synthetic oligonucleotide
gtaggtagcataggactcaggaatactacggtctt

SEQ ID NO: 6212 - DNA, 35 bp, Artificial Sequence
  Synthetic oligonucleotide
gttactgggaaggcacgctgtcaacacagtacaag

SEQ ID NO: 6213 - DNA, 35 bp, Artificial Sequence
  Synthetic oligonucleotide
gttggattgcggtacaactacaatcgtacagttaa

SEQ ID NO: 6214 - DNA, 36 bp, Artificial Sequence
  Synthetic oligonucleotide
taaggggtacgagaaggaataagtctcggcttggca

SEQ ID NO: 6215 - DNA, 36 bp, Artificial Sequence
  Synthetic oligonucleotide
taattggggcgatcttgatcatcataattgttatca

SEQ ID NO: 6216 - DNA, 37 bp, Artificial Sequence
  Synthetic oligonucleotide
tacggcaagtattgcaggtctactgaagacttttcga

SEQ ID NO: 6217 - DNA, 35 bp, Artificial Sequence
  Synthetic oligonucleotide
tactgatcgtggccaaaaggccgcgaacaaaaggc

SEQ ID NO: 6218 - DNA, 35 bp, Artificial Sequence
  Synthetic oligonucleotide
tagcaggttgcgtagttttagtacaatagtgcctg

SEQ ID NO: 6219 - DNA, 35 bp, Artificial Sequence
  Synthetic oligonucleotide
tcaagtcgtaagtcagacttagagagggatgcctt

SEQ ID NO: 6220 - DNA, 35 bp, Artificial Sequence
  Synthetic oligonucleotide
tctccggaggcggactgttcggtccagtactcatc

SEQ ID NO: 6221 - DNA, 38 bp, Artificial Sequence
  Synthetic oligonucleotide
tgccctgttaaggaattatcatgtggttcgttgcttga

SEQ ID NO: 6222 - DNA, 37 bp, Artificial Sequence
  Synthetic oligonucleotide
tgtcgtagcagtggattagctaggacacgaattttga

SEQ ID NO: 6223 - DNA, 37 bp, Artificial Sequence
  Synthetic oligonucleotide
ttaagacgggtaaaccaaaaagctggacggggtagga

SEQ ID NO: 6224 - DNA, 35 bp, Artificial Sequence
  Synthetic oligonucleotide
ttagacgagtcatcgagtgcgcctagcgatacctg

SEQ ID NO: 6225 - DNA, 35 bp, Artificial Sequence
  Synthetic oligonucleotide
tttgctgccggtggcggagaccctgtagtctattt

SEQ ID NO: 6226 - DNA, 35 bp, Artificial Sequence
  Synthetic oligonucleotide
ttttgacaacaatcactctgaggttcctataagtg

SEQ ID NO: 6227 - DNA, 38 bp, Artificial Sequence
  Synthetic oligonucleotide
aacagggggagggcctgctgatcatgtagtgaggttga

SEQ ID NO: 6228 - DNA, 35 bp, Artificial Sequence
  Synthetic oligonucleotide
agaacagagccagcaagaagctgggtgttatcatg

SEQ ID NO: 6229 - DNA, 37 bp, Artificial Sequence
  Synthetic oligonucleotide
agcgctactgcagccggcatctacacaggcgacacga

SEQ ID NO: 6230 - DNA, 37 bp, Artificial Sequence
  Synthetic oligonucleotide
ccccccggacgtatgatgagcaagatgctccaaccga

SEQ ID NO: 6231 - DNA, 35 bp, Artificial Sequence
  Synthetic oligonucleotide
gagccccgttgattgtactagcatggctttcgtag

SEQ ID NO: 6232 - DNA, 35 bp, Artificial Sequence
  Synthetic oligonucleotide
gatggacaaatggtaattgcactaggttggacggt

SEQ ID NO: 6233 - DNA, 35 bp, Artificial Sequence
  Synthetic oligonucleotide
gcattccaaatattgcgcgatttaaggcgcccggc

SEQ ID NO: 6234 - DNA, 37 bp, Artificial Sequence
  Synthetic oligonucleotide
ggtgcatgcacacaagtcgcaggaccgactcccgaga

SEQ ID NO: 6235 - DNA, 36 bp, Artificial Sequence
  Synthetic oligonucleotide
gtatgtcgtggggcgtaaacacgacgccactacgca

SEQ ID NO: 6236 - DNA, 36 bp, Artificial Sequence
  Synthetic oligonucleotide
gtcacatatatcagtcgacatacgtgggtcaaggca

SEQ ID NO: 6237 - DNA, 38 bp, Artificial Sequence
  Synthetic oligonucleotide
gtggtacccatgttgttaagtagtggacctttgtctga

SEQ ID NO: 6238 - DNA, 37 bp, Artificial Sequence
  Synthetic oligonucleotide
tgtaagtgccatgagggctaaaagagcgttcttccga

SEQ ID NO: 6239 - DNA, 36 bp, Artificial Sequence
  Synthetic oligonucleotide
tcctagcactcagctgtggcggctcggaacatgcga

SEQ ID NO: 6240 - DNA, 35 bp, Artificial Sequence
  Synthetic oligonucleotide
agtgtcgcatatgtcatggtggatgcatgactagg

SEQ ID NO: 6241 - DNA, 37 bp, Artificial Sequence
  Synthetic oligonucleotide
cggttactatgacgtacggataatggttcatgttgga

SEQ ID NO: 6242 - DNA, 38 bp, Artificial Sequence
  Synthetic oligonucleotide
ggtggactggtctaatgcgttacttcagccattggtga

SEQ ID NO: 6243 - DNA, 37 bp, Artificial Sequence
  Synthetic oligonucleotide
tacaatgtagacatacacgtaagggctgttggcaaga

SEQ ID NO: 6244 - DNA, 36 bp, Artificial Sequence
  Synthetic oligonucleotide
tacacaactgtgacctcacaattgctaaggtaccga

SEQ ID NO: 6245 - DNA, 38 bp, Artificial Sequence
  Synthetic oligonucleotide
tcaaatttgagcagacattgatgttatttcatcgatga

SEQ ID NO: 6246 - DNA, 36 bp, Artificial Sequence
  Synthetic oligonucleotide
tgaaggaaattgttgtgacctcttgtgctgctatga

SEQ ID NO: 6247 - DNA, 35 bp, Artificial Sequence
  Synthetic oligonucleotide
aaacggaaacttatgggaacgttagccatcatgga

SEQ ID NO: 6248 - DNA, 37 bp, Artificial Sequence
  Synthetic oligonucleotide
aaccaagagatgtggtagtagatcgaaacgccggcga

SEQ ID NO: 6249 - DNA, 36 bp, Artificial Sequence
  Synthetic oligonucleotide
aagcttggcacctggtgggatgtaatacagtcctaa

SEQ ID NO: 6250 - DNA, 37 bp, Artificial Sequence
  Synthetic oligonucleotide
aatatgtgaagatgttgttgcatattcttgccgcgga

SEQ ID NO: 6251 - DNA, 37 bp, Artificial Sequence
  Synthetic oligonucleotide
acaagtgctgccgcctacgcggtagtttcacccgtga

SEQ ID NO: 6252 - DNA, 36 bp, Artificial Sequence
  Synthetic oligonucleotide
acagaagagtcatggagtaacgtttggcactaggca

SEQ ID NO: 6253 - DNA, 37 bp, Artificial Sequence
  Synthetic oligonucleotide
acagtcttggccaaatttgtagcgggtaggtacccga

SEQ ID NO: 6254 - DNA, 37 bp, Artificial Sequence
  Synthetic oligonucleotide
accaaatcaggtttgctgtacggagtgaggttggcga

SEQ ID NO: 6255 - DNA, 35 bp, Artificial Sequence
  Synthetic oligonucleotide
accagcgttttaaagctcggggtactttcctccgc

SEQ ID NO: 6256 - DNA, 37 bp, Artificial Sequence
  Synthetic oligonucleotide
accgcagacatgcggccctccctcgatgtaatctaga

SEQ ID NO: 6257 - DNA, 36 bp, Artificial Sequence
  Synthetic oligonucleotide
acgagcctgtcatggtgcagtgcgtggggccacgta

SEQ ID NO: 6258 - DNA, 38 bp, Artificial Sequence
  Synthetic oligonucleotide
acgaggtcctgcaggtgcgaactgtcttgacacggtga

SEQ ID NO: 6259 - DNA, 35 bp, Artificial Sequence
  Synthetic oligonucleotide
acgggagacgcaacggtcatgtttctccaaggatt

SEQ ID NO: 6260 - DNA, 36 bp, Artificial Sequence
  Synthetic oligonucleotide
agactgcgtgcgaaagatgtgcggagatctggaaaa

SEQ ID NO: 6261 - DNA, 37 bp, Artificial Sequence
  Synthetic oligonucleotide
agaggagctcccgcttattcaattgctaacgggttga

SEQ ID NO: 6262 - DNA, 37 bp, Artificial Sequence
  Synthetic oligonucleotide
agcatgccccgtacgcggagaagcgccaaagcttcga

SEQ ID NO: 6263 - DNA, 36 bp, Artificial Sequence
  Synthetic oligonucleotide
agctaaggatattgggggagcaaatcaacgtgacta

SEQ ID NO: 6264 - DNA, 37 bp, Artificial Sequence
  Synthetic oligonucleotide
agctcaagacacgatggggagaatacctacgttcgga

SEQ ID NO: 6265 - DNA, 38 bp, Artificial Sequence
  Synthetic oligonucleotide
agtggtacgtgacatttctgtgagattctcgtgtgtga

SEQ ID NO: 6266 - DNA, 38 bp, Artificial Sequence
  Synthetic oligonucleotide
ataaaggcgggggaggtaattctagggtacaatgttga

SEQ ID NO: 6267 - DNA, 37 bp, Artificial Sequence
  Synthetic oligonucleotide
ataatgctgatgttaggtcccaggatgtcatgttgga

SEQ ID NO: 6268 - DNA, 37 bp, Artificial Sequence
  Synthetic oligonucleotide
atacgggccactgtatgttcactgcatttgccataga

SEQ ID NO: 6269 - DNA, 36 bp, Artificial Sequence
  Synthetic oligonucleotide
atcgtccgtagggcccagacattgcaaagctcttaa

SEQ ID NO: 6270 - DNA, 37 bp, Artificial Sequence
  Synthetic oligonucleotide
atgtagggacggtggatccttaatctgatggatatga

SEQ ID NO: 6271 - DNA, 35 bp, Artificial Sequence
  Synthetic oligonucleotide
attaacgtacaggggtcgtcttataggtcaacttt

SEQ ID NO: 6272 - DNA, 35 bp, Artificial Sequence
  Synthetic oligonucleotide
attagcattcgcaccagtgtaggttgaggcgcaat

SEQ ID NO: 6273 - DNA, 37 bp, Artificial Sequence
  Synthetic oligonucleotide
attagccaacggtcatggcatagtcttttaagcagga

SEQ ID NO: 6274 - DNA, 37 bp, Artificial Sequence
  Synthetic oligonucleotide
caacaacctgagtcacaatagcctgtaacgtaacgga

SEQ ID NO: 6275 - DNA, 35 bp, Artificial Sequence
  Synthetic oligonucleotide
catgaggctatgcggagttacttaaacggtgtctc

SEQ ID NO: 6276 - DNA, 37 bp, Artificial Sequence
  Synthetic oligonucleotide
catgccgttcggccaaagctgttaatggtgagagcga

SEQ ID NO: 6277 - DNA, 35 bp, Artificial Sequence
  Synthetic oligonucleotide
catgcgtctaataacaatagctggtaagttgactg

SEQ ID NO: 6278 - DNA, 36 bp, Artificial Sequence
  Synthetic oligonucleotide
catgtaagtccgctccccctatggtttatggagcaa

SEQ ID NO: 6279 - DNA, 38 bp, Artificial Sequence
  Synthetic oligonucleotide
ccccaccggagctgacggaggtcatatagtccatgtga

SEQ ID NO: 6280 - DNA, 35 bp, Artificial Sequence
  Synthetic oligonucleotide
ccctcgtagactaacccctgccaacaggccttccg

SEQ ID NO: 6281 - DNA, 36 bp, Artificial Sequence
  Synthetic oligonucleotide
ccgggggtaggggaaattatttatgggtacgcacta

SEQ ID NO: 6282 - DNA, 38 bp, Artificial Sequence
  Synthetic oligonucleotide
cctgcatcccgcgttaagaggcgagatctgaccagtga

SEQ ID NO: 6283 - DNA, 36 bp, Artificial Sequence
  Synthetic oligonucleotide
ctcataaggttaagtgtgaagattggattggcataa

SEQ ID NO: 6284 - DNA, 38 bp, Artificial Sequence
  Synthetic oligonucleotide
cttgcctctcgggttggtctatatgaaaattcacttga

SEQ ID NO: 6285 - DNA, 38 bp, Artificial Sequence
  Synthetic oligonucleotide
gaagctagtaactgtggaagaatatgctcctggattga

SEQ ID NO: 6286 - DNA, 38 bp, Artificial Sequence
  Synthetic oligonucleotide
gacatcagtcaatctttttctcatggtacgggtagtga

SEQ ID NO: 6287 - DNA, 37 bp, Artificial Sequence
  Synthetic oligonucleotide
gaccgtgcgggatacgcctacgcgcaggtactgggga

SEQ ID NO: 6288 - DNA, 35 bp, Artificial Sequence
  Synthetic oligonucleotide
gacctttgaagtgcacgtacgtaaaggtaggtcag

SEQ ID NO: 6289 - DNA, 37 bp, Artificial Sequence
  Synthetic oligonucleotide
gacgtacagcaacggtgcatgccgtaagtggaaagga

SEQ ID NO: 6290 - DNA, 35 bp, Artificial Sequence
  Synthetic oligonucleotide
gaggctggaccgatcgcaattagtgctggcaagga

SEQ ID NO: 6291 - DNA, 38 bp, Artificial Sequence
  Synthetic oligonucleotide
gagtcggactcactgctgataggtaagtagactcgtga

SEQ ID NO: 6292 - DNA, 37 bp, Artificial Sequence
  Synthetic oligonucleotide
gatgcaagtagtactgcgcctaggtaaacgtcgacga

SEQ ID NO: 6293 - DNA, 35 bp, Artificial Sequence
  Synthetic oligonucleotide
gcaacaaaatggggtacaatatggggacggtacgg

SEQ ID NO: 6294 - DNA, 36 bp, Artificial Sequence
  Synthetic oligonucleotide
gcatggcgctgtactgggaaagaccgtttacgttaa

SEQ ID NO: 6295 - DNA, 37 bp, Artificial Sequence
  Synthetic oligonucleotide
gcgactggacgcccatcccattgatagtggcgcttga

SEQ ID NO: 6296 - DNA, 37 bp, Artificial Sequence
  Synthetic oligonucleotide
gctggtgaatcaggttcaactggcccttgccgtagga

SEQ ID NO: 6297 - DNA, 35 bp, Artificial Sequence
  Synthetic oligonucleotide
ggatatccccttgtgcctagcgtctgtggggaatg

SEQ ID NO: 6298 - DNA, 37 bp, Artificial Sequence
  Synthetic oligonucleotide
ggattatgggtcattgattttcagcttcagccctcga

SEQ ID NO: 6299 - DNA, 35 bp, Artificial Sequence
  Synthetic oligonucleotide
ggtcatgactaccgttggggtatttgtatgatacg

SEQ ID NO: 6300 - DNA, 36 bp, Artificial Sequence
  Synthetic oligonucleotide
ggtcgttatgtttaaaggaacgatgacggtgatgta

SEQ ID NO: 6301 - DNA, 35 bp, Artificial Sequence
  Synthetic oligonucleotide
ggtgcttaccgcgagcacttaagttgtttatcttc

SEQ ID NO: 6302 - DNA, 38 bp, Artificial Sequence
  Synthetic oligonucleotide
gtaacgcctcgaggggcaatgtatattgtctaggttga

SEQ ID NO: 6303 - DNA, 35 bp, Artificial Sequence
  Synthetic oligonucleotide
gtactgcgctcaatctgcgtgcccccctcaaagtt

SEQ ID NO: 6304 - DNA, 35 bp, Artificial Sequence
  Synthetic oligonucleotide
gtagacggcgtgattccgtttgcagtactgcgagc

SEQ ID NO: 6305 - DNA, 36 bp, Artificial Sequence
  Synthetic oligonucleotide
gtatataatcaattcatagcggccgactgtcgctaa

SEQ ID NO: 6306 - DNA, 35 bp, Artificial Sequence
  Synthetic oligonucleotide
gtcatggcttaggacgcttactggcttggaggttg

SEQ ID NO: 6307 - DNA, 38 bp, Artificial Sequence
  Synthetic oligonucleotide
gtcggtacaagtcctgtagagcaatgctgccttcctga

SEQ ID NO: 6308 - DNA, 35 bp, Artificial Sequence
  Synthetic oligonucleotide
gtggcctgatcatgagccgcagtgcgatgactcca

SEQ ID NO: 6309 - DNA, 36 bp, Artificial Sequence
  Synthetic oligonucleotide
gtgtgaacatgcttacactacttcgatctgaccata

SEQ ID NO: 6310 - DNA, 35 bp, Artificial Sequence
  Synthetic oligonucleotide
gttgcgtaacaagccgatcttgtcatatcctgaga

SEQ ID NO: 6311 - DNA, 36 bp, Artificial Sequence
  Synthetic oligonucleotide
gtttgttcctcctatcgtgaactctctacgtactga

SEQ ID NO: 6312 - DNA, 35 bp, Artificial Sequence
  Synthetic oligonucleotide
taatcgacaacgcctcgcggcgccctacatgttta

SEQ ID NO: 6313 - DNA, 36 bp, Artificial Sequence
  Synthetic oligonucleotide
taatgtgccaccaggttaatctgttgataaaggtca

SEQ ID NO: 6314 - DNA, 35 bp, Artificial Sequence
  Synthetic oligonucleotide
tacccagaagcactgcccggatttggttagggatt

SEQ ID NO: 6315 - DNA, 37 bp, Artificial Sequence
  Synthetic oligonucleotide
taccccgttgcagtccaagatgacccgtacgggagga

SEQ ID NO: 6316 - DNA, 37 bp, Artificial Sequence
  Synthetic oligonucleotide
tagacggcttgaaatcctagattggcccctgggagga

SEQ ID NO: 6317 - DNA, 38 bp, Artificial Sequence
  Synthetic oligonucleotide
tatgcaacagggttcttagtaatttagtcggattgtga

SEQ ID NO: 6318 - DNA, 35 bp, Artificial Sequence
  Synthetic oligonucleotide
tcccggggacagatagtcctgtatacgggcactag

SEQ ID NO: 6319 - DNA, 35 bp, Artificial Sequence
  Synthetic oligonucleotide
tccggagtagctagatctagcatacgccggtacta

SEQ ID NO: 6320 - DNA, 38 bp, Artificial Sequence
  Synthetic oligonucleotide
tcgagcgtagaccgacaagcccgctatgctacgaatga

SEQ ID NO: 6321 - DNA, 38 bp, Artificial Sequence
  Synthetic oligonucleotide
tctactagggtactgcgtgggggtcgccaatatcctga

SEQ ID NO: 6322 - DNA, 35 bp, Artificial Sequence
  Synthetic oligonucleotide
tctctgctgtgactttgtgtctcgccacttccgtc

SEQ ID NO: 6323 - DNA, 36 bp, Artificial Sequence
  Synthetic oligonucleotide
tgcctatctcataacaacggaatagtgctatgcgta

SEQ ID NO: 6324 - DNA, 36 bp, Artificial Sequence
  Synthetic oligonucleotide
tgcgtttcaagctcgtctcagctaagatatcccaca

SEQ ID NO: 6325 - DNA, 35 bp, Artificial Sequence
  Synthetic oligonucleotide
tgctttcgcaaatagtgggaatcgaaacggccgaa

SEQ ID NO: 6326 - DNA, 36 bp, Artificial Sequence
  Synthetic oligonucleotide
tgtcctcgtacgataccacctattgtggtgcaccga

SEQ ID NO: 6327 - DNA, 37 bp, Artificial Sequence
  Synthetic oligonucleotide
tgtggttcctcatttcagtttagtcaatttcaacgga

SEQ ID NO: 6328 - DNA, 36 bp, Artificial Sequence
  Synthetic oligonucleotide
ttacagttcgcccccacctacgcccgccgttggata

SEQ ID NO: 6329 - DNA, 38 bp, Artificial Sequence
  Synthetic oligonucleotide
ttagtcggcgaacgcggatggagcttacccgtgggtga

SEQ ID NO: 6330 - DNA, 36 bp, Artificial Sequence
  Synthetic oligonucleotide
ttatccagtgctgcggtggtaatgaaggaagattga

SEQ ID NO: 6331 - DNA, 35 bp, Artificial Sequence
  Synthetic oligonucleotide
ttcaagactctgagggccaaaattgatacatcgtg

SEQ ID NO: 6332 - DNA, 35 bp, Artificial Sequence
  Synthetic oligonucleotide
ttcaagtttacgcatgagcaagtcctgggcgcctc

SEQ ID NO: 6333 - DNA, 37 bp, Artificial Sequence
  Synthetic oligonucleotide
ttcacggaccgaagtaatggaattgatgagtgtagga

SEQ ID NO: 6334 - DNA, 37 bp, Artificial Sequence
  Synthetic oligonucleotide
ttggtagagagatgaagatgcacggtccataccagga

SEQ ID NO: 6335 - DNA, 36 bp, Artificial Sequence
  Synthetic oligonucleotide
tttccacaggtaagtaacaagatggggaggactgta

SEQ ID NO: 6336 - DNA, 35 bp, Artificial Sequence
  Synthetic oligonucleotide
tttgctgaacttcactggattagtgacctagaccc

SEQ ID NO: 6337 - DNA, 35 bp, Artificial Sequence
  Synthetic oligonucleotide
gattccagaggtcataaccgagaccggttatcatg

SEQ ID NO: 6338 - DNA, 38 bp, Artificial Sequence
  Synthetic oligonucleotide
aaccgtccgatgactccgtatttgatgacaaaagttga

SEQ ID NO: 6339 - DNA, 35 bp, Artificial Sequence
  Synthetic oligonucleotide
ggttcgccaaagtgggaccgatctgagaggcgatc

SEQ ID NO: 6340 - DNA, 36 bp, Artificial Sequence
  Synthetic oligonucleotide
gttcgtaactagtaggatttacacgtctctaagtca

SEQ ID NO: 6341 - DNA, 36 bp, Artificial Sequence
  Synthetic oligonucleotide
gttagaaagctaaactcaggagtgctaagtaatcat

SEQ ID NO: 6342 - DNA, 37 bp, Artificial Sequence
  Synthetic oligonucleotide
attctgtatcgcgcaaaatgacatgttgtcgggtgga

SEQ ID NO: 6343 - DNA, 35 bp, Artificial Sequence
  Synthetic oligonucleotide
cctgccctggaaagcattacgaaagccagctacgt

SEQ ID NO: 6344 - DNA, 36 bp, Artificial Sequence
  Synthetic oligonucleotide
gaagaatgtcatgatatgctttttgatatcacacaa

SEQ ID NO: 6345 - DNA, 38 bp, Artificial Sequence
  Synthetic oligonucleotide
gcaacatgactgatactggtgtacgggagaatttgtga

SEQ ID NO: 6346 - DNA, 38 bp, Artificial Sequence
  Synthetic oligonucleotide
gctagtgggttagagctgttccattgcgcgaactttga

SEQ ID NO: 6347 - DNA, 35 bp, Artificial Sequence
  Synthetic oligonucleotide
ggtgagtgtttcactaatgggaaacaattgtgcgt

SEQ ID NO: 6348 - DNA, 35 bp, Artificial Sequence
  Synthetic oligonucleotide
gtgtcggttgttcgaatcccatagagctcagaaac

SEQ ID NO: 6349 - DNA, 36 bp, Artificial Sequence
  Synthetic oligonucleotide
tatctctctgacaaccagcaagatttgcgggccgta

SEQ ID NO: 6350 - DNA, 36 bp, Artificial Sequence
  Synthetic oligonucleotide
tatgctaggggacactgatttcttttggctagttta

SEQ ID NO: 6351 - DNA, 35 bp, Artificial Sequence
  Synthetic oligonucleotide
ttaaatgacgtcacggaggtaactttgtcaagtgg

SEQ ID NO: 6352 - DNA, 37 bp, Artificial Sequence
  Synthetic oligonucleotide
ttacaagcggtcaggtcgggtaacaattaccatgcga

SEQ ID NO: 6353 - DNA, 36 bp, Artificial Sequence
  Synthetic oligonucleotide
accgtgagaacgtcatgggggaatcgaaacctggta

SEQ ID NO: 6354 - DNA, 36 bp, Artificial Sequence
  Synthetic oligonucleotide
aactttcactagtgtcgtggtgtatacgtactacaa

SEQ ID NO: 6355 - DNA, 36 bp, Artificial Sequence
  Synthetic oligonucleotide
aatccacgggcgtggatcgcgcccatggttctggta

SEQ ID NO: 6356 - DNA, 36 bp, Artificial Sequence
  Synthetic oligonucleotide
ataaaccttgtacagcgaggtttgcgggccaatata

SEQ ID NO: 6357 - DNA, 35 bp, Artificial Sequence
  Synthetic oligonucleotide
atcgtatgaaggtatagtgatactgtagggaagtt

SEQ ID NO: 6358 - DNA, 35 bp, Artificial Sequence
  Synthetic oligonucleotide
cacagacgaggagcttggaaattgcgggtagggat

SEQ ID NO: 6359 - DNA, 38 bp, Artificial Sequence
  Synthetic oligonucleotide
cagtactggtaagatgctgttaatatttagctcgttga

SEQ ID NO: 6360 - DNA, 37 bp, Artificial Sequence
  Synthetic oligonucleotide
cctgcatgggtgaatctgtgctcaggcataaaacgga

SEQ ID NO: 6361 - DNA, 36 bp, Artificial Sequence
  Synthetic oligonucleotide
ctgaaccccagcgattcgcaaaaatggtagccataa

SEQ ID NO: 6362 - DNA, 35 bp, Artificial Sequence
  Synthetic oligonucleotide
gaaccgctatgggttcagactagggagcacatccg

SEQ ID NO: 6363 - DNA, 36 bp, Artificial Sequence
  Synthetic oligonucleotide
gacaagttagcggtacgtaataataaaggttatgta

SEQ ID NO: 6364 - DNA, 36 bp, Artificial Sequence
  Synthetic oligonucleotide
gacatgcaattagtttgataaggatctgccgtccta

SEQ ID NO: 6365 - DNA, 36 bp, Artificial Sequence
  Synthetic oligonucleotide
gacctttgggacactatccggcgactggcaatcata

SEQ ID NO: 6366 - DNA, 36 bp, Artificial Sequence
  Synthetic oligonucleotide
gagtgagtttgtaaacgtgagtgcagtgctgtggca

SEQ ID NO: 6367 - DNA, 35 bp, Artificial Sequence
  Synthetic oligonucleotide
gcaccatgcgtgccagctacatgagtcgccccggg

SEQ ID NO: 6368 - DNA, 36 bp, Artificial Sequence
  Synthetic oligonucleotide
ggggactgtgaaaattgccgcctctgtaacctcgca

SEQ ID NO: 6369 - DNA, 37 bp, Artificial Sequence
  Synthetic oligonucleotide
ggtcaatgtaacgattcgctataccgacattgaatga

SEQ ID NO: 6370 - DNA, 36 bp, Artificial Sequence
  Synthetic oligonucleotide
ggttggtggtagaagtcttaccagtagatggtgtta

SEQ ID NO: 6371 - DNA, 36 bp, Artificial Sequence
  Synthetic oligonucleotide
gtcatgcttggtccgggtccgtgaaataaagaggta

SEQ ID NO: 6372 - DNA, 38 bp, Artificial Sequence
  Synthetic oligonucleotide
gttgtacttgcgatggtgtcatttgagttaaattatga

SEQ ID NO: 6373 - DNA, 36 bp, Artificial Sequence
  Synthetic oligonucleotide
taccttcgaaggataccttgtactggattaagctga

SEQ ID NO: 6374 - DNA, 36 bp, Artificial Sequence
  Synthetic oligonucleotide
tatagtcttggctgtcactaccaagctcagttcgta

SEQ ID NO: 6375 - DNA, 38 bp, Artificial Sequence
  Synthetic oligonucleotide
tcttactccgttatggtgtttttgatcaaacggtggga

SEQ ID NO: 6376 - DNA, 38 bp, Artificial Sequence
  Synthetic oligonucleotide
tgaagcccgggctaccaaggctgcaatccccgtggtga

SEQ ID NO: 6377 - DNA, 36 bp, Artificial Sequence
  Synthetic oligonucleotide
tgtgatcggaacggtttttaagttgcatgagtgtga

SEQ ID NO: 6378 - DNA, 37 bp, Artificial Sequence
  Synthetic oligonucleotide
ttagagttcatacggaagagaaggtctacgccataga

SEQ ID NO: 6379 - DNA, 38 bp, Artificial Sequence
  Synthetic oligonucleotide
tttgccaaagtgtaaggcgtgcttggaaataagtttga

SEQ ID NO: 6380 - DNA, 37 bp, Artificial Sequence
  Synthetic oligonucleotide
gtagacgactgtgtgttatatagcctcactaaaggga

SEQ ID NO: 6381 - DNA, 37 bp, Artificial Sequence
  Synthetic oligonucleotide
gtttaacaatcaaatgatagcgtaggcttgataacga

SEQ ID NO: 6382 - DNA, 36 bp, Artificial Sequence
  Synthetic oligonucleotide
ctcccccccgtcggtaagtgaatctattactcataa

SEQ ID NO: 6383 - DNA, 35 bp, Artificial Sequence
  Synthetic oligonucleotide
aattagtgcacatacgtgacgctgaaagtactggt

SEQ ID NO: 6384 - DNA, 37 bp, Artificial Sequence
  Synthetic oligonucleotide
gcacagctgtcatctggagtgatgggcaatatagtga

SEQ ID NO: 6385 - DNA, 36 bp, Artificial Sequence
  Synthetic oligonucleotide
gcatcttggcacgggccgacggttgttgttacgtta

SEQ ID NO: 6386 - DNA, 37 bp, Artificial Sequence
  Synthetic oligonucleotide
gtaccaatagtggtaagaagctgtgtttatccgttga

SEQ ID NO: 6387 - DNA, 35 bp, Artificial Sequence
  Synthetic oligonucleotide
gtattaggggtgttacaagactgggataccgaaat

SEQ ID NO: 6388 - DNA, 38 bp, Artificial Sequence
  Synthetic oligonucleotide
tagcatcatgccggtgcggtcgaaagataacacattga

SEQ ID NO: 6389 - DNA, 35 bp, Artificial Sequence
  Synthetic oligonucleotide
acgtgtgctcccccgccgttacgccctcagctatt

SEQ ID NO: 6390 - DNA, 38 bp, Artificial Sequence
  Synthetic oligonucleotide
actatgtaaggcgtacgcaggtgccaaatctgggatga

SEQ ID NO: 6391 - DNA, 35 bp, Artificial Sequence
  Synthetic oligonucleotide
agcctttgcgatatgtataagccgaaccgatcatc

SEQ ID NO: 6392 - DNA, 37 bp, Artificial Sequence
  Synthetic oligonucleotide
atcaaagtttatatcgccttaacaggagagagtctga

SEQ ID NO: 6393 - DNA, 38 bp, Artificial Sequence
  Synthetic oligonucleotide
atcgccatttttacgttgccaatcgggtcctaacctga

SEQ ID NO: 6394 - DNA, 37 bp, Artificial Sequence
  Synthetic oligonucleotide
ccattcatggttgtgaacgctgtgcaagcatggtaga

SEQ ID NO: 6395 - DNA, 38 bp, Artificial Sequence
  Synthetic oligonucleotide
cgggacggactgcggcgtagttacgagtggcaacttga

SEQ ID NO: 6396 - DNA, 35 bp, Artificial Sequence
  Synthetic oligonucleotide
cttacacaatgtgagttatgctaatcagtatccat

SEQ ID NO: 6397 - DNA, 38 bp, Artificial Sequence
  Synthetic oligonucleotide
gcactcctgaagacggtccccgctgtgtttggtactga

SEQ ID NO: 6398 - DNA, 37 bp, Artificial Sequence
  Synthetic oligonucleotide
ggcgatctaaggtcgcgacctataaaacatcatcgga

SEQ ID NO: 6399 - DNA, 35 bp, Artificial Sequence
  Synthetic oligonucleotide
ggtatctgtaaacagaagttgtttttactgtcttc

SEQ ID NO: 6400 - DNA, 38 bp, Artificial Sequence
  Synthetic oligonucleotide
gtccggatgttattgttaggtttgccgctacatattga

SEQ ID NO: 6401 - DNA, 35 bp, Artificial Sequence
  Synthetic oligonucleotide
taaccagggcattaattgcatcggataacgtttta

SEQ ID NO: 6402 - DNA, 37 bp, Artificial Sequence
  Synthetic oligonucleotide
tagactcagactggtcaggacccccaaccaccggaga

SEQ ID NO: 6403 - DNA, 36 bp, Artificial Sequence
  Synthetic oligonucleotide
tctgccccaaagcttttggaatcatgtgggcctaga

SEQ ID NO: 6404 - DNA, 35 bp, Artificial Sequence
  Synthetic oligonucleotide
tgtgagtgtgcggggcgctgtatgatggatcagtt

SEQ ID NO: 6405 - DNA, 35 bp, Artificial Sequence
  Synthetic oligonucleotide
tgttggcgactagtggtccgatggcactgtgctgt

SEQ ID NO: 6406 - DNA, 35 bp, Artificial Sequence
  Synthetic oligonucleotide
gaaattatcagtgctgcaggtcatggacaaagcga

SEQ ID NO: 6407 - DNA, 38 bp, Artificial Sequence
  Synthetic oligonucleotide
aaatccgcgcaggttacctggctacgtatacgatttga

SEQ ID NO: 6408 - DNA, 38 bp, Artificial Sequence
  Synthetic oligonucleotide
aacaatctcggtcgctcgatgtctatgcgtactattga

SEQ ID NO: 6409 - DNA, 36 bp, Artificial Sequence
  Synthetic oligonucleotide
aagtcttgcgcccatggctatagtatgtagtactga

SEQ ID NO: 6410 - DNA, 36 bp, Artificial Sequence
  Synthetic oligonucleotide
acccggcaatgcattccaaaaagattttagaagtta

SEQ ID NO: 6411 - DNA, 35 bp, Artificial Sequence
  Synthetic oligonucleotide
agtgtggggcatgacacccctgagctccacagctc

SEQ ID NO: 6412 - DNA, 38 bp, Artificial Sequence
  Synthetic oligonucleotide
atgatcacgactcaggtaaggatttattttttttgtga

SEQ ID NO: 6413 - DNA, 37 bp, Artificial Sequence
  Synthetic oligonucleotide
atgatgccgtgatttgggtgagtcgttgactatgaga

SEQ ID NO: 6414 - DNA, 37 bp, Artificial Sequence
  Synthetic oligonucleotide
atgctcccggggcttatgccgggagagctattacgga

SEQ ID NO: 6415 - DNA, 37 bp, Artificial Sequence
  Synthetic oligonucleotide
attatccaagctcgacagataatggccttggaccaga

SEQ ID NO: 6416 - DNA, 38 bp, Artificial Sequence
  Synthetic oligonucleotide
attttgggacgactcagcatgggttttgatggtcttga

SEQ ID NO: 6417 - DNA, 37 bp, Artificial Sequence
  Synthetic oligonucleotide
catggttttgtgggttgaaacgtccgacactccggga

SEQ ID NO: 6418 - DNA, 37 bp, Artificial Sequence
  Synthetic oligonucleotide
gaactcatcgttgggtactgaatgaaggcatcaacga

SEQ ID NO: 6419 - DNA, 38 bp, Artificial Sequence
  Synthetic oligonucleotide
gaccccggctgcacgccgtttacaagaaaacaatatga

SEQ ID NO: 6420 - DNA, 35 bp, Artificial Sequence
  Synthetic oligonucleotide
gaggttggtggagtgcccgtcgttctggcatagag

SEQ ID NO: 6421 - DNA, 36 bp, Artificial Sequence
  Synthetic oligonucleotide
gagtttgggtgtgcgaatagtacattctggaacaca

SEQ ID NO: 6422 - DNA, 37 bp, Artificial Sequence
  Synthetic oligonucleotide
gcaatacctagtatgcacgtggccgcaatacgtctga

SEQ ID NO: 6423 - DNA, 36 bp, Artificial Sequence
  Synthetic oligonucleotide
gcagtcacgattcgcgtagaatacaaagcgctgaga

SEQ ID NO: 6424 - DNA, 36 bp, Artificial Sequence
  Synthetic oligonucleotide
gccagaagccatttagcgatctggtttcttcggtta

SEQ ID NO: 6425 - DNA, 36 bp, Artificial Sequence
  Synthetic oligonucleotide
gcgaacccgagcttaggacgcgctgagatgcggcta

SEQ ID NO: 6426 - DNA, 35 bp, Artificial Sequence
  Synthetic oligonucleotide
gctgcacgtcaaataaataccaaagctcacttcct

SEQ ID NO: 6427 - DNA, 35 bp, Artificial Sequence
  Synthetic oligonucleotide
gggagacttcgttaacgcagttagccatacacctg

SEQ ID NO: 6428 - DNA, 35 bp, Artificial Sequence
  Synthetic oligonucleotide
gggcataataccgaggatggtgaccgcggtaaatg

SEQ ID NO: 6429 - DNA, 35 bp, Artificial Sequence
  Synthetic oligonucleotide
ggggggtaactttgagctcctgatcacccatactg

SEQ ID NO: 6430 - DNA, 36 bp, Artificial Sequence
  Synthetic oligonucleotide
ggtaatcggtcggaggcctgagtcctcagtctgtaa

SEQ ID NO: 6431 - DNA, 36 bp, Artificial Sequence
  Synthetic oligonucleotide
gtaaattgtattgacaggtcaagaaaggatggacga

SEQ ID NO: 6432 - DNA, 36 bp, Artificial Sequence
  Synthetic oligonucleotide
gtacttggggtaaacatgcctgtgacttggaagaaa

SEQ ID NO: 6433 - DNA, 37 bp, Artificial Sequence
  Synthetic oligonucleotide
gtcccatgtccgggtacgggaccaggcactttcgtga

SEQ ID NO: 6434 - DNA, 36 bp, Artificial Sequence
  Synthetic oligonucleotide
gtgagatcgagacttctgtctttccgtggtttctca

SEQ ID NO: 6435 - DNA, 38 bp, Artificial Sequence
  Synthetic oligonucleotide
gtttgatgctactgctttagtggtcattacggatgtga

SEQ ID NO: 6436 - DNA, 36 bp, Artificial Sequence
  Synthetic oligonucleotide
tacttacgtggatcgagctcagcgccgcattctgga

SEQ ID NO: 6437 - DNA, 35 bp, Artificial Sequence
  Synthetic oligonucleotide
tagcgtggactgcacccatcatgaaatccagtcga

SEQ ID NO: 6438 - DNA, 36 bp, Artificial Sequence
  Synthetic oligonucleotide
tatggaaggtatccagtggtcaggtttcgtcgacta

SEQ ID NO: 6439 - DNA, 36 bp, Artificial Sequence
  Synthetic oligonucleotide
tccgtgaggcgcacccatgccacagggcgcaattga

SEQ ID NO: 6440 - DNA, 36 bp, Artificial Sequence
  Synthetic oligonucleotide
tgcctagcccccgaagcaatattaaatcgcgcaaca

SEQ ID NO: 6441 - DNA, 36 bp, Artificial Sequence
  Synthetic oligonucleotide
tgggggcctcccggggccaggtttaaacgtacccaa

SEQ ID NO: 6442 - DNA, 36 bp, Artificial Sequence
  Synthetic oligonucleotide
tgtagtctaatcgcgttaagttgcacacagctggaa

SEQ ID NO: 6443 - DNA, 37 bp, Artificial Sequence
  Synthetic oligonucleotide
ttacgtcacaagagaaggagcacagtttcctgagcga

SEQ ID NO: 6444 - DNA, 35 bp, Artificial Sequence
  Synthetic oligonucleotide
ttgtactttgacggcgaagtataatattatgagtc

SEQ ID NO: 6445 - DNA, 35 bp, Artificial Sequence
  Synthetic oligonucleotide
tttgtcatgtcgagctattttaaccgtcagtttag

SEQ ID NO: 6446 - DNA, 38 bp, Artificial Sequence
  Synthetic oligonucleotide
gcagtaccggagggcgtagataatattagataggatga

SEQ ID NO: 6447 - DNA, 38 bp, Artificial Sequence
  Synthetic oligonucleotide
aaatgctactcatctaaggagcatcacttgctacctga

SEQ ID NO: 6448 - DNA, 36 bp, Artificial Sequence
  Synthetic oligonucleotide
acaaaccatcgggttgttattgcaggttgcgtacaa

SEQ ID NO: 6449 - DNA, 38 bp, Artificial Sequence
  Synthetic oligonucleotide
agaccaaacactgcttcaagaaatgtaacggctagtga

SEQ ID NO: 6450 - DNA, 35 bp, Artificial Sequence
  Synthetic oligonucleotide
attctgagtcatggttagcgacttccaagtaataa

SEQ ID NO: 6451 - DNA, 36 bp, Artificial Sequence
  Synthetic oligonucleotide
gcgaccagcaggtagtaccgctgcagaaggggtaga

SEQ ID NO: 6452 - DNA, 35 bp, Artificial Sequence
  Synthetic oligonucleotide
gctgataggcatgaaaatatgtgtttgatacgtat

SEQ ID NO: 6453 - DNA, 36 bp, Artificial Sequence
  Synthetic oligonucleotide
gcaaagggcgtacgtaagggaagtgtgtggcaataa

SEQ ID NO: 6454 - DNA, 35 bp, Artificial Sequence
  Synthetic oligonucleotide
aaaacctgggcgtagacagactcaccagtttgctt

SEQ ID NO: 6455 - DNA, 35 bp, Artificial Sequence
  Synthetic oligonucleotide
aatgctgagtttaggggtctacgtacttgttaggg

SEQ ID NO: 6456 - DNA, 38 bp, Artificial Sequence
  Synthetic oligonucleotide
aattggttaaggaccgtaactaggagggttatccctga

SEQ ID NO: 6457 - DNA, 38 bp, Artificial Sequence
  Synthetic oligonucleotide
acatgtccattgtgggacactacgtttgacaatcatga

SEQ ID NO: 6458 - DNA, 36 bp, Artificial Sequence
  Synthetic oligonucleotide
agcctgtaaatacaaccattgtacatcggcatcgca

SEQ ID NO: 6459 - DNA, 38 bp, Artificial Sequence
  Synthetic oligonucleotide
atgctacgttctaagttgaatgctggtgcgccatatga

SEQ ID NO: 6460 - DNA, 36 bp, Artificial Sequence
  Synthetic oligonucleotide
attattacgtgacttggacctccggtttagccacca

SEQ ID NO: 6461 - DNA, 38 bp, Artificial Sequence
  Synthetic oligonucleotide
attgcaacacactggtgtattcgtaattgatgctgtga

SEQ ID NO: 6462 - DNA, 35 bp, Artificial Sequence
  Synthetic oligonucleotide
caacgtccaagaacccggtagagtgtcaccgccga

SEQ ID NO: 6463 - DNA, 35 bp, Artificial Sequence
  Synthetic oligonucleotide
gaatagagggcatgacacctcattgactaggatgc

SEQ ID NO: 6464 - DNA, 38 bp, Artificial Sequence
  Synthetic oligonucleotide
gcaagcgataatgtacagcgcccactgcctgcaggtga

SEQ ID NO: 6465 - DNA, 35 bp, Artificial Sequence
  Synthetic oligonucleotide
gcagatcatatcctgttaagtgaataaatgcactg

SEQ ID NO: 6466 - DNA, 37 bp, Artificial Sequence
  Synthetic oligonucleotide
gccgtaagagcggaacggcgtagactggttggttaga

SEQ ID NO: 6467 - DNA, 37 bp, Artificial Sequence
  Synthetic oligonucleotide
gctcaccgccgtagtcatactgaaggagaccaggtga

SEQ ID NO: 6468 - DNA, 35 bp, Artificial Sequence
  Synthetic oligonucleotide
ggactgcattggccctctgtccggacttccgggac

SEQ ID NO: 6469 - DNA, 36 bp, Artificial Sequence
  Synthetic oligonucleotide
ggtagacaggcaccctgttcatacatctgtttcaga

SEQ ID NO: 6470 - DNA, 36 bp, Artificial Sequence
  Synthetic oligonucleotide
ggtggcattaatgcataggtctctacgagttttgga

SEQ ID NO: 6471 - DNA, 35 bp, Artificial Sequence
  Synthetic oligonucleotide
gtaatcagttgcagtcttaaacagtaggatgtgcg

SEQ ID NO: 6472 - DNA, 36 bp, Artificial Sequence
  Synthetic oligonucleotide
gtagtatatgccaaaaggctaccatactgccggata

SEQ ID NO: 6473 - DNA, 36 bp, Artificial Sequence
  Synthetic oligonucleotide
ttggtttacgtgcggttataattactaggaatagga

SEQ ID NO: 6474 - DNA, 37 bp, Artificial Sequence
  Synthetic oligonucleotide
gaccgtatgaggggatgcctaagagcgaaacggtgga

SEQ ID NO: 6475 - DNA, 36 bp, Artificial Sequence
  Synthetic oligonucleotide
taaggtgggtaggccacggtgaccacccatattgta

SEQ ID NO: 6476 - DNA, 37 bp, Artificial Sequence
  Synthetic oligonucleotide
taccgcaaacggtgatcatataagggctgagtactga

SEQ ID NO: 6477 - DNA, 27 bp, Artificial Sequence
  Synthetic oligonucleotide
tgtaaggccgaactgggtctccaacga

SEQ ID NO: 6478 - DNA, 36 bp, Artificial Sequence
  Synthetic oligonucleotide
ttcacgtgactggtggaaggtagccaacaattagaa

SEQ ID NO: 6479 - DNA, 38 bp, Artificial Sequence
  Synthetic oligonucleotide
ttgcccatgggcagtagctcaaccattaactgttctga

SEQ ID NO: 6480 - DNA, 35 bp, Artificial Sequence
  Synthetic oligonucleotide
gaagcacacttcgcggtatgaagattgtgtggcca

SEQ ID NO: 6481 - DNA, 35 bp, Artificial Sequence
  Synthetic oligonucleotide
atacgtactcagccttcccggaatgtaccgtatac

SEQ ID NO: 6482 - DNA, 38 bp, Artificial Sequence
  Synthetic oligonucleotide
ccaaagtcaggcccctaaccgtgggaccttatccgtga

SEQ ID NO: 6483 - DNA, 37 bp, Artificial Sequence
  Synthetic oligonucleotide
gagcctccgtatgttcaacccgctcttgagttggtga

SEQ ID NO: 6484 - DNA, 35 bp, Artificial Sequence
  Synthetic oligonucleotide
gctcgatttcttgaagtgaacaaacgcgtgcaaac

SEQ ID NO: 6485 - DNA, 38 bp, Artificial Sequence
  Synthetic oligonucleotide
gggccccgaaagacttcccaggtagtagtccggtagga

SEQ ID NO: 6486 - DNA, 38 bp, Artificial Sequence
  Synthetic oligonucleotide
ggtatcgtttgcacgctgggtcatgatatggaacgtga

SEQ ID NO: 6487 - DNA, 37 bp, Artificial Sequence
  Synthetic oligonucleotide
gtttgatatggacagcagtatactgtaacggattcga

SEQ ID NO: 6488 - DNA, 37 bp, Artificial Sequence
  Synthetic oligonucleotide
tagacacggatggaatttctgcagtataacgtattga

SEQ ID NO: 6489 - DNA, 37 bp, Artificial Sequence
  Synthetic oligonucleotide
tcagtaccttttggagaggtccttgcgtgggctacga

SEQ ID NO: 6490 - DNA, 38 bp, Artificial Sequence
  Synthetic oligonucleotide
tgtatagatggacatcgcacctcttggtatagttttga

SEQ ID NO: 6491 - DNA, 35 bp, Artificial Sequence
  Synthetic oligonucleotide
ttgctaactcgcagagctactttccaacgttaaag

SEQ ID NO: 6492 - DNA, 37 bp, Artificial Sequence
  Synthetic oligonucleotide
tttggcaattccgggtacaaggtcaggtgctgataga

SEQ ID NO: 6493 - DNA, 38 bp, Artificial Sequence
  Synthetic oligonucleotide
gcgcaatattgcaccagcacagcaacttgttaagctga

SEQ ID NO: 6494 - DNA, 37 bp, Artificial Sequence
  Synthetic oligonucleotide
acagcacggaacatgcaacttttagttgtgttggcga

SEQ ID NO: 6495 - DNA, 35 bp, Artificial Sequence
  Synthetic oligonucleotide
catgggcctaccacatggggagggcgtgacgaatg

SEQ ID NO: 6496 - DNA, 36 bp, Artificial Sequence
  Synthetic oligonucleotide
gacctgcgattctccccagaagtctagcggtcggta

SEQ ID NO: 6497 - DNA, 37 bp, Artificial Sequence
  Synthetic oligonucleotide
gatctggagtgcgcgagttcgagctagataacgtaga

SEQ ID NO: 6498 - DNA, 38 bp, Artificial Sequence
  Synthetic oligonucleotide
ttacgttccagttgccacaacaaccgctggttggttga

SEQ ID NO: 6499 - DNA, 36 bp, Artificial Sequence
  Synthetic oligonucleotide
aaactggggcctggttagcataggcactggcttcca

SEQ ID NO: 6500 - DNA, 38 bp, Artificial Sequence
  Synthetic oligonucleotide
aaccgagtagggtacgatgctgaacatccctgggttga

SEQ ID NO: 6501 - DNA, 35 bp, Artificial Sequence
  Synthetic oligonucleotide
aataactgccccgggtctagtgccttgtacaaggt

SEQ ID NO: 6502 - DNA, 36 bp, Artificial Sequence
  Synthetic oligonucleotide
aatcattgataggttaggattgctgacgggtaggta

SEQ ID NO: 6503 - DNA, 35 bp, Artificial Sequence
  Synthetic oligonucleotide
aatgctccgtttgtctcatcggagcgtttgtagga

SEQ ID NO: 6504 - DNA, 35 bp, Artificial Sequence
  Synthetic oligonucleotide
acacggtacgaagactccaccgtctggagcgagtt

SEQ ID NO: 6505 - DNA, 38 bp, Artificial Sequence
  Synthetic oligonucleotide
acgattgaccgtagggtcatgctgaaaggatggcttga

SEQ ID NO: 6506 - DNA, 36 bp, Artificial Sequence
  Synthetic oligonucleotide
agaggcctattggtgtcggatacattgaatcccgta

SEQ ID NO: 6507 - DNA, 35 bp, Artificial Sequence
  Synthetic oligonucleotide
agtaccggaaatattatattgtggtgtacgactaa

SEQ ID NO: 6508 - DNA, 35 bp, Artificial Sequence
  Synthetic oligonucleotide
ataactcgcagtcaaaggactagcgtttctaggct

SEQ ID NO: 6509 - DNA, 36 bp, Artificial Sequence
  Synthetic oligonucleotide
atgtggacatgttttcagttactggagtgcttgcga

SEQ ID NO: 6510 - DNA, 35 bp, Artificial Sequence
  Synthetic oligonucleotide
cccagtgagggacgtgtacgcccaatgctacgcgc

SEQ ID NO: 6511 - DNA, 36 bp, Artificial Sequence
  Synthetic oligonucleotide
cctttaggtaatcgaacggcgagactgtattggcta

SEQ ID NO: 6512 - DNA, 37 bp, Artificial Sequence
  Synthetic oligonucleotide
cgtcaacccgggtcaccgtgtaaccgcgatacatgga

SEQ ID NO: 6513 - DNA, 38 bp, Artificial Sequence
  Synthetic oligonucleotide
gaatcgtgacagtacggtattcaattgtcagagcttga

SEQ ID NO: 6514 - DNA, 35 bp, Artificial Sequence
  Synthetic oligonucleotide
gaggttgccggcggtccaccatgtaaggtcattag

SEQ ID NO: 6515 - DNA, 36 bp, Artificial Sequence
  Synthetic oligonucleotide
gcgccaccaggtgagagggacgggagaccggaccga

SEQ ID NO: 6516 - DNA, 35 bp, Artificial Sequence
  Synthetic oligonucleotide
gctagtttattgttgacgccgtgaggcgaggctag

SEQ ID NO: 6517 - DNA, 35 bp, Artificial Sequence
  Synthetic oligonucleotide
ggggattgttaaaccgtcggtactttgggacggtg

SEQ ID NO: 6518 - DNA, 36 bp, Artificial Sequence
  Synthetic oligonucleotide
gggtgcaatcgtaagtggtatcaggcatgcaggaaa

SEQ ID NO: 6519 - DNA, 37 bp, Artificial Sequence
  Synthetic oligonucleotide
ggtccgcatgggtctctattgtctcatgcgtgctaga

SEQ ID NO: 6520 - DNA, 36 bp, Artificial Sequence
  Synthetic oligonucleotide
gttacgcactcatggattactgcgttgtgttgagca

SEQ ID NO: 6521 - DNA, 35 bp, Artificial Sequence
  Synthetic oligonucleotide
tcactacgagttcgtgcgaaagggactagtgatag

SEQ ID NO: 6522 - DNA, 35 bp, Artificial Sequence
  Synthetic oligonucleotide
tggaaacgacagaaataggcgtgatgaggctgata

SEQ ID NO: 6523 - DNA, 38 bp, Artificial Sequence
  Synthetic oligonucleotide
ttgtttgctcagggtcttgaccacaacattgagtctga

SEQ ID NO: 6524 - DNA, 35 bp, Artificial Sequence
  Synthetic oligonucleotide
ggcctgcgaaccgctggtagcacggggaagacatg

SEQ ID NO: 6525 - DNA, 37 bp, Artificial Sequence
  Synthetic oligonucleotide
ttgcaaagcgtggttggtaggcttgaaaccacaacga

SEQ ID NO: 6526 - DNA, 35 bp, Artificial Sequence
  Synthetic oligonucleotide
aaaggtagcaactactcaggtcatgatctacttgt

SEQ ID NO: 6527 - DNA, 36 bp, Artificial Sequence
  Synthetic oligonucleotide
aagcgtcaacttgcgcgttggtcggaccaggtagga

SEQ ID NO: 6528 - DNA, 36 bp, Artificial Sequence
  Synthetic oligonucleotide
acgttgtgtgatgggcgaaagaaggggttgcctgga

SEQ ID NO: 6529 - DNA, 36 bp, Artificial Sequence
  Synthetic oligonucleotide
agactcccggcacgggataaaccacgcaagtggtta

SEQ ID NO: 6530 - DNA, 38 bp, Artificial Sequence
  Synthetic oligonucleotide
agagcgatacgaaaagtgtattccacaacaccgggtga

SEQ ID NO: 6531 - DNA, 37 bp, Artificial Sequence
  Synthetic oligonucleotide
agttggtacagttcgtgaaaggactagcgtgcctaga

SEQ ID NO: 6532 - DNA, 38 bp, Artificial Sequence
  Synthetic oligonucleotide
atcttctcgagttgacaagcgcgacgagaatcctgtga

SEQ ID NO: 6533 - DNA, 37 bp, Artificial Sequence
  Synthetic oligonucleotide
cacggtcgcccgcaatcgcttcggtcccttgttgtga

SEQ ID NO: 6534 - DNA, 38 bp, Artificial Sequence
  Synthetic oligonucleotide
gactgaggtactgccgacacgttcgattatcaaactga

SEQ ID NO: 6535 - DNA, 37 bp, Artificial Sequence
  Synthetic oligonucleotide
gatcagctcagcacggctggtacacggctgcttgtga

SEQ ID NO: 6536 - DNA, 35 bp, Artificial Sequence
  Synthetic oligonucleotide
tcatcaaccgtacggctacttaatgatgggtaatc

SEQ ID NO: 6537 - DNA, 36 bp, Artificial Sequence
  Synthetic oligonucleotide
tttgctagtgggcctggactcggaatagttaacgaa

SEQ ID NO: 6538 - DNA, 37 bp, Artificial Sequence
  Synthetic oligonucleotide
ccaccgtgcgtcctgtcatcgatctatgagttcttga

SEQ ID NO: 6539 - DNA, 37 bp, Artificial Sequence
  Synthetic oligonucleotide
tatacaacaacgttgatatattacgcccgatcatgga

SEQ ID NO: 6540 - DNA, 35 bp, Artificial Sequence
  Synthetic oligonucleotide
ccgctctactgaacggaactcctgtcaggaactcc

SEQ ID NO: 6541 - DNA, 38 bp, Artificial Sequence
  Synthetic oligonucleotide
gagtgtagctgcctacattccgatgctgattcctgtga

SEQ ID NO: 6542 - DNA, 37 bp, Artificial Sequence
  Synthetic oligonucleotide
gcaactttaagtcttctggacgcgagcgaggtacaga

SEQ ID NO: 6543 - DNA, 38 bp, Artificial Sequence
  Synthetic oligonucleotide
gcagattgacattaccaatgatacgctctaaaccgtga

SEQ ID NO: 6544 - DNA, 37 bp, Artificial Sequence
  Synthetic oligonucleotide
gctgtagtcatatgtagggggaactgatatgtcaaga

SEQ ID NO: 6545 - DNA, 37 bp, Artificial Sequence
  Synthetic oligonucleotide
ggtctaaacaccgagacagacgcctctaggggacaga

SEQ ID NO: 6546 - DNA, 38 bp, Artificial Sequence
  Synthetic oligonucleotide
gtacggcctgccggcgcttttacgttgtagtatattga

SEQ ID NO: 6547 - DNA, 38 bp, Artificial Sequence
  Synthetic oligonucleotide
tccagggaatgtgatgtgttggttaggccgaagattga

SEQ ID NO: 6548 - DNA, 38 bp, Artificial Sequence
  Synthetic oligonucleotide
tgaggcctgccggattggaatcagtttgcgtttggtga

SEQ ID NO: 6549 - DNA, 36 bp, Artificial Sequence
  Synthetic oligonucleotide
gcactaagggataggggattagtgaatttggtttca

SEQ ID NO: 6550 - DNA, 35 bp, Artificial Sequence
  Synthetic oligonucleotide
gcacacgtatcgcacttagtggatatgttagtgca

SEQ ID NO: 6551 - DNA, 35 bp, Artificial Sequence
  Synthetic oligonucleotide
gcattaggccttccgcctcccactgagaatatatg

SEQ ID NO: 6552 - DNA, 37 bp, Artificial Sequence
  Synthetic oligonucleotide
tgacggaaacggggtatgttatcccgaatagtctcga

SEQ ID NO: 6553 - DNA, 38 bp, Artificial Sequence
  Synthetic oligonucleotide
tgctcacgtccgtaattccatgtgagtcctgtctatga

SEQ ID NO: 6554 - DNA, 36 bp, Artificial Sequence
  Synthetic oligonucleotide
ttggcgtgctgcataatgattcaatgttttatcaga

SEQ ID NO: 6555 - DNA, 32 bp, Artificial Sequence
  Synthetic oligonucleotide
aaagtgtttgtcgggcttaagtgagttgttac

SEQ ID NO: 6556 - DNA, 35 bp, Artificial Sequence
  Synthetic oligonucleotide
agggaggttgtagatttgctgtgaccgcttggttt

SEQ ID NO: 6557 - DNA, 35 bp, Artificial Sequence
  Synthetic oligonucleotide
agggggtacgttcagcatatttatctaagtcgacc

SEQ ID NO: 6558 - DNA, 35 bp, Artificial Sequence
  Synthetic oligonucleotide
agtactggagccaaagtatactgggcgacagtggg

SEQ ID NO: 6559 - DNA, 38 bp, Artificial Sequence
  Synthetic oligonucleotide
atcccagtataagacgtggggaatacgtgcggtcatga

SEQ ID NO: 6560 - DNA, 35 bp, Artificial Sequence
  Synthetic oligonucleotide
atccgtttgcagtccgtatatactagccatcaggt

SEQ ID NO: 6561 - DNA, 37 bp, Artificial Sequence
  Synthetic oligonucleotide
atggaagtctgtgactcgcgcaataatcgcggtgtga

SEQ ID NO: 6562 - DNA, 35 bp, Artificial Sequence
  Synthetic oligonucleotide
attttacccgtggagtcacgttaaatgcgacgtgt

SEQ ID NO: 6563 - DNA, 38 bp, Artificial Sequence
  Synthetic oligonucleotide
ctagtaccgagcgacagtttcagggtagtacctgctga

SEQ ID NO: 6564 - DNA, 37 bp, Artificial Sequence
  Synthetic oligonucleotide
gaacggttggcgtttcggcataggtaaatctttgcga

SEQ ID NO: 6565 - DNA, 36 bp, Artificial Sequence
  Synthetic oligonucleotide
gaactgtaagatgggcactgtctacagcagccaaaa

SEQ ID NO: 6566 - DNA, 36 bp, Artificial Sequence
  Synthetic oligonucleotide
gatggcgcataatggtgagagggtcagtaagatcta

SEQ ID NO: 6567 - DNA, 35 bp, Artificial Sequence
  Synthetic oligonucleotide
gcaggaacgaaaaaagtttccgcaggtcacgttac

SEQ ID NO: 6568 - DNA, 36 bp, Artificial Sequence
  Synthetic oligonucleotide
ggggaaggaaagtgtacctgaagagagccggatgga

SEQ ID NO: 6569 - DNA, 35 bp, Artificial Sequence
  Synthetic oligonucleotide
ggtagacagattagctttgccgagcaagtataatt

SEQ ID NO: 6570 - DNA, 35 bp, Artificial Sequence
  Synthetic oligonucleotide
ggttgtaatgacccggagtgaatctctaaacgagc

SEQ ID NO: 6571 - DNA, 37 bp, Artificial Sequence
  Synthetic oligonucleotide
gtacgcccttcacgtcgcgacaggaatgagcgcgtga

SEQ ID NO: 6572 - DNA, 37 bp, Artificial Sequence
  Synthetic oligonucleotide
gtagtcgatgaggattactatcgtgtgttttagctga

SEQ ID NO: 6573 - DNA, 37 bp, Artificial Sequence
  Synthetic oligonucleotide
gtcacgtttatacaagtagtcaaggccgtactagcga

SEQ ID NO: 6574 - DNA, 35 bp, Artificial Sequence
  Synthetic oligonucleotide
gtcggcgtactggacaactgattagcttgttagtg

SEQ ID NO: 6575 - DNA, 35 bp, Artificial Sequence
  Synthetic oligonucleotide
gttaggactgacagcacccagtgaaaaattccagc

SEQ ID NO: 6576 - DNA, 37 bp, Artificial Sequence
  Synthetic oligonucleotide
tactaactatgctgggggtatgtttgtaataatatga

SEQ ID NO: 6577 - DNA, 33 bp, Artificial Sequence
  Synthetic oligonucleotide
taggtcgaactccttacagggcggtttctctga

SEQ ID NO: 6578 - DNA, 38 bp, Artificial Sequence
  Synthetic oligonucleotide
tagtaagctatgctagccgcccgctccacactgcatga

SEQ ID NO: 6579 - DNA, 35 bp, Artificial Sequence
  Synthetic oligonucleotide
tagtattgtagctcggttgcgaatacctctgcaac

SEQ ID NO: 6580 - DNA, 35 bp, Artificial Sequence
  Synthetic oligonucleotide
tagtgacgctccggccctctgtgagatgcctttgt

SEQ ID NO: 6581 - DNA, 36 bp, Artificial Sequence
  Synthetic oligonucleotide
tagttcaatcagcttcgaacgactcatcctaacata

SEQ ID NO: 6582 - DNA, 36 bp, Artificial Sequence
  Synthetic oligonucleotide
tgctgggggacctgggtggattgctgatgtactgta

SEQ ID NO: 6583 - DNA, 37 bp, Artificial Sequence
  Synthetic oligonucleotide
ttatgcgaattgggacggtcaagtgcgatagtccgga

SEQ ID NO: 6584 - DNA, 36 bp, Artificial Sequence
  Synthetic oligonucleotide
aaccgcttcggtcagaacgaaccggtccgtccggga

SEQ ID NO: 6585 - DNA, 35 bp, Artificial Sequence
  Synthetic oligonucleotide
ggaataggatattagcactacttagcggcgaactt

SEQ ID NO: 6586 - DNA, 36 bp, Artificial Sequence
  Synthetic oligonucleotide
gccacgtgctcaacagagttaagcaggatggttcga

SEQ ID NO: 6587 - DNA, 36 bp, Artificial Sequence
  Synthetic oligonucleotide
aacgccctccagtgcagtcagaacgttgaaaatcaa

SEQ ID NO: 6588 - DNA, 38 bp, Artificial Sequence
  Synthetic oligonucleotide
aagcgcaacaagcggttactgtacgaacaacaatgtga

SEQ ID NO: 6589 - DNA, 35 bp, Artificial Sequence
  Synthetic oligonucleotide
aagcggggaacaacaagacgcccaggtctgcgctg

SEQ ID NO: 6590 - DNA, 37 bp, Artificial Sequence
  Synthetic oligonucleotide
aatcccaggttggcttgctcaacgaccacggtcatga

SEQ ID NO: 6591 - DNA, 37 bp, Artificial Sequence
  Synthetic oligonucleotide
accagaacagagtgaacgactgagtccgaggccctga

SEQ ID NO: 6592 - DNA, 38 bp, Artificial Sequence
  Synthetic oligonucleotide
actaaccagtacgctaaggtacggaactaagacagtga

SEQ ID NO: 6593 - DNA, 35 bp, Artificial Sequence
  Synthetic oligonucleotide
agtacctgtgatacgccaatgggtgcgtagtcatg

SEQ ID NO: 6594 - DNA, 35 bp, Artificial Sequence
  Synthetic oligonucleotide
agtgcccagcacgttccgctactccaattgttttg

SEQ ID NO: 6595 - DNA, 36 bp, Artificial Sequence
  Synthetic oligonucleotide
atgacctaggaaagacgtctgtacttcatcgggaaa

SEQ ID NO: 6596 - DNA, 36 bp, Artificial Sequence
  Synthetic oligonucleotide
ccgtcgccggagctagcaggcatgttgttaatgata

SEQ ID NO: 6597 - DNA, 36 bp, Artificial Sequence
  Synthetic oligonucleotide
gaactgactggtaatgtctcccttatccagaacgca

SEQ ID NO: 6598 - DNA, 35 bp, Artificial Sequence
  Synthetic oligonucleotide
gaactgcgaattctacggttattgttgctccaata

SEQ ID NO: 6599 - DNA, 37 bp, Artificial Sequence
  Synthetic oligonucleotide
gcgatcaccagtcaccctaggtaactctaggtgtcca

SEQ ID NO: 6600 - DNA, 34 bp, Artificial Sequence
  Synthetic oligonucleotide
gctgctagtagctgcctccgtcctctataatatc

SEQ ID NO: 6601 - DNA, 38 bp, Artificial Sequence
  Synthetic oligonucleotide
ggatgactagcggctcgccgagcgaggaataggtatga

SEQ ID NO: 6602 - DNA, 37 bp, Artificial Sequence
  Synthetic oligonucleotide
ggtcatgcgggggactaatctggtgtccaccagatga

SEQ ID NO: 6603 - DNA, 37 bp, Artificial Sequence
  Synthetic oligonucleotide
gtcccattgttcgcccccttccagactctaacgcaga

SEQ ID NO: 6604 - DNA, 35 bp, Artificial Sequence
  Synthetic oligonucleotide
gttgcatgtgcaccaaggcacaagtatcagctggg

SEQ ID NO: 6605 - DNA, 36 bp, Artificial Sequence
  Synthetic oligonucleotide
gttttggacaagcgcggtcctgccccgctagtggaa

SEQ ID NO: 6606 - DNA, 38 bp, Artificial Sequence
  Synthetic oligonucleotide
tacagccaggagctgagtctcgcgatctggcattctga

SEQ ID NO: 6607 - DNA, 36 bp, Artificial Sequence
  Synthetic oligonucleotide
tggtcatgtattgtagtatttccgctatatatacta

SEQ ID NO: 6608 - DNA, 38 bp, Artificial Sequence
  Synthetic oligonucleotide
aaagcaagatggccggattctaggtgtcctacttctga

SEQ ID NO: 6609 - DNA, 37 bp, Artificial Sequence
  Synthetic oligonucleotide
aattagagtcgagaagagccagaattaggcgtcccga

SEQ ID NO: 6610 - DNA, 37 bp, Artificial Sequence
  Synthetic oligonucleotide
acgcgcacgccatgtgtggacaattgtacgtctatga

SEQ ID NO: 6611 - DNA, 36 bp, Artificial Sequence
  Synthetic oligonucleotide
cttacgagcagtctacaatatgccaaatgaagacaa

SEQ ID NO: 6612 - DNA, 37 bp, Artificial Sequence
  Synthetic oligonucleotide
gaagcactatgaggcgtcagtcgtgcgatgtctatga

SEQ ID NO: 6613 - DNA, 36 bp, Artificial Sequence
  Synthetic oligonucleotide
gagtgagggtcgaagatcgtaagctcgattagcgta

SEQ ID NO: 6614 - DNA, 36 bp, Artificial Sequence
  Synthetic oligonucleotide
gatgcacctctcggctgtaacgcatcaggcatggca

SEQ ID NO: 6615 - DNA, 36 bp, Artificial Sequence
  Synthetic oligonucleotide
gtacacctaaatcaggcgttacacattcagacccaa

SEQ ID NO: 6616 - DNA, 38 bp, Artificial Sequence
  Synthetic oligonucleotide
gtacagtgcctcattaaagttacgccacgatggtgtga

SEQ ID NO: 6617 - DNA, 35 bp, Artificial Sequence
  Synthetic oligonucleotide
gtacttgtgccaagttctggctaagggcagtattc

SEQ ID NO: 6618 - DNA, 35 bp, Artificial Sequence
  Synthetic oligonucleotide
tcctgagacaaatccattggcgggaaaattccccg

SEQ ID NO: 6619 - DNA, 35 bp, Artificial Sequence
  Synthetic oligonucleotide
tggaagctaacctaggctaggtcgacacaactacg

SEQ ID NO: 6620 - DNA, 35 bp, Artificial Sequence
  Synthetic oligonucleotide
acttgcgtccgaattgcgagtccctgtaggggtat

SEQ ID NO: 6621 - DNA, 35 bp, Artificial Sequence
  Synthetic oligonucleotide
ccgtcattcagtcaattcagggatggacagggtgt

SEQ ID NO: 6622 - DNA, 37 bp, Artificial Sequence
  Synthetic oligonucleotide
gattgcctgttacttaagtaacatacagctatgggga

SEQ ID NO: 6623 - DNA, 35 bp, Artificial Sequence
  Synthetic oligonucleotide
gtctagtaacttacactggtgaggggaatgatagc

SEQ ID NO: 6624 - DNA, 34 bp, Artificial Sequence
  Synthetic oligonucleotide
tgagggtgatagggtgtctaaaagcagttttccc

SEQ ID NO: 6625 - DNA, 36 bp, Artificial Sequence
  Synthetic oligonucleotide
agcactcatgtgaaatatgttctgtagtaccagaaa

SEQ ID NO: 6626 - DNA, 36 bp, Artificial Sequence
  Synthetic oligonucleotide
aggttgataggacgtactcagaagcctcccccctaa

SEQ ID NO: 6627 - DNA, 37 bp, Artificial Sequence
  Synthetic oligonucleotide
cccccatcgtcgaattattgtggaggtgatatataga

SEQ ID NO: 6628 - DNA, 38 bp, Artificial Sequence
  Synthetic oligonucleotide
ggtgtccctcctgcaacacgggcgccgtctcttcctga

SEQ ID NO: 6629 - DNA, 35 bp, Artificial Sequence
  Synthetic oligonucleotide
gcggagacgggccggcatcgagcttatgctgaaaa

SEQ ID NO: 6630 - DNA, 36 bp, Artificial Sequence
  Synthetic oligonucleotide
gttgattaccatcagtcacagtattcagggtatgta

SEQ ID NO: 6631 - DNA, 35 bp, Artificial Sequence
  Synthetic oligonucleotide
tgcgcccttgcggccatgcccattttcttaagcac

SEQ ID NO: 6632 - DNA, 38 bp, Artificial Sequence
  Synthetic oligonucleotide
aaagcttacgtagtgggacttgcgggtgtctggggtga

SEQ ID NO: 6633 - DNA, 37 bp, Artificial Sequence
  Synthetic oligonucleotide
aacgcccccccctttttgcgtctaggtctgggaccga

SEQ ID NO: 6634 - DNA, 35 bp, Artificial Sequence
  Synthetic oligonucleotide
aactacgtcgcaggctgctaagtgattgggtgggt

SEQ ID NO: 6635 - DNA, 37 bp, Artificial Sequence
  Synthetic oligonucleotide
aagcttgcggtacgagacaatacccagactcaagtga

SEQ ID NO: 6636 - DNA, 37 bp, Artificial Sequence
  Synthetic oligonucleotide
acacacggccactggaactctcggcataatgcttgga

SEQ ID NO: 6637 - DNA, 35 bp, Artificial Sequence
  Synthetic oligonucleotide
agaaggctacactcatgagggataacacctcgaac

SEQ ID NO: 6638 - DNA, 35 bp, Artificial Sequence
  Synthetic oligonucleotide
agtacaaactccctggtgcaggagatttttgcgaa

SEQ ID NO: 6639 - DNA, 35 bp, Artificial Sequence
  Synthetic oligonucleotide
agtctggagaatcatgggactggagtaagggttct

SEQ ID NO: 6640 - DNA, 35 bp, Artificial Sequence
  Synthetic oligonucleotide
atgctagaagcttaaaattacgcgaagtgtgtaaa

SEQ ID NO: 6641 - DNA, 38 bp, Artificial Sequence
  Synthetic oligonucleotide
atggaacgaacgtaaggcgttgttagtttgtcatatga

SEQ ID NO: 6642 - DNA, 36 bp, Artificial Sequence
  Synthetic oligonucleotide
attactttacgtctcatttccatactagtgaacgta

SEQ ID NO: 6643 - DNA, 37 bp, Artificial Sequence
  Synthetic oligonucleotide
cacggggggcgctgtcttttgtcgacaaatttgcgga

SEQ ID NO: 6644 - DNA, 37 bp, Artificial Sequence
  Synthetic oligonucleotide
ctactgaagccttcagttgtgctttaaacagattgga

SEQ ID NO: 6645 - DNA, 37 bp, Artificial Sequence
  Synthetic oligonucleotide
gagctgtaatcgattagatagcaacatgggtgcacga

SEQ ID NO: 6646 - DNA, 37 bp, Artificial Sequence
  Synthetic oligonucleotide
gataccttggatgggtgaatgtaggtgtacgagagga

SEQ ID NO: 6647 - DNA, 36 bp, Artificial Sequence
  Synthetic oligonucleotide
gcgctaagtgtactcgaagtttggaccgcattagga

SEQ ID NO: 6648 - DNA, 35 bp, Artificial Sequence
  Synthetic oligonucleotide
ggtgcatatcgcacccggaacaattgcgggaaaat

SEQ ID NO: 6649 - DNA, 37 bp, Artificial Sequence
  Synthetic oligonucleotide
gtatttaagctacaagtacttgtattagagggactga

SEQ ID NO: 6650 - DNA, 37 bp, Artificial Sequence
  Synthetic oligonucleotide
gtcgatcgtaccactcggaacagagcaaacatgggga

SEQ ID NO: 6651 - DNA, 37 bp, Artificial Sequence
  Synthetic oligonucleotide
gttcactacactgggacggacacagtgtggtgccaga

SEQ ID NO: 6652 - DNA, 36 bp, Artificial Sequence
  Synthetic oligonucleotide
gtttggcatgcacgctctatgcaaagtttgattaga

SEQ ID NO: 6653 - DNA, 37 bp, Artificial Sequence
  Synthetic oligonucleotide
taacccaaagggggtgacgacttcttactaagtagga

SEQ ID NO: 6654 - DNA, 36 bp, Artificial Sequence
  Synthetic oligonucleotide
tagggaatccgatcgggcttcctatcgacttatgaa

SEQ ID NO: 6655 - DNA, 36 bp, Artificial Sequence
  Synthetic oligonucleotide
tcctgtggcctcttagaccttcaaaagtagtgctga

SEQ ID NO: 6656 - DNA, 35 bp, Artificial Sequence
  Synthetic oligonucleotide
tcgttgaacagtactgctttcgcgtcatgtgtcga

SEQ ID NO: 6657 - DNA, 38 bp, Artificial Sequence
  Synthetic oligonucleotide
tctccagatggagcgcgttgcgggcgtaatatagttga

SEQ ID NO: 6658 - DNA, 36 bp, Artificial Sequence
  Synthetic oligonucleotide
tggaggaaacgatctggacggatggatgaactgtta

SEQ ID NO: 6659 - DNA, 37 bp, Artificial Sequence
  Synthetic oligonucleotide
tgtacgtggtgcctgagtctatttgtgtttaggcgga

SEQ ID NO: 6660 - DNA, 35 bp, Artificial Sequence
  Synthetic oligonucleotide
ttaacctaagagctcgagcagtggtacacatctcg

SEQ ID NO: 6661 - DNA, 37 bp, Artificial Sequence
  Synthetic oligonucleotide
ttaactgtgtgatctaggaagtatcaagagcgtaaga

SEQ ID NO: 6662 - DNA, 38 bp, Artificial Sequence
  Synthetic oligonucleotide
ttggtgtgcggaatgagctgcgtgggtattattgttga

SEQ ID NO: 6663 - DNA, 38 bp, Artificial Sequence
  Synthetic oligonucleotide
ttgtgagctgtcgcgatttgatatctcatgatcagtga

SEQ ID NO: 6664 - DNA, 37 bp, Artificial Sequence
  Synthetic oligonucleotide
tttgcgcaaccacacgatgtaggtgcaaggtgataga

SEQ ID NO: 6665 - DNA, 37 bp, Artificial Sequence
  Synthetic oligonucleotide
gctaatacttaacgcgcgtactgaaatatggtattga

SEQ ID NO: 6666 - DNA, 38 bp, Artificial Sequence
  Synthetic oligonucleotide
aacggggggggtgctcatctggaatcagcctcgcatga

SEQ ID NO: 6667 - DNA, 37 bp, Artificial Sequence
  Synthetic oligonucleotide
acaggcgtgagttagtgtagtatgagtaaaagtgcga

SEQ ID NO: 6668 - DNA, 38 bp, Artificial Sequence
  Synthetic oligonucleotide
atagccaagttaggagcactgcgcggaggtacgggtga

SEQ ID NO: 6669 - DNA, 37 bp, Artificial Sequence
  Synthetic oligonucleotide
cattaacaaaacagccaaggtaggggggacgggagga

SEQ ID NO: 6670 - DNA, 38 bp, Artificial Sequence
  Synthetic oligonucleotide
cctgctgtttttttagtgcttccattattgccagatga

SEQ ID NO: 6671 - DNA, 38 bp, Artificial Sequence
  Synthetic oligonucleotide
gccgtacgcatcccataggtagggcatgtgatccatga

SEQ ID NO: 6672 - DNA, 35 bp, Artificial Sequence
  Synthetic oligonucleotide
gcgggcttatagccggaggtcgaggtctttgctaa

SEQ ID NO: 6673 - DNA, 38 bp, Artificial Sequence
  Synthetic oligonucleotide
gcgtgactacaggcgggtacccaggatagctattgtga

SEQ ID NO: 6674 - DNA, 36 bp, Artificial Sequence
  Synthetic oligonucleotide
gctcacaggacctagggcattcgctcacccgatgga

SEQ ID NO: 6675 - DNA, 35 bp, Artificial Sequence
  Synthetic oligonucleotide
tcatcgcgtgaggcacttttactaggtgcacaatg

SEQ ID NO: 6676 - DNA, 38 bp, Artificial Sequence
  Synthetic oligonucleotide
tcgaacgaattcagatggcgaaggtgtcgcttagatga

SEQ ID NO: 6677 - DNA, 35 bp, Artificial Sequence
  Synthetic oligonucleotide
tgacggttgcgaaatcggcggaagaaaaggcggtc

SEQ ID NO: 6678 - DNA, 37 bp, Artificial Sequence
  Synthetic oligonucleotide
tgctggaatgacgggagggtcttcgcctgttattgga

SEQ ID NO: 6679 - DNA, 38 bp, Artificial Sequence
  Synthetic oligonucleotide
ttttcgccgtggtttggaccaagctgtttggaaattga

SEQ ID NO: 6680 - DNA, 35 bp, Artificial Sequence
  Synthetic oligonucleotide
cacgtttgcaacctactaagaacgtatgtattcgc

SEQ ID NO: 6681 - DNA, 35 bp, Artificial Sequence
  Synthetic oligonucleotide
catgtggaacgactacggacgctttgtcttcaaac

SEQ ID NO: 6682 - DNA, 35 bp, Artificial Sequence
  Synthetic oligonucleotide
gcttttgctcattgttcgaccggtgtgcattttta

SEQ ID NO: 6683 - DNA, 35 bp, Artificial Sequence
  Synthetic oligonucleotide
ggcctggcggcctaggataatgacgtctgggtgta

SEQ ID NO: 6684 - DNA, 35 bp, Artificial Sequence
  Synthetic oligonucleotide
tgcaaaagagagcaaaaacgctcggcggtgggtct

SEQ ID NO: 6685 - DNA, 35 bp, Artificial Sequence
  Synthetic oligonucleotide
ttgagatgcttcgggaatcatgttgacaatgttag

SEQ ID NO: 6686 - DNA, 36 bp, Artificial Sequence
  Synthetic oligonucleotide
tcgtacaacggtcgcgattcatgttcacatgggtaa

SEQ ID NO: 6687 - DNA, 37 bp, Artificial Sequence
  Synthetic oligonucleotide
aaagtacgagcgagaagaaattgctaggcacggacga

SEQ ID NO: 6688 - DNA, 37 bp, Artificial Sequence
  Synthetic oligonucleotide
gcagttacctgggtctgtagggcctaaaaatttggga

SEQ ID NO: 6689 - DNA, 36 bp, Artificial Sequence
  Synthetic oligonucleotide
tccctggtcactggcgtacaacccatgcgggcccta

SEQ ID NO: 6690 - DNA, 36 bp, Artificial Sequence
  Synthetic oligonucleotide
ttctacgcttctaggagatgttgtttgagggaagta

SEQ ID NO: 6691 - DNA, 35 bp, Artificial Sequence
  Synthetic oligonucleotide
gtcaccatcatggccaactaattgacaactgttgt

SEQ ID NO: 6692 - DNA, 36 bp, Artificial Sequence
  Synthetic oligonucleotide
tatgcatagtccattagacagggggaccgatcctga

SEQ ID NO: 6693 - DNA, 37 bp, Artificial Sequence
  Synthetic oligonucleotide
ggcggtatcatagaaacgtagtttgaaatcgccacga

SEQ ID NO: 6694 - DNA, 36 bp, Artificial Sequence
  Synthetic oligonucleotide
gcagaagtggaaggttgcttcgtgctcggccctata

SEQ ID NO: 6695 - DNA, 35 bp, Artificial Sequence
  Synthetic oligonucleotide
taacgctactatagctgtgatggtttcaagccatc

SEQ ID NO: 6696 - DNA, 38 bp, Artificial Sequence
  Synthetic oligonucleotide
gtgggccgaacattcggctgctgccatgtgactaatga

SEQ ID NO: 6697 - DNA, 37 bp, Artificial Sequence
  Synthetic oligonucleotide
tcatggtggcaagctttagcgacgttttgcgtcggga

SEQ ID NO: 6698 - DNA, 36 bp, Artificial Sequence
  Synthetic oligonucleotide
taccccgtaagatgaacgacgcttgcatggggagga

SEQ ID NO: 6699 - DNA, 38 bp, Artificial Sequence
  Synthetic oligonucleotide
ttccaaatgcatcttgttaggcgcagattagaaaatga

SEQ ID NO: 6700 - DNA, 36 bp, Artificial Sequence
  Synthetic oligonucleotide
agccaatgcagtatgagtttggtcccatcggggaca

SEQ ID NO: 6701 - DNA, 35 bp, Artificial Sequence
  Synthetic oligonucleotide
gacacgagtcataaaggatgtacagttcgtgtgaa

SEQ ID NO: 6702 - DNA, 35 bp, Artificial Sequence
  Synthetic oligonucleotide
ttgatccgtacatgaaggcatctttagttaggtca

SEQ ID NO: 6703 - DNA, 36 bp, Artificial Sequence
  Synthetic oligonucleotide
aaacttgctcatgcatagtgctactaatccccggta

SEQ ID NO: 6704 - DNA, 36 bp, Artificial Sequence
  Synthetic oligonucleotide
aaagacctaagctgcaggtaacgttcagggttgaca

SEQ ID NO: 6705 - DNA, 37 bp, Artificial Sequence
  Synthetic oligonucleotide
aaatcggacagaccactactcgcgaacacaggtacga

SEQ ID NO: 6706 - DNA, 37 bp, Artificial Sequence
  Synthetic oligonucleotide
aacaaggtgccggttaactccgcgatcacagaggcga

SEQ ID NO: 6707 - DNA, 37 bp, Artificial Sequence
  Synthetic oligonucleotide
aacggaacgactgcagacatcgaaggtcacaataaga

SEQ ID NO: 6708 - DNA, 35 bp, Artificial Sequence
  Synthetic oligonucleotide
aacgggctctgcccaggcgggtatgactccacttg

SEQ ID NO: 6709 - DNA, 35 bp, Artificial Sequence
  Synthetic oligonucleotide
aagtaatgacgcactttgcccgggatggtccatac

SEQ ID NO: 6710 - DNA, 36 bp, Artificial Sequence
  Synthetic oligonucleotide
aagtccagtgcgtgcagtaagacacaggcaatcaaa

SEQ ID NO: 6711 - DNA, 37 bp, Artificial Sequence
  Synthetic oligonucleotide
aagtgcaagcagattctttttctaaaagtcaagtcga

SEQ ID NO: 6712 - DNA, 38 bp, Artificial Sequence
  Synthetic oligonucleotide
aatagagcctgtgtggagcttaacgagtaatcatgtga

SEQ ID NO: 6713 - DNA, 35 bp, Artificial Sequence
  Synthetic oligonucleotide
aatgaacattaggggtgaggtagccgaaagttttc

SEQ ID NO: 6714 - DNA, 35 bp, Artificial Sequence
  Synthetic oligonucleotide
aatgccagctgggtcactagacgaactcgagtagc

SEQ ID NO: 6715 - DNA, 33 bp, Artificial Sequence
  Synthetic oligonucleotide
acacaagcataacaactacctatcactctcaga

SEQ ID NO: 6716 - DNA, 37 bp, Artificial Sequence
  Synthetic oligonucleotide
acacatgctcgtactctacccatacggagggctgtga

SEQ ID NO: 6717 - DNA, 35 bp, Artificial Sequence
  Synthetic oligonucleotide
acactgttaagcttacatcctagaagtggacctac

SEQ ID NO: 6718 - DNA, 38 bp, Artificial Sequence
  Synthetic oligonucleotide
accaacttgagaactggccgggacctacgtgggcgtga

SEQ ID NO: 6719 - DNA, 35 bp, Artificial Sequence
  Synthetic oligonucleotide
acccgtttgtacgaaaaagtcatcataggaaccaa

SEQ ID NO: 6720 - DNA, 36 bp, Artificial Sequence
  Synthetic oligonucleotide
accgaaagaccttccgcccgtccacgcaggtatgta

SEQ ID NO: 6721 - DNA, 32 bp, Artificial Sequence
  Synthetic oligonucleotide
acgactaacgggtcattagttggtcgtgggga

SEQ ID NO: 6722 - DNA, 38 bp, Artificial Sequence
  Synthetic oligonucleotide
actaccgcacgctccgaaagccacgctgtatttcctga

SEQ ID NO: 6723 - DNA, 37 bp, Artificial Sequence
  Synthetic oligonucleotide
actgaggcctttctagtgggtttttgtgtgggatgga

SEQ ID NO: 6724 - DNA, 38 bp, Artificial Sequence
  Synthetic oligonucleotide
acttgtaggagattcacgaccgggtcttgcctcgatga

SEQ ID NO: 6725 - DNA, 35 bp, Artificial Sequence
  Synthetic oligonucleotide
agagacatggattgcgtacagtcacattctatcgt

SEQ ID NO: 6726 - DNA, 34 bp, Artificial Sequence
  Synthetic oligonucleotide
agagactggagggaatggtgcatatccggtgtga

SEQ ID NO: 6727 - DNA, 35 bp, Artificial Sequence
  Synthetic oligonucleotide
agagtgcacttaggtgtcgaggacatttttcctgc

SEQ ID NO: 6728 - DNA, 38 bp, Artificial Sequence
  Synthetic oligonucleotide
agccgccgctacggaaggactggaatgagggtctgtga

SEQ ID NO: 6729 - DNA, 38 bp, Artificial Sequence
  Synthetic oligonucleotide
agcctgccctcgtttacttccttgcgtacgaaagttga

SEQ ID NO: 6730 - DNA, 38 bp, Artificial Sequence
  Synthetic oligonucleotide
agtagctaagcgtgctctatccatacagctcaaattga

SEQ ID NO: 6731 - DNA, 36 bp, Artificial Sequence
  Synthetic oligonucleotide
agtccgcgtgtcgcccgaccattaagggtgtcatga

SEQ ID NO: 6732 - DNA, 37 bp, Artificial Sequence
  Synthetic oligonucleotide
agtgaatccggagtggagcggagatcgttcgaataga

SEQ ID NO: 6733 - DNA, 37 bp, Artificial Sequence
  Synthetic oligonucleotide
agtggcaacacttactgcccgaaccacgtgtgggcga

SEQ ID NO: 6734 - DNA, 35 bp, Artificial Sequence
  Synthetic oligonucleotide
agtgggtgtcataagccaaacaggctcgcataagg

SEQ ID NO: 6735 - DNA, 36 bp, Artificial Sequence
  Synthetic oligonucleotide
ataacgacgaatgcacttggaccggtcagtgaaata

SEQ ID NO: 6736 - DNA, 37 bp, Artificial Sequence
  Synthetic oligonucleotide
atagggttggaagtacgaccgcagttgaggcaagaga

SEQ ID NO: 6737 - DNA, 37 bp, Artificial Sequence
  Synthetic oligonucleotide
atcgggtccttacctgagtaaagtcgttcgacaccga

SEQ ID NO: 6738 - DNA, 38 bp, Artificial Sequence
  Synthetic oligonucleotide
atctacttgctgcggtgacgtcgtgagggggtctatga

SEQ ID NO: 6739 - DNA, 38 bp, Artificial Sequence
  Synthetic oligonucleotide
atgatcacgtggtaatggtgatgagactgtaggagtga

SEQ ID NO: 6740 - DNA, 38 bp, Artificial Sequence
  Synthetic oligonucleotide
atgcaccggagtaaacgtgtgttcggggtccatactga

SEQ ID NO: 6741 - DNA, 35 bp, Artificial Sequence
  Synthetic oligonucleotide
atgcacgactcgcggagacggttctagggcgtata

SEQ ID NO: 6742 - DNA, 37 bp, Artificial Sequence
  Synthetic oligonucleotide
atgggggcttggggcgccgaagaagtttgtgtcgcga

SEQ ID NO: 6743 - DNA, 37 bp, Artificial Sequence
  Synthetic oligonucleotide
attacaggatggctattctgtcactgcgttagaatga

SEQ ID NO: 6744 - DNA, 34 bp, Artificial Sequence
  Synthetic oligonucleotide
cacataggcttagagcaatgttttagggggggta

SEQ ID NO: 6745 - DNA, 38 bp, Artificial Sequence
  Synthetic oligonucleotide
cactagccaggtcttcgacgatcacgttcaactgctga

SEQ ID NO: 6746 - DNA, 36 bp, Artificial Sequence
  Synthetic oligonucleotide
catggacgcacctgcaccaattacattcaagagcga

SEQ ID NO: 6747 - DNA, 36 bp, Artificial Sequence
  Synthetic oligonucleotide
catggttgggataggaaaggggcgtttcctgataaa

SEQ ID NO: 6748 - DNA, 37 bp, Artificial Sequence
  Synthetic oligonucleotide
cccagaaccggagttggtttacgcgtaaacactgcga

SEQ ID NO: 6749 - DNA, 35 bp, Artificial Sequence
  Synthetic oligonucleotide
ccgggcacggacgggctcataggggtaggtaatgg

SEQ ID NO: 6750 - DNA, 36 bp, Artificial Sequence
  Synthetic oligonucleotide
cgagcgccccatggcacgcctgaggtccggtacgca

SEQ ID NO: 6751 - DNA, 36 bp, Artificial Sequence
  Synthetic oligonucleotide
ctaacaacattggagtagcttcattagatggccgta

SEQ ID NO: 6752 - DNA, 36 bp, Artificial Sequence
  Synthetic oligonucleotide
gaaccgtcaagggggctactttgcatagtctttcta

SEQ ID NO: 6753 - DNA, 38 bp, Artificial Sequence
  Synthetic oligonucleotide
gaactgagatatgctttggtcactcgggttccatatga

SEQ ID NO: 6754 - DNA, 37 bp, Artificial Sequence
  Synthetic oligonucleotide
gaagcacctctgtgcactcattggagtgttggtcgga

SEQ ID NO: 6755 - DNA, 36 bp, Artificial Sequence
  Synthetic oligonucleotide
gaagcattacagtgttcagcacatgcttagcatgca

SEQ ID NO: 6756 - DNA, 35 bp, Artificial Sequence
  Synthetic oligonucleotide
gaatcaggcacttacagttgtggatactgtacggg

SEQ ID NO: 6757 - DNA, 35 bp, Artificial Sequence
  Synthetic oligonucleotide
gacgtggacgtcacctaatgcgtatggtttattga

SEQ ID NO: 6758 - DNA, 37 bp, Artificial Sequence
  Synthetic oligonucleotide
gactccggaccgcagtcttaggtgatttcaatgagga

SEQ ID NO: 6759 - DNA, 36 bp, Artificial Sequence
  Synthetic oligonucleotide
gagattgctaggtgcgtcatcctgctacaacgccga

SEQ ID NO: 6760 - DNA, 36 bp, Artificial Sequence
  Synthetic oligonucleotide
gagtcaaccgcatgagctagtgttgtaaatcttgga

SEQ ID NO: 6761 - DNA, 37 bp, Artificial Sequence
  Synthetic oligonucleotide
gagtctgacattaacggtagacggtaagtctcggaga

SEQ ID NO: 6762 - DNA, 35 bp, Artificial Sequence
  Synthetic oligonucleotide
gagtggggttttcaaagtctccgaattgtagggta

SEQ ID NO: 6763 - DNA, 36 bp, Artificial Sequence
  Synthetic oligonucleotide
gatgctgaagggttcgcgtttattaaaagacgtcca

SEQ ID NO: 6764 - DNA, 35 bp, Artificial Sequence
  Synthetic oligonucleotide
gattcgatcacacctgtagtggtcgggctatatcc

SEQ ID NO: 6765 - DNA, 35 bp, Artificial Sequence
  Synthetic oligonucleotide
gcatcagaaccctggcctgataagtactagtagtg

SEQ ID NO: 6766 - DNA, 38 bp, Artificial Sequence
  Synthetic oligonucleotide
gccagtaacaaaatggacgacggtacaggctcatctga

SEQ ID NO: 6767 - DNA, 38 bp, Artificial Sequence
  Synthetic oligonucleotide
gcctccaccgcgcgaaattacgaaccatgcaatgctga

SEQ ID NO: 6768 - DNA, 35 bp, Artificial Sequence
  Synthetic oligonucleotide
gccttcggatccactaggttttgtgttggttggta

SEQ ID NO: 6769 - DNA, 35 bp, Artificial Sequence
  Synthetic oligonucleotide
gcgactcgacgcgtaaggagtagcgaagaccttag

SEQ ID NO: 6770 - DNA, 37 bp, Artificial Sequence
  Synthetic oligonucleotide
gcgatactgagtatctgtgatgattcttttgcaatga

SEQ ID NO: 6771 - DNA, 35 bp, Artificial Sequence
  Synthetic oligonucleotide
gcgatcttttcggataagctcgataattgcttagg

SEQ ID NO: 6772 - DNA, 38 bp, Artificial Sequence
  Synthetic oligonucleotide
gcgcccttgtgatcgggcatagtgcggcctctggctga

SEQ ID NO: 6773 - DNA, 35 bp, Artificial Sequence
  Synthetic oligonucleotide
ggacgctttgcgacatggccctagggtgttgcgct

SEQ ID NO: 6774 - DNA, 37 bp, Artificial Sequence
  Synthetic oligonucleotide
ggatccggtgtggttctcggcttgtaggctgacggga

SEQ ID NO: 6775 - DNA, 35 bp, Artificial Sequence
  Synthetic oligonucleotide
gggatcagacgtgctcgctcccctgaattcaaggt

SEQ ID NO: 6776 - DNA, 35 bp, Artificial Sequence
  Synthetic oligonucleotide
gggctatcgtccaataattagccgaaattgttagg

SEQ ID NO: 6777 - DNA, 38 bp, Artificial Sequence
  Synthetic oligonucleotide
gggtggccacttacctcaataggggtgtgattctttga

SEQ ID NO: 6778 - DNA, 37 bp, Artificial Sequence
  Synthetic oligonucleotide
ggtcgccaacggaactttactaggctgagcccttgga

SEQ ID NO: 6779 - DNA, 35 bp, Artificial Sequence
  Synthetic oligonucleotide
gtacggtatttggtctacctcagtcttcatagagc

SEQ ID NO: 6780 - DNA, 37 bp, Artificial Sequence
  Synthetic oligonucleotide
gtacttgcgcaaccctagtctaacggagcaatccgga

SEQ ID NO: 6781 - DNA, 38 bp, Artificial Sequence
  Synthetic oligonucleotide
gtagaggtagaaaacccgatgttgaccacccagactga

SEQ ID NO: 6782 - DNA, 35 bp, Artificial Sequence
  Synthetic oligonucleotide
gtattggatcttggcccaatagtacttgggccctc

SEQ ID NO: 6783 - DNA, 35 bp, Artificial Sequence
  Synthetic oligonucleotide
gtcacgttctgttgctgggcaaagggtacgactta

SEQ ID NO: 6784 - DNA, 38 bp, Artificial Sequence
  Synthetic oligonucleotide
gtccactctgaatagagcctatagcgggaaatgcgtga

SEQ ID NO: 6785 - DNA, 37 bp, Artificial Sequence
  Synthetic oligonucleotide
gtcgccatatttcgtaatgagcgtaacgttgagcgga

SEQ ID NO: 6786 - DNA, 35 bp, Artificial Sequence
  Synthetic oligonucleotide
gtgaatccgtacttagcctaaaacggcttattaga

SEQ ID NO: 6787 - DNA, 38 bp, Artificial Sequence
  Synthetic oligonucleotide
gtgagcctgcacggtcatcaaatatacggcccccttga

SEQ ID NO: 6788 - DNA, 35 bp, Artificial Sequence
  Synthetic oligonucleotide
gtgggacgggacgaatattttcgtctatatggtgc

SEQ ID NO: 6789 - DNA, 37 bp, Artificial Sequence
  Synthetic oligonucleotide
gtgtcctgacagatcatggttatttcagcgtgagtga

SEQ ID NO: 6790 - DNA, 35 bp, Artificial Sequence
  Synthetic oligonucleotide
gttacatgccaaagcgacactagaatgtcggattt

SEQ ID NO: 6791 - DNA, 38 bp, Artificial Sequence
  Synthetic oligonucleotide
taagctctctagtttagctgtactcaagtcattattga

SEQ ID NO: 6792 - DNA, 38 bp, Artificial Sequence
  Synthetic oligonucleotide
taagggatggggcgtgccaggctacggaaacgtcctga

SEQ ID NO: 6793 - DNA, 37 bp, Artificial Sequence
  Synthetic oligonucleotide
taaggtgtgcgtttttcatagtcgggtacagaagtga

SEQ ID NO: 6794 - DNA, 36 bp, Artificial Sequence
  Synthetic oligonucleotide
taccgggtgtagaattactttgttatgtagggaaaa

SEQ ID NO: 6795 - DNA, 38 bp, Artificial Sequence
  Synthetic oligonucleotide
tacttgacaacttttagtttacgccttgcaggaggtga

SEQ ID NO: 6796 - DNA, 35 bp, Artificial Sequence
  Synthetic oligonucleotide
tagtgtaataggttgtcccgtagtgagtgcaaagt

SEQ ID NO: 6797 - DNA, 37 bp, Artificial Sequence
  Synthetic oligonucleotide
tatatgccgtcatggcgatggtatgaatgttaataga

SEQ ID NO: 6798 - DNA, 37 bp, Artificial Sequence
  Synthetic oligonucleotide
tatgctaagattgacgtgcaacagtgcccgagggaga

SEQ ID NO: 6799 - DNA, 36 bp, Artificial Sequence
  Synthetic oligonucleotide
tatggaaagaggattgtgtatacaccacgcccgtga

SEQ ID NO: 6800 - DNA, 36 bp, Artificial Sequence
  Synthetic oligonucleotide
tcatgtagagtgcgtctaccctaggacaaataggga

SEQ ID NO: 6801 - DNA, 38 bp, Artificial Sequence
  Synthetic oligonucleotide
tccagtgttgcgcttagcatgatttcgacagaccctga

SEQ ID NO: 6802 - DNA, 37 bp, Artificial Sequence
  Synthetic oligonucleotide
tcttcgggacactgcaatcgtgggggcgttatagtga

SEQ ID NO: 6803 - DNA, 38 bp, Artificial Sequence
  Synthetic oligonucleotide
tgagattcaggaatctaccccgcattgccgcaagatga

SEQ ID NO: 6804 - DNA, 35 bp, Artificial Sequence
  Synthetic oligonucleotide
tgcaagacaacggagttataaagcaattttcgcga

SEQ ID NO: 6805 - DNA, 36 bp, Artificial Sequence
  Synthetic oligonucleotide
tggatacctgcaggtgcgatacgtgcgtggtgctaa

SEQ ID NO: 6806 - DNA, 36 bp, Artificial Sequence
  Synthetic oligonucleotide
tggattgccaattcattcaggtcatgggttccctta

SEQ ID NO: 6807 - DNA, 35 bp, Artificial Sequence
  Synthetic oligonucleotide
tggtggaccggtcctcccgcgtaaaatgtccgtca

SEQ ID NO: 6808 - DNA, 36 bp, Artificial Sequence
  Synthetic oligonucleotide
tgtaggttaattcttacttcgtttgcacgtggccaa

SEQ ID NO: 6809 - DNA, 35 bp, Artificial Sequence
  Synthetic oligonucleotide
tgtttggtgcgagctttgatctatcttacaggcat

SEQ ID NO: 6810 - DNA, 36 bp, Artificial Sequence
  Synthetic oligonucleotide
tgttttgcgcacccctaggcgtgtgttataatgtca

SEQ ID NO: 6811 - DNA, 33 bp, Artificial Sequence
  Synthetic oligonucleotide
ttaagccacgtactatggagatgttgagcccga

SEQ ID NO: 6812 - DNA, 38 bp, Artificial Sequence
  Synthetic oligonucleotide
ttacaaccatgcgaatatggtattttcagcttttttga

SEQ ID NO: 6813 - DNA, 36 bp, Artificial Sequence
  Synthetic oligonucleotide
ttaggcataaccgcaggaaggaattggctcctttta

SEQ ID NO: 6814 - DNA, 36 bp, Artificial Sequence
  Synthetic oligonucleotide
ttaggcgcagagaatcgtgctaaagccggatccgta

SEQ ID NO: 6815 - DNA, 36 bp, Artificial Sequence
  Synthetic oligonucleotide
ttagtcgtttcgatcggacattctcatggtagccca

SEQ ID NO: 6816 - DNA, 38 bp, Artificial Sequence
  Synthetic oligonucleotide
ttatcagtactgcacggatggttttaaaggtccagtga

SEQ ID NO: 6817 - DNA, 35 bp, Artificial Sequence
  Synthetic oligonucleotide
ttatgaatacacgggtccttgcgactcgcgaaaag

SEQ ID NO: 6818 - DNA, 37 bp, Artificial Sequence
  Synthetic oligonucleotide
ttccaccactcaggtaccgaaaacgggactgccggga

SEQ ID NO: 6819 - DNA, 35 bp, Artificial Sequence
  Synthetic oligonucleotide
ttcgcgatcgacaaatagttggggtccctgcgaga

SEQ ID NO: 6820 - DNA, 35 bp, Artificial Sequence
  Synthetic oligonucleotide
ttcgtagtacagatatttttaggctgtacgggcgc

SEQ ID NO: 6821 - DNA, 36 bp, Artificial Sequence
  Synthetic oligonucleotide
ttgagctcaggtatgtagccaagatattgagatgaa

SEQ ID NO: 6822 - DNA, 38 bp, Artificial Sequence
  Synthetic oligonucleotide
ttgcatgggagtctcttgacaggcacgctgacgcttga

SEQ ID NO: 6823 - DNA, 36 bp, Artificial Sequence
  Synthetic oligonucleotide
ttgcggtagagtacaaaggtgctactatactgacca

SEQ ID NO: 6824 - DNA, 35 bp, Artificial Sequence
  Synthetic oligonucleotide
ttgctaggggccggcgcataactagcggatgactc

SEQ ID NO: 6825 - DNA, 36 bp, Artificial Sequence
  Synthetic oligonucleotide
ttggcctgtacataaagtgaaccgggtaggtaatga

SEQ ID NO: 6826 - DNA, 38 bp, Artificial Sequence
  Synthetic oligonucleotide
ttggtaagagcgggcggtttttaattgtcttgcgatga

SEQ ID NO: 6827 - DNA, 36 bp, Artificial Sequence
  Synthetic oligonucleotide
agccgcgcaaggtcactggtgcgtggtctcggaaca

SEQ ID NO: 6828 - DNA, 35 bp, Artificial Sequence
  Synthetic oligonucleotide
tttggggtacactgcagctacttccgaatccagga

SEQ ID NO: 6829 - DNA, 36 bp, Artificial Sequence
  Synthetic oligonucleotide
aagtgcagtcttcgggtttttttggtgataaggtca

SEQ ID NO: 6830 - DNA, 35 bp, Artificial Sequence
  Synthetic oligonucleotide
agacatggctatacgcacgttcaaagcggggagta

SEQ ID NO: 6831 - DNA, 37 bp, Artificial Sequence
  Synthetic oligonucleotide
aactcgtgtggtgcgggttacgtcacgttgagggcga

SEQ ID NO: 6832 - DNA, 35 bp, Artificial Sequence
  Synthetic oligonucleotide
gtgttggaccaataacggttggatgttaaggtgcc

SEQ ID NO: 6833 - DNA, 37 bp, Artificial Sequence
  Synthetic oligonucleotide
acgcaactgcagtacatgttgattaaaccgtcattga

SEQ ID NO: 6834 - DNA, 36 bp, Artificial Sequence
  Synthetic oligonucleotide
cagtcatttcggggtacaaatgtgaagcatgctata

SEQ ID NO: 6835 - DNA, 37 bp, Artificial Sequence
  Synthetic oligonucleotide
taccgcggatgggctttgaagtacgcgggttaacgga

SEQ ID NO: 6836 - DNA, 35 bp, Artificial Sequence
  Synthetic oligonucleotide
gttactgcggtgtccttcttgaaaaacagctacgt

SEQ ID NO: 6837 - DNA, 37 bp, Artificial Sequence
  Synthetic oligonucleotide
ccagacacgcatcgtggatcacgtacgcggtgagcta

SEQ ID NO: 6838 - DNA, 37 bp, Artificial Sequence
  Synthetic oligonucleotide
gagtacttaataggtccgaacggctacattggttaga

SEQ ID NO: 6839 - DNA, 38 bp, Artificial Sequence
  Synthetic oligonucleotide
taatgtaccaagttgggcaaggggggcgctacgattga

SEQ ID NO: 6840 - DNA, 37 bp, Artificial Sequence
  Synthetic oligonucleotide
tccgtactaatatcgtacatacggctacagtcctgga

SEQ ID NO: 6841 - DNA, 35 bp, Artificial Sequence
  Synthetic oligonucleotide
tggtaagcaatgaaggttgcttcaaacagtttagt

SEQ ID NO: 6842 - DNA, 35 bp, Artificial Sequence
  Synthetic oligonucleotide
atagtgaactcacggacccgttttgattgcaagtc

SEQ ID NO: 6843 - DNA, 38 bp, Artificial Sequence
  Synthetic oligonucleotide
acactccccaagttaggccagtcgaacggtaacggtga

SEQ ID NO: 6844 - DNA, 35 bp, Artificial Sequence
  Synthetic oligonucleotide
cacccgccgtgacgttttcggtgacaacagtaagg

SEQ ID NO: 6845 - DNA, 38 bp, Artificial Sequence
  Synthetic oligonucleotide
gatttcacacccaatgtacactgccatgatccccgtga

SEQ ID NO: 6846 - DNA, 38 bp, Artificial Sequence
  Synthetic oligonucleotide
gtggtcgccacgaatactatcaaagtgaagaccactga

SEQ ID NO: 6847 - DNA, 37 bp, Artificial Sequence
  Synthetic oligonucleotide
ttgggcctcaccaggaagctgccaggcactggttcga

SEQ ID NO: 6848 - DNA, 38 bp, Artificial Sequence
  Synthetic oligonucleotide
ttttcacagcacttcgcgggtcatgtatgttgcattga

SEQ ID NO: 6849 - DNA, 36 bp, Artificial Sequence
  Synthetic oligonucleotide
aatggatacgcagggataggcgacacgcacgtgcta

SEQ ID NO: 6850 - DNA, 37 bp, Artificial Sequence
  Synthetic oligonucleotide
aggacaaatgctagcttacctgtcgacggtcctgcga

SEQ ID NO: 6851 - DNA, 37 bp, Artificial Sequence
  Synthetic oligonucleotide
atatccgggtcgtaatacacgtgcagttatcttgcga

SEQ ID NO: 6852 - DNA, 35 bp, Artificial Sequence
  Synthetic oligonucleotide
atccatgagtgggacactgtcctaggtcatgagcg

SEQ ID NO: 6853 - DNA, 36 bp, Artificial Sequence
  Synthetic oligonucleotide
gataggtgatatccgttaaaactgcaaactgtgtga

SEQ ID NO: 6854 - DNA, 37 bp, Artificial Sequence
  Synthetic oligonucleotide
gattaggtcttgcaatagatactgggcgtctgggaga

SEQ ID NO: 6855 - DNA, 35 bp, Artificial Sequence
  Synthetic oligonucleotide
gccgcggacctcggtgtcatctgggaggctagagc

SEQ ID NO: 6856 - DNA, 35 bp, Artificial Sequence
  Synthetic oligonucleotide
gtcgtgagtgtgggggaactcaagcagtcaattgt

SEQ ID NO: 6857 - DNA, 38 bp, Artificial Sequence
  Synthetic oligonucleotide
gtgtcaaacgctgtgcctttgtgcgcgaccagacatga

SEQ ID NO: 6858 - DNA, 38 bp, Artificial Sequence
  Synthetic oligonucleotide
tagtgacatggaacgggccctcctttggatcgaactga

SEQ ID NO: 6859 - DNA, 35 bp, Artificial Sequence
  Synthetic oligonucleotide
tcggtgacggccggaacggtccactgatttatcca

SEQ ID NO: 6860 - DNA, 35 bp, Artificial Sequence
  Synthetic oligonucleotide
tcgtgcatctgtgaagtattgctgtttcctgcttc

SEQ ID NO: 6861 - DNA, 37 bp, Artificial Sequence
  Synthetic oligonucleotide
tctaagagtgccgaaggtaagtgggtaatgtatgttg

SEQ ID NO: 6862 - DNA, 37 bp, Artificial Sequence
  Synthetic oligonucleotide
tgtgtcatgtactactggcaatcatagtacgatagga

SEQ ID NO: 6863 - DNA, 38 bp, Artificial Sequence
  Synthetic oligonucleotide
ttagggcctcgttaggctttcacgcttagattgtctga

SEQ ID NO: 6864 - DNA, 38 bp, Artificial Sequence
  Synthetic oligonucleotide
aacacgggacatcgtgggagaagcacgagggctcctga

SEQ ID NO: 6865 - DNA, 36 bp, Artificial Sequence
  Synthetic oligonucleotide
acagcgacctgtcgcctcatagcgtttctacagcta

SEQ ID NO: 6866 - DNA, 36 bp, Artificial Sequence
  Synthetic oligonucleotide
agtcgccgacctgtcgtgatatggtaactggtgtta

SEQ ID NO: 6867 - DNA, 38 bp, Artificial Sequence
  Synthetic oligonucleotide
atgactggattggaatggagcttcgagcagtagtttga

SEQ ID NO: 6868 - DNA, 38 bp, Artificial Sequence
  Synthetic oligonucleotide
atttctagtagtagacgacactggacatagctgagtga

SEQ ID NO: 6869 - DNA, 37 bp, Artificial Sequence
  Synthetic oligonucleotide
ccactcccagtaatgctgtgacgataacgaatctaga

SEQ ID NO: 6870 - DNA, 36 bp, Artificial Sequence
  Synthetic oligonucleotide
ctcccggagacgctctttgctgttggagcacaggta

SEQ ID NO: 6871 - DNA, 35 bp, Artificial Sequence
  Synthetic oligonucleotide
ctctagccactttctgtggccttgacttcttagta

SEQ ID NO: 6872 - DNA, 37 bp, Artificial Sequence
  Synthetic oligonucleotide
gatcgaagtgattcacgtctgctggattcttctcaga

SEQ ID NO: 6873 - DNA, 35 bp, Artificial Sequence
  Synthetic oligonucleotide
gcataggatatcccgacggtggagtccgccgtatg

SEQ ID NO: 6874 - DNA, 38 bp, Artificial Sequence
  Synthetic oligonucleotide
gcgaatgtcccgccagatagtcgctggttacaatgtga

SEQ ID NO: 6875 - DNA, 35 bp, Artificial Sequence
  Synthetic oligonucleotide
gcgccatggggttattctcgacactctcccgcccc

SEQ ID NO: 6876 - DNA, 35 bp, Artificial Sequence
  Synthetic oligonucleotide
gcggagtactgagttacttacactcgaacactgga

SEQ ID NO: 6877 - DNA, 35 bp, Artificial Sequence
  Synthetic oligonucleotide
gcgtctaactggttaccgcgataactaggtgaagg

SEQ ID NO: 6878 - DNA, 38 bp, Artificial Sequence
  Synthetic oligonucleotide
ggaagtcgcattttctgatttccccgcactttggatga

SEQ ID NO: 6879 - DNA, 38 bp, Artificial Sequence
  Synthetic oligonucleotide
ggagtcggcgacgttgatagggcgcactctattcctga

SEQ ID NO: 6880 - DNA, 38 bp, Artificial Sequence
  Synthetic oligonucleotide
ggataggagttcaactggcttccgttggtcgcccgtga

SEQ ID NO: 6881 - DNA, 38 bp, Artificial Sequence
  Synthetic oligonucleotide
ggcgaggtcgttagatcataaacgatggaaagctgtga

SEQ ID NO: 6882 - DNA, 37 bp, Artificial Sequence
  Synthetic oligonucleotide
ggctgatacccagcctagggatattgtagctgcacga

SEQ ID NO: 6883 - DNA, 38 bp, Artificial Sequence
  Synthetic oligonucleotide
gggtaaagggcctgtagcagtcagctaatggctattga

SEQ ID NO: 6884 - DNA, 36 bp, Artificial Sequence
  Synthetic oligonucleotide
ggtcctaagcctggttgtggggttcataacacttta

SEQ ID NO: 6885 - DNA, 36 bp, Artificial Sequence
  Synthetic oligonucleotide
gtcacagggctaggaacggtttcttggtcgtaccga

SEQ ID NO: 6886 - DNA, 35 bp, Artificial Sequence
  Synthetic oligonucleotide
gtcatattagatcctacgtatgaggggtatattta

SEQ ID NO: 6887 - DNA, 38 bp, Artificial Sequence
  Synthetic oligonucleotide
gtctcccctgatgcaccacatcaaagaaagggttttga

SEQ ID NO: 6888 - DNA, 35 bp, Artificial Sequence
  Synthetic oligonucleotide
gtctgggactggagcccatttgggcgtagtccatg

SEQ ID NO: 6889 - DNA, 37 bp, Artificial Sequence
  Synthetic oligonucleotide
gtcttggagcacgtggtgcggcctaatgtggtaggga

SEQ ID NO: 6890 - DNA, 37 bp, Artificial Sequence
  Synthetic oligonucleotide
gtggtggaactttgatgagagttaagaccattgtcga

SEQ ID NO: 6891 - DNA, 36 bp, Artificial Sequence
  Synthetic oligonucleotide
gtttagttgaggtcccgcggcgaatcctggggccaa

SEQ ID NO: 6892 - DNA, 37 bp, Artificial Sequence
  Synthetic oligonucleotide
taaatgccctgcttaagaactctcaactaatctgcga

SEQ ID NO: 6893 - DNA, 36 bp, Artificial Sequence
  Synthetic oligonucleotide
tactaagtagccatcccgtcagtaacgtgctgcaga

SEQ ID NO: 6894 - DNA, 35 bp, Artificial Sequence
  Synthetic oligonucleotide
tagctagacgcggaggttcgagcgtatggctagta

SEQ ID NO: 6895 - DNA, 36 bp, Artificial Sequence
  Synthetic oligonucleotide
tagtctcaaatccgatagtcatgcggggatcaaata

SEQ ID NO: 6896 - DNA, 37 bp, Artificial Sequence
  Synthetic oligonucleotide
tcaccggactctttcgcttatgttagtgctcgctaga

SEQ ID NO: 6897 - DNA, 38 bp, Artificial Sequence
  Synthetic oligonucleotide
tcccaccgatctgcgggtcactaatgtcgtgttcgtga

SEQ ID NO: 6898 - DNA, 36 bp, Artificial Sequence
  Synthetic oligonucleotide
tgagtcaactcgagtgtcaatttgtgctcccatcca

SEQ ID NO: 6899 - DNA, 37 bp, Artificial Sequence
  Synthetic oligonucleotide
ttacgagtgggttgatgtttctaacaaacggtagtga

SEQ ID NO: 6900 - DNA, 37 bp, Artificial Sequence
  Synthetic oligonucleotide
tttgaagtgactaccgtggtagaaatagaagccgcga

SEQ ID NO: 6901 - DNA, 37 bp, Artificial Sequence
  Synthetic oligonucleotide
tttgtcacaaagtcgccggatttgtgacagatagaga

SEQ ID NO: 6902 - DNA, 37 bp, Artificial Sequence
  Synthetic oligonucleotide
ggtagggcgacgaaatatggcaatgttacgattacga

SEQ ID NO: 6903 - DNA, 35 bp, Artificial Sequence
  Synthetic oligonucleotide
tcagcaagctcatgtttttgaggttgtacgtgacg

SEQ ID NO: 6904 - DNA, 37 bp, Artificial Sequence
  Synthetic oligonucleotide
tcatgggccaggtatgcatcgcattgtgagatagaga

SEQ ID NO: 6905 - DNA, 35 bp, Artificial Sequence
  Synthetic oligonucleotide
tctgtacaaccgcgtgagctcttttacagctcatc

SEQ ID NO: 6906 - DNA, 36 bp, Artificial Sequence
  Synthetic oligonucleotide
agttacatctgttgtcgtaattatcgggctaagcca

SEQ ID NO: 6907 - DNA, 36 bp, Artificial Sequence
  Synthetic oligonucleotide
gggtgggatcctgaccacgtctagccactcgtgata

SEQ ID NO: 6908 - DNA, 35 bp, Artificial Sequence
  Synthetic oligonucleotide
actgtgcgtaggacgagagcgtacggctggcattc

SEQ ID NO: 6909 - DNA, 37 bp, Artificial Sequence
  Synthetic oligonucleotide
agtctgagaagcttacatcgatccctggaaagatgga

SEQ ID NO: 6910 - DNA, 35 bp, Artificial Sequence
  Synthetic oligonucleotide
agtatgcgcgagttcgggttctcttagcacgcggt

SEQ ID NO: 6911 - DNA, 37 bp, Artificial Sequence
  Synthetic oligonucleotide
tgagacaagtagcgtgtatcacgataggtctctagga

SEQ ID NO: 6912 - DNA, 38 bp, Artificial Sequence
  Synthetic oligonucleotide
acgtgggttctggggtgtacacaatgcatcttacctga

SEQ ID NO: 6913 - DNA, 37 bp, Artificial Sequence
  Synthetic oligonucleotide
actgccaccgacctggtccgcagtcctttgaatgtga

SEQ ID NO: 6914 - DNA, 38 bp, Artificial Sequence
  Synthetic oligonucleotide
agaagtgacaatggaatctatcgggattggagcaatga

SEQ ID NO: 6915 - DNA, 35 bp, Artificial Sequence
  Synthetic oligonucleotide
aggagaacgtacgggttggcgcagtcctttagcga

SEQ ID NO: 6916 - DNA, 38 bp, Artificial Sequence
  Synthetic oligonucleotide
agttctcaaccgactcgaacctcagcactgtgtcatga

SEQ ID NO: 6917 - DNA, 35 bp, Artificial Sequence
  Synthetic oligonucleotide
ctgctgagaaatgcaaactaacattgtagtagcct

SEQ ID NO: 6918 - DNA, 37 bp, Artificial Sequence
  Synthetic oligonucleotide
gcacggtgctggctgttacgtacataggtgtaggaga

SEQ ID NO: 6919 - DNA, 35 bp, Artificial Sequence
  Synthetic oligonucleotide
tgaccccgcccgatattttttcccttctcgtcgta

SEQ ID NO: 6920 - DNA, 35 bp, Artificial Sequence
  Synthetic oligonucleotide
aacacgtttgtctgagtagatagtacctgtagacg

SEQ ID NO: 6921 - DNA, 37 bp, Artificial Sequence
  Synthetic oligonucleotide
aacattcatccgtattgtccactccatcttggcgtga

SEQ ID NO: 6922 - DNA, 37 bp, Artificial Sequence
  Synthetic oligonucleotide
gcatgcaaagccaaaggcaataggtgttagggttgga

SEQ ID NO: 6923 - DNA, 38 bp, Artificial Sequence
  Synthetic oligonucleotide
gccacgcttggtcacgttagataggaattatgtaatga

SEQ ID NO: 6924 - DNA, 36 bp, Artificial Sequence
  Synthetic oligonucleotide
tattcatgcactgggtcgggcttgttgtacccacaa

SEQ ID NO: 6925 - DNA, 37 bp, Artificial Sequence
  Synthetic oligonucleotide
tcatatctgggttggaatctgtccactcgcgaacaga

SEQ ID NO: 6926 - DNA, 33 bp, Artificial Sequence
  Synthetic oligonucleotide
tgaacgtgtttcagggtagggataatctaaaga

SEQ ID NO: 6927 - DNA, 36 bp, Artificial Sequence
  Synthetic oligonucleotide
ttcgcgccaggagcggggagctgcatgagtcattaa

SEQ ID NO: 6928 - DNA, 37 bp, Artificial Sequence
  Synthetic oligonucleotide
tttggagaactacagtatcggtatgggcatcaaccga

SEQ ID NO: 6929 - DNA, 35 bp, Artificial Sequence
  Synthetic oligonucleotide
gcgtgggaacacctcgatttcagcagacatgggat

SEQ ID NO: 6930 - DNA, 36 bp, Artificial Sequence
  Synthetic oligonucleotide
gtacgaccgattcagccggagcatgttagggtcaca

SEQ ID NO: 6931 - DNA, 36 bp, Artificial Sequence
  Synthetic oligonucleotide
aagcactcataccatgaagacagcctaggctgtcaa

SEQ ID NO: 6932 - DNA, 37 bp, Artificial Sequence
  Synthetic oligonucleotide
aagcaacgtgaaatagcggaacgcgtgtccgagccga

SEQ ID NO: 6933 - DNA, 37 bp, Artificial Sequence
  Synthetic oligonucleotide
acaatgtaggttaaaatcgacttgtggtttgtttgga

SEQ ID NO: 6934 - DNA, 37 bp, Artificial Sequence
  Synthetic oligonucleotide
agattggctaggtaatgcacaagctggaaagaaacga

SEQ ID NO: 6935 - DNA, 36 bp, Artificial Sequence
  Synthetic oligonucleotide
agccaacagagttaagctcttttggtcactcaacta

SEQ ID NO: 6936 - DNA, 37 bp, Artificial Sequence
  Synthetic oligonucleotide
agccatgtcgacgtcgcgacgtcgtatctaatgttga

SEQ ID NO: 6937 - DNA, 38 bp, Artificial Sequence
  Synthetic oligonucleotide
atgcgaactgaccacgtaacgtataaactggaaggtga

SEQ ID NO: 6938 - DNA, 36 bp, Artificial Sequence
  Synthetic oligonucleotide
caaagaggaaggtgatgtcgcccgaattgtcgagga

SEQ ID NO: 6939 - DNA, 38 bp, Artificial Sequence
  Synthetic oligonucleotide
ccgggcgacggacgtcctggctggagtccggtacttga

SEQ ID NO: 6940 - DNA, 38 bp, Artificial Sequence
  Synthetic oligonucleotide
gaacatgtaagagagcgaacggggtaataagtgtttga

SEQ ID NO: 6941 - DNA, 35 bp, Artificial Sequence
  Synthetic oligonucleotide
gattcaagcgatctggctgccctcacgccctagta

SEQ ID NO: 6942 - DNA, 35 bp, Artificial Sequence
  Synthetic oligonucleotide
gcatgtatgtcatcgctatttgtggcttatctttt

SEQ ID NO: 6943 - DNA, 36 bp, Artificial Sequence
  Synthetic oligonucleotide
gcgatgaaatctgtgaatatagtacgatttgctgta

SEQ ID NO: 6944 - DNA, 35 bp, Artificial Sequence
  Synthetic oligonucleotide
gcggggtaacgcgcgtagtgcgggagaagtttagg

SEQ ID NO: 6945 - DNA, 35 bp, Artificial Sequence
  Synthetic oligonucleotide
gcgtgtcatgtatgggccgtgtaacggatttcgtc

SEQ ID NO: 6946 - DNA, 37 bp, Artificial Sequence
  Synthetic oligonucleotide
gggacatctgaccatgctgctagggacttgcatcaga

SEQ ID NO: 6947 - DNA, 35 bp, Artificial Sequence
  Synthetic oligonucleotide
ggttcggcgtatttgtagcccggtagaacttcgta

SEQ ID NO: 6948 - DNA, 38 bp, Artificial Sequence
  Synthetic oligonucleotide
gtgtttgcatctgtacaaagtattggagagaaatctga

SEQ ID NO: 6949 - DNA, 38 bp, Artificial Sequence
  Synthetic oligonucleotide
taagtgagcgcatgtaattacattgtgatcatatgtga

SEQ ID NO: 6950 - DNA, 38 bp, Artificial Sequence
  Synthetic oligonucleotide
taccgccgtacaagtacaaaggtacttcgctgtgatga

SEQ ID NO: 6951 - DNA, 35 bp, Artificial Sequence
  Synthetic oligonucleotide
tactgcgaacgctgggcatgcatgaacttgagacg

SEQ ID NO: 6952 - DNA, 37 bp, Artificial Sequence
  Synthetic oligonucleotide
tatacagtctcgggcatggcatcgcctcgaaggggga

SEQ ID NO: 6953 - DNA, 38 bp, Artificial Sequence
  Synthetic oligonucleotide
tcagacaagcgtgttttggggcatattatgagggatga

SEQ ID NO: 6954 - DNA, 37 bp, Artificial Sequence
  Synthetic oligonucleotide
tcatggcaaagtacatatcacggacgcagttcgaaga

SEQ ID NO: 6955 - DNA, 35 bp, Artificial Sequence
  Synthetic oligonucleotide
tgccgaaggcgaaaaatgttagtatcaacgtacgg

SEQ ID NO: 6956 - DNA, 37 bp, Artificial Sequence
  Synthetic oligonucleotide
tgtacaggtactttaacgaagatatgatgtagggtga

SEQ ID NO: 6957 - DNA, 38 bp, Artificial Sequence
  Synthetic oligonucleotide
tgtatactgcgaatcaggcgtaacggcgacctttgtga

SEQ ID NO: 6958 - DNA, 35 bp, Artificial Sequence
  Synthetic oligonucleotide
ttgtacgcacaggaagaggcgatttataccgacgt

SEQ ID NO: 6959 - DNA, 32 bp, Artificial Sequence
  Synthetic oligonucleotide
ttttagcccccgggccagtcagggaacggtga

SEQ ID NO: 6960 - DNA, 36 bp, Artificial Sequence
  Synthetic oligonucleotide
aaggtcgaaacgtcccgcgaccggcaccgactcgta

SEQ ID NO: 6961 - DNA, 36 bp, Artificial Sequence
  Synthetic oligonucleotide
attgagcggttacgagtgcaagggaggtatcactga

SEQ ID NO: 6962 - DNA, 36 bp, Artificial Sequence
  Synthetic oligonucleotide
gtccgtgtacgcccaggaaacatagcaggcatggta

SEQ ID NO: 6963 - DNA, 37 bp, Artificial Sequence
  Synthetic oligonucleotide
aatacgagacatcgcagtatatgcgcgcgtgggaaga

SEQ ID NO: 6964 - DNA, 36 bp, Artificial Sequence
  Synthetic oligonucleotide
acagtacagtggatttatttgtgtagggtgctgcta

SEQ ID NO: 6965 - DNA, 35 bp, Artificial Sequence
  Synthetic oligonucleotide
accaagctagtttactacctacgtatgttagcgtg

SEQ ID NO: 6966 - DNA, 37 bp, Artificial Sequence
  Synthetic oligonucleotide
accagggagggtacagcttgcatttgaactaagggga

SEQ ID NO: 6967 - DNA, 36 bp, Artificial Sequence
  Synthetic oligonucleotide
acccttctaaaaggcacccatggatacgacatggga

SEQ ID NO: 6968 - DNA, 36 bp, Artificial Sequence
  Synthetic oligonucleotide
agaaatacgtagtgagcagggaagcccggttgcaca

SEQ ID NO: 6969 - DNA, 37 bp, Artificial Sequence
  Synthetic oligonucleotide
agacctagtgtcgtacaggcattgggcgttacccgga

SEQ ID NO: 6970 - DNA, 37 bp, Artificial Sequence
  Synthetic oligonucleotide
agagggtactcctggctgtgtaaccctaagtcactga

SEQ ID NO: 6971 - DNA, 36 bp, Artificial Sequence
  Synthetic oligonucleotide
aggtgcccgctatgggttcggtgaaggtgcgtacta

SEQ ID NO: 6972 - DNA, 38 bp, Artificial Sequence
  Synthetic oligonucleotide
agtccggacgcgaggataacgtgactggccgtgcttga

SEQ ID NO: 6973 - DNA, 35 bp, Artificial Sequence
  Synthetic oligonucleotide
agtgcgaatgctagtaaatatataccatgccatgg

SEQ ID NO: 6974 - DNA, 38 bp, Artificial Sequence
  Synthetic oligonucleotide
atggagaggtagggttggcgtatctgccgttggtttga

SEQ ID NO: 6975 - DNA, 37 bp, Artificial Sequence
  Synthetic oligonucleotide
atggcgacgcaaatacagcgcatggactatacggaga

SEQ ID NO: 6976 - DNA, 36 bp, Artificial Sequence
  Synthetic oligonucleotide
atgggcgacgggggaagctaggggcctgtgacttta

SEQ ID NO: 6977 - DNA, 36 bp, Artificial Sequence
  Synthetic oligonucleotide
atggtgcactgggtttggggacgcgttatttctgga

SEQ ID NO: 6978 - DNA, 36 bp, Artificial Sequence
  Synthetic oligonucleotide
attaagtttaaatcagagtatgttggagtcatttga

SEQ ID NO: 6979 - DNA, 35 bp, Artificial Sequence
  Synthetic oligonucleotide
ccatcggttgcagagagcgacaaggtgccccttcc

SEQ ID NO: 6980 - DNA, 36 bp, Artificial Sequence
  Synthetic oligonucleotide
cctgttagattcttacctccggcacttacgggtgga

SEQ ID NO: 6981 - DNA, 37 bp, Artificial Sequence
  Synthetic oligonucleotide
cgaccgcttacggacggcccccccgcgttgatcgaga

SEQ ID NO: 6982 - DNA, 37 bp, Artificial Sequence
  Synthetic oligonucleotide
cgttgcgcgacgtctggtcataaacttaatggaggga

SEQ ID NO: 6983 - DNA, 35 bp, Artificial Sequence
  Synthetic oligonucleotide
gaagtctcagcagtatgtcattgctcaattaccgc

SEQ ID NO: 6984 - DNA, 36 bp, Artificial Sequence
  Synthetic oligonucleotide
gaattgcgttaatcgcaaacgattagtgcctcagca

SEQ ID NO: 6985 - DNA, 37 bp, Artificial Sequence
  Synthetic oligonucleotide
gagagttgaccgcaactccgaagttcctgcgtggcga

SEQ ID NO: 6986 - DNA, 35 bp, Artificial Sequence
  Synthetic oligonucleotide
gcatctttggccagatgcgtctgggacatatgcgt

SEQ ID NO: 6987 - DNA, 35 bp, Artificial Sequence
  Synthetic oligonucleotide
gccatcgaactatttatcgttctaatcacggacgt

SEQ ID NO: 6988 - DNA, 35 bp, Artificial Sequence
  Synthetic oligonucleotide
gcgaagcgtggatgcagatttaaacgaagcaatct

SEQ ID NO: 6989 - DNA, 35 bp, Artificial Sequence
  Synthetic oligonucleotide
gcggtccatcctgtcatcagattggctcagttggc

SEQ ID NO: 6990 - DNA, 37 bp, Artificial Sequence
  Synthetic oligonucleotide
gctgaccgacattcctaagagtgaagtacatgtgcga

SEQ ID NO: 6991 - DNA, 36 bp, Artificial Sequence
  Synthetic oligonucleotide
gctggacaatgtaagggtgtgacgcatcctccagga

SEQ ID NO: 6992 - DNA, 35 bp, Artificial Sequence
  Synthetic oligonucleotide
gctggtccctcggtaagagcttacttataggactc

SEQ ID NO: 6993 - DNA, 37 bp, Artificial Sequence
  Synthetic oligonucleotide
gctttggatggaagaaaattccgagtgcaagttaaga

SEQ ID NO: 6994 - DNA, 36 bp, Artificial Sequence
  Synthetic oligonucleotide
ggatcttcaggtcttgtggttgagaaataagtagga

SEQ ID NO: 6995 - DNA, 38 bp, Artificial Sequence
  Synthetic oligonucleotide
gggggacgtaccagatatagtttaatatcaatgtgtga

SEQ ID NO: 6996 - DNA, 35 bp, Artificial Sequence
  Synthetic oligonucleotide
ggtctacgtgcgccccggtcacatctcaccgttgg

SEQ ID NO: 6997 - DNA, 35 bp, Artificial Sequence
  Synthetic oligonucleotide
gtaaagcattcttgagttgaagtggagatgccgat

SEQ ID NO: 6998 - DNA, 36 bp, Artificial Sequence
  Synthetic oligonucleotide
gtacgccaggtatttctggaccgtccgtgacctaca

SEQ ID NO: 6999 - DNA, 37 bp, Artificial Sequence
  Synthetic oligonucleotide
gtaggggccggttgaaaacagtcaccaaacttcgcga

SEQ ID NO: 7000 - DNA, 36 bp, Artificial Sequence
  Synthetic oligonucleotide
gtatgaaagacacaatcgcagtctaagatgttgata

SEQ ID NO: 7001 - DNA, 34 bp, Artificial Sequence
  Synthetic oligonucleotide
gtcagagagcccgaatcatggagatctagggtga

SEQ ID NO: 7002 - DNA, 38 bp, Artificial Sequence
  Synthetic oligonucleotide
gtcgagcaagattgggcttagaatggttagcaaactga

SEQ ID NO: 7003 - DNA, 38 bp, Artificial Sequence
  Synthetic oligonucleotide
gttacgcgttgaggactgggggaagtgtgttgctgtga

SEQ ID NO: 7004 - DNA, 37 bp, Artificial Sequence
  Synthetic oligonucleotide
gttcttcaatatgggatggtgattcgactgggctgga

SEQ ID NO: 7005 - DNA, 37 bp, Artificial Sequence
  Synthetic oligonucleotide
gttgatcataacacccgcgctcaagggaggaaaggga

SEQ ID NO: 7006 - DNA, 38 bp, Artificial Sequence
  Synthetic oligonucleotide
gtttaaagtcacagatggatacgggtagaagttattga

SEQ ID NO: 7007 - DNA, 35 bp, Artificial Sequence
  Synthetic oligonucleotide
taacacaatactggacatttgtgcatttactgtga

SEQ ID NO: 7008 - DNA, 36 bp, Artificial Sequence
  Synthetic oligonucleotide
tagaactaggcggctttgtatgattaggtgctttca

SEQ ID NO: 7009 - DNA, 35 bp, Artificial Sequence
  Synthetic oligonucleotide
tagccaggtcgcaccatacgcccgaaatcgcactg

SEQ ID NO: 7010 - DNA, 37 bp, Artificial Sequence
  Synthetic oligonucleotide
tagtcttggacgacgcaattgcaggaaccgcatgaga

SEQ ID NO: 7011 - DNA, 38 bp, Artificial Sequence
  Synthetic oligonucleotide
tatcgcggtggacaattttggtgggagaacggacttga

SEQ ID NO: 7012 - DNA, 36 bp, Artificial Sequence
  Synthetic oligonucleotide
tcaaacaggctgcctgcatagtgctgcaatcatgta

SEQ ID NO: 7013 - DNA, 38 bp, Artificial Sequence
  Synthetic oligonucleotide
tcaagaaatgttagcgaccagatggaaaattcttgtga

SEQ ID NO: 7014 - DNA, 36 bp, Artificial Sequence
  Synthetic oligonucleotide
tcatgtacgccagcaggtatcaaccaacctcacgca

SEQ ID NO: 7015 - DNA, 35 bp, Artificial Sequence
  Synthetic oligonucleotide
tcccaaatattctgaagttcccatcgacagtccga

SEQ ID NO: 7016 - DNA, 35 bp, Artificial Sequence
  Synthetic oligonucleotide
tcgcaggtggttaaataaaacaaggtaccttgggt

SEQ ID NO: 7017 - DNA, 36 bp, Artificial Sequence
  Synthetic oligonucleotide
tcggtgcatcgtttatggtgttcaaccgcatctgca

SEQ ID NO: 7018 - DNA, 37 bp, Artificial Sequence
  Synthetic oligonucleotide
tggcaattgcccatctactttgcatcggttatggaga

SEQ ID NO: 7019 - DNA, 37 bp, Artificial Sequence
  Synthetic oligonucleotide
tggggtggcaaacccatcgcacctgccggtttcgaga

SEQ ID NO: 7020 - DNA, 37 bp, Artificial Sequence
  Synthetic oligonucleotide
tgttgctcacggaaaaacttggcatggaatctaaaga

SEQ ID NO: 7021 - DNA, 35 bp, Artificial Sequence
  Synthetic oligonucleotide
ttaagagtggtgtaaatggtgttaaatgggcaaaa

SEQ ID NO: 7022 - DNA, 36 bp, Artificial Sequence
  Synthetic oligonucleotide
ttatctcgctaatttgttgcgggaattcagtaagga

SEQ ID NO: 7023 - DNA, 35 bp, Artificial Sequence
  Synthetic oligonucleotide
ttcatctgactccctgagtcttcactaagcccagc

SEQ ID NO: 7024 - DNA, 37 bp, Artificial Sequence
  Synthetic oligonucleotide
ttgatcaccgaagcacctctggttcgaggtgtggtga

SEQ ID NO: 7025 - DNA, 38 bp, Artificial Sequence
  Synthetic oligonucleotide
ttgcgacaccatggttattaggatagcaacacgcttga

SEQ ID NO: 7026 - DNA, 35 bp, Artificial Sequence
  Synthetic oligonucleotide
ttttaggctcaaaagcctggcatgttcacgcttaa

SEQ ID NO: 7027 - DNA, 37 bp, Artificial Sequence
  Synthetic oligonucleotide
gccgacccctctatttgtctgctagggtagcagctga

SEQ ID NO: 7028 - DNA, 36 bp, Artificial Sequence
  Synthetic oligonucleotide
tccgccgtccacgtgtcgttagcggtggaacgtcaa

SEQ ID NO: 7029 - DNA, 35 bp, Artificial Sequence
  Synthetic oligonucleotide
agacataactctacttgcgtctgttcagcaccccc

SEQ ID NO: 7030 - DNA, 36 bp, Artificial Sequence
  Synthetic oligonucleotide
agttccgagtcatagtgtggagtgcttcgccagata

SEQ ID NO: 7031 - DNA, 35 bp, Artificial Sequence
  Synthetic oligonucleotide
atacagcatgaagtcaagcggggggatgggacaat

SEQ ID NO: 7032 - DNA, 37 bp, Artificial Sequence
  Synthetic oligonucleotide
gagtgtaccagctacaagcaattgcgatatgtcaaga

SEQ ID NO: 7033 - DNA, 35 bp, Artificial Sequence
  Synthetic oligonucleotide
ggttgcaaaatacgcggtttaacttgcaggcatgc

SEQ ID NO: 7034 - DNA, 35 bp, Artificial Sequence
  Synthetic oligonucleotide
ggttgctccctagcgacggggcggcccgggacggc

SEQ ID NO: 7035 - DNA, 35 bp, Artificial Sequence
  Synthetic oligonucleotide
gtcttagcgagtgagcacattcgcatactagtctt

SEQ ID NO: 7036 - DNA, 37 bp, Artificial Sequence
  Synthetic oligonucleotide
tatcaggccggggaacaaaagcaaggctatgagttca

SEQ ID NO: 7037 - DNA, 35 bp, Artificial Sequence
  Synthetic oligonucleotide
ccacgaccctcgacctacgtgtgtagttacgctag

SEQ ID NO: 7038 - DNA, 37 bp, Artificial Sequence
  Synthetic oligonucleotide
gatgtaaatcttggccgcagacattatgtagggtcga

SEQ ID NO: 7039 - DNA, 35 bp, Artificial Sequence
  Synthetic oligonucleotide
aaggcgcttacatggagagagtgcgtcgttgggct

SEQ ID NO: 7040 - DNA, 37 bp, Artificial Sequence
  Synthetic oligonucleotide
accgcgggcaaagcaggatgcaggagggttggccaga

SEQ ID NO: 7041 - DNA, 36 bp, Artificial Sequence
  Synthetic oligonucleotide
agcgcgtgttccacgcgtaacatagggaagtctata

SEQ ID NO: 7042 - DNA, 38 bp, Artificial Sequence
  Synthetic oligonucleotide
atgatctgtccttgggaagttctatttgtccagggtga

SEQ ID NO: 7043 - DNA, 35 bp, Artificial Sequence
  Synthetic oligonucleotide
attgtcctgtaaaaagagaagatcggggttcagct

SEQ ID NO: 7044 - DNA, 35 bp, Artificial Sequence
  Synthetic oligonucleotide
gaacggacctagtctcaacagtttaacgggtcgac

SEQ ID NO: 7045 - DNA, 35 bp, Artificial Sequence
  Synthetic oligonucleotide
gacaattgagcggattggcggaacattgggtggag

SEQ ID NO: 7046 - DNA, 36 bp, Artificial Sequence
  Synthetic oligonucleotide
gacgcgacggtgtcaattatcagtgtaaggcattga

SEQ ID NO: 7047 - DNA, 35 bp, Artificial Sequence
  Synthetic oligonucleotide
gcaagagcggtgtgctggagcgaaagcaaccaaac

SEQ ID NO: 7048 - DNA, 37 bp, Artificial Sequence
  Synthetic oligonucleotide
gcattaggcacgttgtagaggtggattaattgaatga

SEQ ID NO: 7049 - DNA, 35 bp, Artificial Sequence
  Synthetic oligonucleotide
gggtacgtacctaatctattttcagtctcactgga

SEQ ID NO: 7050 - DNA, 38 bp, Artificial Sequence
  Synthetic oligonucleotide
gtccgtcgatctttcctacgtgtaatgtgttgtaatga

SEQ ID NO: 7051 - DNA, 36 bp, Artificial Sequence
  Synthetic oligonucleotide
gtgaaccaggtacatgcagttgtgacgaggactata

SEQ ID NO: 7052 - DNA, 35 bp, Artificial Sequence
  Synthetic oligonucleotide
gtgtaggcggtctaagtaatgatcgacgtatcgac

SEQ ID NO: 7053 - DNA, 35 bp, Artificial Sequence
  Synthetic oligonucleotide
taaggtgttggccaacggactgggggattttgcgt

SEQ ID NO: 7054 - DNA, 37 bp, Artificial Sequence
  Synthetic oligonucleotide
tagcgggctggaagatcgcatgtcctaatggaataga

SEQ ID NO: 7055 - DNA, 36 bp, Artificial Sequence
  Synthetic oligonucleotide
tcatatgtctgtggacacatttagtaggaactagga

SEQ ID NO: 7056 - DNA, 35 bp, Artificial Sequence
  Synthetic oligonucleotide
tcttcaggagtcggtcaatgtcaacagacctggga

SEQ ID NO: 7057 - DNA, 38 bp, Artificial Sequence
  Synthetic oligonucleotide
tgaggactgcccatcaattggtcacagagtggtgttga

SEQ ID NO: 7058 - DNA, 37 bp, Artificial Sequence
  Synthetic oligonucleotide
tgctcgcacagatccgttctagaattgttgcaatcga

SEQ ID NO: 7059 - DNA, 37 bp, Artificial Sequence
  Synthetic oligonucleotide
gatacgggtcatcaagtgagtcgatgcaacaaggcga

SEQ ID NO: 7060 - DNA, 35 bp, Artificial Sequence
  Synthetic oligonucleotide
gtactgcatggcgtgtagtaaggagacggtggcaa

SEQ ID NO: 7061 - DNA, 36 bp, Artificial Sequence
  Synthetic oligonucleotide
gccagccctcactggcacgaccgcgtatgatagata

SEQ ID NO: 7062 - DNA, 37 bp, Artificial Sequence
  Synthetic oligonucleotide
gcgacgaacagtctatgagtcaagttgccgagaatga

SEQ ID NO: 7063 - DNA, 37 bp, Artificial Sequence
  Synthetic oligonucleotide
tcatggaggttacgtgcttcagatgatctttaggaga

SEQ ID NO: 7064 - DNA, 35 bp, Artificial Sequence
  Synthetic oligonucleotide
aaacgggacattagaaaaggttcggcgttctcagc

SEQ ID NO: 7065 - DNA, 37 bp, Artificial Sequence
  Synthetic oligonucleotide
agaacatgaagacatagtatgggtattggtacgtaga

SEQ ID NO: 7066 - DNA, 37 bp, Artificial Sequence
  Synthetic oligonucleotide
agctgttaagcgtttgaaggaaggatgttagtcggga

SEQ ID NO: 7067 - DNA, 38 bp, Artificial Sequence
  Synthetic oligonucleotide
aggttttggaccaagcttgtagttcacgctgatgttga

SEQ ID NO: 7068 - DNA, 37 bp, Artificial Sequence
  Synthetic oligonucleotide
atcaagccggggaccacgcgctagtacgctttgcgga

SEQ ID NO: 7069 - DNA, 35 bp, Artificial Sequence
  Synthetic oligonucleotide
atttgcagtctgataggaacaaagtgttgggctgg

SEQ ID NO: 7070 - DNA, 35 bp, Artificial Sequence
  Synthetic oligonucleotide
cacgggacagtgactaactgtgcgaaacaaggagc

SEQ ID NO: 7071 - DNA, 35 bp, Artificial Sequence
  Synthetic oligonucleotide
gaatgtatcatattcctttcagacaagtcgcgacg

SEQ ID NO: 7072 - DNA, 37 bp, Artificial Sequence
  Synthetic oligonucleotide
gacttccgattcgcatgtcctgtaacgacttcagcga

SEQ ID NO: 7073 - DNA, 38 bp, Artificial Sequence
  Synthetic oligonucleotide
gcagtgcgtcgatgacgggttatcgtacacatgcatga

SEQ ID NO: 7074 - DNA, 37 bp, Artificial Sequence
  Synthetic oligonucleotide
gccacaagggttgtctattagtatcggccctctggga

SEQ ID NO: 7075 - DNA, 38 bp, Artificial Sequence
  Synthetic oligonucleotide
gccatacaatggtaggagcgggattccagagcgggtga

SEQ ID NO: 7076 - DNA, 35 bp, Artificial Sequence
  Synthetic oligonucleotide
gccatgcaggtgagcgctaataagcttggtgcgag

SEQ ID NO: 7077 - DNA, 33 bp, Artificial Sequence
  Synthetic oligonucleotide
gcccacctctcaggcgggactaaagcctcatgc

SEQ ID NO: 7078 - DNA, 35 bp, Artificial Sequence
  Synthetic oligonucleotide
tccttgttgtcgagtaatgcaccgcatctgatgga

SEQ ID NO: 7079 - DNA, 35 bp, Artificial Sequence
  Synthetic oligonucleotide
tgagcatgcaaacggtggctaggttacattataca

SEQ ID NO: 7080 - DNA, 35 bp, Artificial Sequence
  Synthetic oligonucleotide
ttagatagagtcttatggtcactgtcactggatcc

SEQ ID NO: 7081 - DNA, 38 bp, Artificial Sequence
  Synthetic oligonucleotide
tttagcccagaaattgggattatgaaggacgtacatga

SEQ ID NO: 7082 - DNA, 37 bp, Artificial Sequence
  Synthetic oligonucleotide
aaaccgtagtgaagctttatggtaacggctcggggga

SEQ ID NO: 7083 - DNA, 35 bp, Artificial Sequence
  Synthetic oligonucleotide
acttgctaagcgtgacgaaggaccatcgtcaacat

SEQ ID NO: 7084 - DNA, 36 bp, Artificial Sequence
  Synthetic oligonucleotide
agagaacatcctgtgcgttgttcacggtcgctggga

SEQ ID NO: 7085 - DNA, 36 bp, Artificial Sequence
  Synthetic oligonucleotide
agtagcaagcatatttacctgcgcctacgttctata

SEQ ID NO: 7086 - DNA, 36 bp, Artificial Sequence
  Synthetic oligonucleotide
atctgactggggtggatgaaccttataaacatcgta

SEQ ID NO: 7087 - DNA, 38 bp, Artificial Sequence
  Synthetic oligonucleotide
gacacggagttatctgcgaagacatctgaaagcgttga

SEQ ID NO: 7088 - DNA, 38 bp, Artificial Sequence
  Synthetic oligonucleotide
aaccgtcggtatgtacaacagatttgaatatggaggga

SEQ ID NO: 7089 - DNA, 38 bp, Artificial Sequence
  Synthetic oligonucleotide
aacgttcgggtctgtgtgttgagctaatcgcaggatga

SEQ ID NO: 7090 - DNA, 35 bp, Artificial Sequence
  Synthetic oligonucleotide
aacttgcggaggatagttccggttgcatcaccata

SEQ ID NO: 7091 - DNA, 35 bp, Artificial Sequence
  Synthetic oligonucleotide
actaacatgttccgaaggcgtaaggagttcaggta

SEQ ID NO: 7092 - DNA, 36 bp, Artificial Sequence
  Synthetic oligonucleotide
actagatttgacggatggtgagtagtaacagcagta

SEQ ID NO: 7093 - DNA, 35 bp, Artificial Sequence
  Synthetic oligonucleotide
actcgtacaccctgtatatgagtctttctctgaag

SEQ ID NO: 7094 - DNA, 36 bp, Artificial Sequence
  Synthetic oligonucleotide
actggcgacaaggcaattaaagcttgtttcctgtta

SEQ ID NO: 7095 - DNA, 36 bp, Artificial Sequence
  Synthetic oligonucleotide
acttaactaggtgatgtgagcttgcgctcatcgcga

SEQ ID NO: 7096 - DNA, 35 bp, Artificial Sequence
  Synthetic oligonucleotide
agagtgaacgcccagtgtggaatttcgcgtaaacg

SEQ ID NO: 7097 - DNA, 36 bp, Artificial Sequence
  Synthetic oligonucleotide
agcgataggcgaacgtcactacctggtgggaggcta

SEQ ID NO: 7098 - DNA, 38 bp, Artificial Sequence
  Synthetic oligonucleotide
agttaagcaagttcagttccttgcgtatctacagttga

SEQ ID NO: 7099 - DNA, 36 bp, Artificial Sequence
  Synthetic oligonucleotide
atgacaggtaggtcatcgttgacgtaatgatccgaa

SEQ ID NO: 7100 - DNA, 36 bp, Artificial Sequence
  Synthetic oligonucleotide
ccgcaccagggggcctgccacttgagttgagcggtg

SEQ ID NO: 7101 - DNA, 35 bp, Artificial Sequence
  Synthetic oligonucleotide
cgctgcatacagcgacataacgataggcgtgcgct

SEQ ID NO: 7102 - DNA, 35 bp, Artificial Sequence
  Synthetic oligonucleotide
ctcagagccaacaatgagaccatcagtactcaggt

SEQ ID NO: 7103 - DNA, 38 bp, Artificial Sequence
  Synthetic oligonucleotide
gaaagcttctagatggccttagacttcatgtttcctga

SEQ ID NO: 7104 - DNA, 38 bp, Artificial Sequence
  Synthetic oligonucleotide
gagaatggttcgcggcgaggatcgcgctttaattgtga

SEQ ID NO: 7105 - DNA, 35 bp, Artificial Sequence
  Synthetic oligonucleotide
gataagttgctttccgaacttaaagcgatgcccgc

SEQ ID NO: 7106 - DNA, 38 bp, Artificial Sequence
  Synthetic oligonucleotide
gattcccacgatgagacgcgctggggtaatgcttatga

SEQ ID NO: 7107 - DNA, 35 bp, Artificial Sequence
  Synthetic oligonucleotide
gggcatcaggtttccaagtattggtggtataagct

SEQ ID NO: 7108 - DNA, 37 bp, Artificial Sequence
  Synthetic oligonucleotide
ggggttaacgtggtcgtttggtcttggagtaacttga

SEQ ID NO: 7109 - DNA, 36 bp, Artificial Sequence
  Synthetic oligonucleotide
ggttaagtcttgggttgtgtgtgggcctttagttaa

SEQ ID NO: 7110 - DNA, 38 bp, Artificial Sequence
  Synthetic oligonucleotide
gtaacaatccaattgctcaggaactggaaattcattga

SEQ ID NO: 7111 - DNA, 35 bp, Artificial Sequence
  Synthetic oligonucleotide
gtgatcacatcacacggccttgtaggtagggactc

SEQ ID NO: 7112 - DNA, 35 bp, Artificial Sequence
  Synthetic oligonucleotide
gttgcacgaaatctttcgacacgttgttgggatgg

SEQ ID NO: 7113 - DNA, 38 bp, Artificial Sequence
  Synthetic oligonucleotide
gttggctctgtttgcggcaaacataggcgagggggtga

SEQ ID NO: 7114 - DNA, 35 bp, Artificial Sequence
  Synthetic oligonucleotide
tactgtgcgataccatgttcatgattgaactgttg

SEQ ID NO: 7115 - DNA, 36 bp, Artificial Sequence
  Synthetic oligonucleotide
tacttagtaacgctgcaggatgtattgatgaccgga

SEQ ID NO: 7116 - DNA, 35 bp, Artificial Sequence
  Synthetic oligonucleotide
tatcgagcgaattttgccatatgtaatgcctacta

SEQ ID NO: 7117 - DNA, 36 bp, Artificial Sequence
  Synthetic oligonucleotide
tgagaagcttatctcctttcgttagggctgagccga

SEQ ID NO: 7118 - DNA, 38 bp, Artificial Sequence
  Synthetic oligonucleotide
tgtactaattgtggtctaaaaacgtgcttcgttattga

SEQ ID NO: 7119 - DNA, 38 bp, Artificial Sequence
  Synthetic oligonucleotide
tgtcagtaagaatgttgagcttcgggtgcgcccgatga

SEQ ID NO: 7120 - DNA, 37 bp, Artificial Sequence
  Synthetic oligonucleotide
ttaccgagaaagcggtgggcgtgcatggacgtgagga

SEQ ID NO: 7121 - DNA, 36 bp, Artificial Sequence
  Synthetic oligonucleotide
ttccaccgcgtacaatatcctaaaaaaatccgtcga

SEQ ID NO: 7122 - DNA, 38 bp, Artificial Sequence
  Synthetic oligonucleotide
ttcgtttcatcgcggaaccggtggtgtcgaaggcttga

SEQ ID NO: 7123 - DNA, 36 bp, Artificial Sequence
  Synthetic oligonucleotide
ttctgtcggggtacttattgatctgcgagtaactca

SEQ ID NO: 7124 - DNA, 35 bp, Artificial Sequence
  Synthetic oligonucleotide
ttgaatcttcgctcatcaccgaaaagttcaacgtg

SEQ ID NO: 7125 - DNA, 37 bp, Artificial Sequence
  Synthetic oligonucleotide
tttgctatgtactgtgtacgaggctgtttgagttcga

SEQ ID NO: 7126 - DNA, 35 bp, Artificial Sequence
  Synthetic oligonucleotide
aataagcgcaatttgcttcgcgcgtagggcaaggc

SEQ ID NO: 7127 - DNA, 35 bp, Artificial Sequence
  Synthetic oligonucleotide
agacaccactgctagttgtgatgcaagcgcacccc

SEQ ID NO: 7128 - DNA, 36 bp, Artificial Sequence
  Synthetic oligonucleotide
agggggacggtcgacaaaacggacgtgttcagtgta

SEQ ID NO: 7129 - DNA, 38 bp, Artificial Sequence
  Synthetic oligonucleotide
cgctgagggaaatggttatggaccccttatgacgttga

SEQ ID NO: 7130 - DNA, 36 bp, Artificial Sequence
  Synthetic oligonucleotide
gagtgtgagtagtagtcgcggggacctacatcagta

SEQ ID NO: 7131 - DNA, 38 bp, Artificial Sequence
  Synthetic oligonucleotide
tgacaggttgggtctagtctgctttgggttcaagttga

SEQ ID NO: 7132 - DNA, 36 bp, Artificial Sequence
  Synthetic oligonucleotide
aagacttgtacgcagcatgcacttttggagctgata

SEQ ID NO: 7133 - DNA, 35 bp, Artificial Sequence
  Synthetic oligonucleotide
aaggggattgaggagccaattgccagggaacatcc

SEQ ID NO: 7134 - DNA, 37 bp, Artificial Sequence
  Synthetic oligonucleotide
ctacataccagtccatgagttagtcctaatgaggtga

SEQ ID NO: 7135 - DNA, 37 bp, Artificial Sequence
  Synthetic oligonucleotide
gaagtcaggttgcatgcattacgccctctacacggta

SEQ ID NO: 7136 - DNA, 37 bp, Artificial Sequence
  Synthetic oligonucleotide
gactggacgctgtaaaatttaggggacttgttaagga

SEQ ID NO: 7137 - DNA, 38 bp, Artificial Sequence
  Synthetic oligonucleotide
gagctaacgggcggtttggaaccggtgtccctggctga

SEQ ID NO: 7138 - DNA, 35 bp, Artificial Sequence
  Synthetic oligonucleotide
gataagatttggtaaaaggcggttgcctgtctgga

SEQ ID NO: 7139 - DNA, 37 bp, Artificial Sequence
  Synthetic oligonucleotide
gcagaactaattgtaggggctgtaagacgccgggtga

SEQ ID NO: 7140 - DNA, 37 bp, Artificial Sequence
  Synthetic oligonucleotide
gcaggaccagtgcgtagaccggcttactttcccccga

SEQ ID NO: 7141 - DNA, 37 bp, Artificial Sequence
  Synthetic oligonucleotide
gcgttgatcatgattggtaccgtcgactgtcactcga

SEQ ID NO: 7142 - DNA, 35 bp, Artificial Sequence
  Synthetic oligonucleotide
gggactggggctcagaacatcgagggccggagatc

SEQ ID NO: 7143 - DNA, 38 bp, Artificial Sequence
  Synthetic oligonucleotide
ggtggcctttcaatggatgtgaggagcaagttatttga

SEQ ID NO: 7144 - DNA, 35 bp, Artificial Sequence
  Synthetic oligonucleotide
gtaccgaagtgccatggttatgagcggatgacatt

SEQ ID NO: 7145 - DNA, 35 bp, Artificial Sequence
  Synthetic oligonucleotide
gtagtcagggccatcagaacaagttacaacttaga

SEQ ID NO: 7146 - DNA, 37 bp, Artificial Sequence
  Synthetic oligonucleotide
gtgcgcttcctggactgctaatagaagtagggaggga

SEQ ID NO: 7147 - DNA, 35 bp, Artificial Sequence
  Synthetic oligonucleotide
taacgaatatggataccggggtcattgacgcaata

SEQ ID NO: 7148 - DNA, 36 bp, Artificial Sequence
  Synthetic oligonucleotide
tacctcgggttatgtcataggggtgcgtgtgcgcca

SEQ ID NO: 7149 - DNA, 35 bp, Artificial Sequence
  Synthetic oligonucleotide
tatagcggtctgtacttaaaaataattccaggagg

SEQ ID NO: 7150 - DNA, 35 bp, Artificial Sequence
  Synthetic oligonucleotide
tcagaggcctaggcccctgacccgtctgtaccaaa

SEQ ID NO: 7151 - DNA, 35 bp, Artificial Sequence
  Synthetic oligonucleotide
tgaatgaggtctgactaggttttttgagttgttaa

SEQ ID NO: 7152 - DNA, 37 bp, Artificial Sequence
  Synthetic oligonucleotide
tgtactgtagtgaaacggtaagtgacggtaagactga

SEQ ID NO: 7153 - DNA, 35 bp, Artificial Sequence
  Synthetic oligonucleotide
ttaggaagatcgtgaggtctcaatacacttacaga

SEQ ID NO: 7154 - DNA, 36 bp, Artificial Sequence
  Synthetic oligonucleotide
ttatcatacggcttgcccttgcttatgaccacgcca

SEQ ID NO: 7155 - DNA, 36 bp, Artificial Sequence
  Synthetic oligonucleotide
acgaagaaggatgggcaatggctagctaagtaggga

SEQ ID NO: 7156 - DNA, 38 bp, Artificial Sequence
  Synthetic oligonucleotide
agtctgggtaagtagtggatttgttctaaaatgggtga

SEQ ID NO: 7157 - DNA, 35 bp, Artificial Sequence
  Synthetic oligonucleotide
caaggtcatgcggtggattggtcgtttatctccta

SEQ ID NO: 7158 - DNA, 38 bp, Artificial Sequence
  Synthetic oligonucleotide
gagtcgggttcaattctatattgagagcaggtctttga

SEQ ID NO: 7159 - DNA, 36 bp, Artificial Sequence
  Synthetic oligonucleotide
ggaatagacctcaggggagtcttccgtgtgcacgca

SEQ ID NO: 7160 - DNA, 38 bp, Artificial Sequence
  Synthetic oligonucleotide
tgtccaacgggaaggacggtatggtcttgtaagcgtga

SEQ ID NO: 7161 - DNA, 35 bp, Artificial Sequence
  Synthetic oligonucleotide
ttgcagtcccgtagggctgtaccagtatgataggg

SEQ ID NO: 7162 - DNA, 37 bp, Artificial Sequence
  Synthetic oligonucleotide
aaataggacccgccccaacccttttatcggtactcga

SEQ ID NO: 7163 - DNA, 38 bp, Artificial Sequence
  Synthetic oligonucleotide
aacattatgtcgccagttgtcggtaactaatttactga

SEQ ID NO: 7164 - DNA, 35 bp, Artificial Sequence
  Synthetic oligonucleotide
acagtccggtacgtggtacagcgacatcaagctgc

SEQ ID NO: 7165 - DNA, 36 bp, Artificial Sequence
  Synthetic oligonucleotide
accggttttggagaatacgaattgtcggtgggtcga

SEQ ID NO: 7166 - DNA, 38 bp, Artificial Sequence
  Synthetic oligonucleotide
acgccactgacagttcgggcggatttgatggacaatga

SEQ ID NO: 7167 - DNA, 35 bp, Artificial Sequence
  Synthetic oligonucleotide
agagcaacagattgagattgttatctaagttgacg

SEQ ID NO: 7168 - DNA, 37 bp, Artificial Sequence
  Synthetic oligonucleotide
atacacgggtagttttcatgtgcatgtatttaagcga

SEQ ID NO: 7169 - DNA, 37 bp, Artificial Sequence
  Synthetic oligonucleotide
atagacaagtgatttgtccaatcacccgtaaggatga

SEQ ID NO: 7170 - DNA, 36 bp, Artificial Sequence
  Synthetic oligonucleotide
atgtcactgtactgctgggaggtaagaatttgttta

SEQ ID NO: 7171 - DNA, 35 bp, Artificial Sequence
  Synthetic oligonucleotide
ccccagtcgaagacgattcggtgtcacgcatcgta

SEQ ID NO: 7172 - DNA, 37 bp, Artificial Sequence
  Synthetic oligonucleotide
ccgtggctgttccagtaaggacagtgtggtgtttgga

SEQ ID NO: 7173 - DNA, 35 bp, Artificial Sequence
  Synthetic oligonucleotide
cttggcgaccttgcaacacgcttctccgagaacgt

SEQ ID NO: 7174 - DNA, 36 bp, Artificial Sequence
  Synthetic oligonucleotide
gacaactgtattcatgaagtagctactagttacgaa

SEQ ID NO: 7175 - DNA, 36 bp, Artificial Sequence
  Synthetic oligonucleotide
gactcgtacttcatccacgtacttcggcgtaaggaa

SEQ ID NO: 7176 - DNA, 35 bp, Artificial Sequence
  Synthetic oligonucleotide
gagatgtctgtcgaagttttacgctctcaggactg

SEQ ID NO: 7177 - DNA, 37 bp, Artificial Sequence
  Synthetic oligonucleotide
gatatttgaggaccaaataacttgcgtgtaatgccga

SEQ ID NO: 7178 - DNA, 35 bp, Artificial Sequence
  Synthetic oligonucleotide
gcaactggtttttgggcaagcatttttgtcgcctc

SEQ ID NO: 7179 - DNA, 38 bp, Artificial Sequence
  Synthetic oligonucleotide
gccagtctacgctatcacggttgaatttccggaattga

SEQ ID NO: 7180 - DNA, 36 bp, Artificial Sequence
  Synthetic oligonucleotide
gctgtcatggcggataagtaacttccccgatggtta

SEQ ID NO: 7181 - DNA, 36 bp, Artificial Sequence
  Synthetic oligonucleotide
ggaggggatttgggaaagtacatgtagttatgaata

SEQ ID NO: 7182 - DNA, 36 bp, Artificial Sequence
  Synthetic oligonucleotide
gggtactggacacatgggccatgaacgtaacgttta

SEQ ID NO: 7183 - DNA, 38 bp, Artificial Sequence
  Synthetic oligonucleotide
gtacgcacaaatgccgaaggcactccagcaactactga

SEQ ID NO: 7184 - DNA, 38 bp, Artificial Sequence
  Synthetic oligonucleotide
gtcgttgtaacggtggtactgcttcctgttgtggatga

SEQ ID NO: 7185 - DNA, 38 bp, Artificial Sequence
  Synthetic oligonucleotide
tagcaccatatctgcatatcgtagatagtagagtttga

SEQ ID NO: 7186 - DNA, 38 bp, Artificial Sequence
  Synthetic oligonucleotide
tagggcacatcctcctcggaggaaagctagtatcgtga

SEQ ID NO: 7187 - DNA, 36 bp, Artificial Sequence
  Synthetic oligonucleotide
tagttgcagtagtgggggttatcattgcttcgcgaa

SEQ ID NO: 7188 - DNA, 36 bp, Artificial Sequence
  Synthetic oligonucleotide
tattgatacagaagccctaggtggctcgcttccgta

SEQ ID NO: 7189 - DNA, 35 bp, Artificial Sequence
  Synthetic oligonucleotide
tccgccggatgcccattccaagctgtgctccactc

SEQ ID NO: 7190 - DNA, 37 bp, Artificial Sequence
  Synthetic oligonucleotide
tcgaagtggccctcacggcttcctgagtctagtgtga

SEQ ID NO: 7191 - DNA, 36 bp, Artificial Sequence
  Synthetic oligonucleotide
tgctgagtcacccgattgtggatggcaaatggaaca

SEQ ID NO: 7192 - DNA, 38 bp, Artificial Sequence
  Synthetic oligonucleotide
tggcttccacgcgttccagagaggctatacctgattga

SEQ ID NO: 7193 - DNA, 35 bp, Artificial Sequence
  Synthetic oligonucleotide
ttcttcgggagttgtagtccgcttcacaatgaggt

SEQ ID NO: 7194 - DNA, 37 bp, Artificial Sequence
  Synthetic oligonucleotide
atgtttcagacggtgacgggacgcccgtttcatggga

SEQ ID NO: 7195 - DNA, 36 bp, Artificial Sequence
  Synthetic oligonucleotide
ccttgcccaacggtttcaccattgggtagggaatga

SEQ ID NO: 7196 - DNA, 36 bp, Artificial Sequence
  Synthetic oligonucleotide
gatgcacagatgaaatactctggtatgtacttagga

SEQ ID NO: 7197 - DNA, 38 bp, Artificial Sequence
  Synthetic oligonucleotide
gcgccatgcttcaaaagaacgacttgttgtgcaagtga

SEQ ID NO: 7198 - DNA, 35 bp, Artificial Sequence
  Synthetic oligonucleotide
gcgtcacgaagggttttcttgagacgacgcaaggg

SEQ ID NO: 7199 - DNA, 36 bp, Artificial Sequence
  Synthetic oligonucleotide
ggattcgtctggcggggatacgaacactccactcaa

SEQ ID NO: 7200 - DNA, 37 bp, Artificial Sequence
  Synthetic oligonucleotide
acggtactggtgtagaaggctattgattaatatacga

SEQ ID NO: 7201 - DNA, 35 bp, Artificial Sequence
  Synthetic oligonucleotide
tccataggaccgttccttagcgaataaagggtgtc

SEQ ID NO: 7202 - DNA, 37 bp, Artificial Sequence
  Synthetic oligonucleotide
attacctgcgtggtcagtatggcaaccccggtttcga

SEQ ID NO: 7203 - DNA, 37 bp, Artificial Sequence
  Synthetic oligonucleotide
aaccggacttgcagtcgactggagatgcgaccctgga

SEQ ID NO: 7204 - DNA, 38 bp, Artificial Sequence
  Synthetic oligonucleotide
aaccgtgccagagtacgtgggtaatgacgtcggattga

SEQ ID NO: 7205 - DNA, 35 bp, Artificial Sequence
  Synthetic oligonucleotide
aacgtaaaacgggcacccgacgttccggttttgtc

SEQ ID NO: 7206 - DNA, 36 bp, Artificial Sequence
  Synthetic oligonucleotide
aacgtgtttccattatcacaagatcaggcgcaggct

SEQ ID NO: 7207 - DNA, 35 bp, Artificial Sequence
  Synthetic oligonucleotide
aactgaccaatgcaaggaactccgggtagtgcggt

SEQ ID NO: 7208 - DNA, 37 bp, Artificial Sequence
  Synthetic oligonucleotide
aatagagctgtgaccgacatattcgctgtatctacga

SEQ ID NO: 7209 - DNA, 36 bp, Artificial Sequence
  Synthetic oligonucleotide
acagcagatgcgtgggtggtcgtttccaaccgtcga

SEQ ID NO: 7210 - DNA, 37 bp, Artificial Sequence
  Synthetic oligonucleotide
acagtctcggtaagttctgtaggtcgttactcagtga

SEQ ID NO: 7211 - DNA, 38 bp, Artificial Sequence
  Synthetic oligonucleotide
accaaacaaggcctggcctcggtgttcgctccaagtga

SEQ ID NO: 7212 - DNA, 36 bp, Artificial Sequence
  Synthetic oligonucleotide
acccctagataggtgccaacgtgaaactgctgtgaa

SEQ ID NO: 7213 - DNA, 36 bp, Artificial Sequence
  Synthetic oligonucleotide
agaactaaagtggaacgtgcgagtcagttagcatca

SEQ ID NO: 7214 - DNA, 35 bp, Artificial Sequence
  Synthetic oligonucleotide
agaactcggaccgcgagtgcacatgcagggctccc

SEQ ID NO: 7215 - DNA, 37 bp, Artificial Sequence
  Synthetic oligonucleotide
agatgacgcgaggatctatcttaagcactaagctgga

SEQ ID NO: 7216 - DNA, 35 bp, Artificial Sequence
  Synthetic oligonucleotide
agcacaaggttatagacaagtccgccctcaaattc

SEQ ID NO: 7217 - DNA, 37 bp, Artificial Sequence
  Synthetic oligonucleotide
agcactttgggtggccctgtacgttgaagatcgccga

SEQ ID NO: 7218 - DNA, 35 bp, Artificial Sequence
  Synthetic oligonucleotide
agtgatagcgtcctagtactgcggaaaaggatagc

SEQ ID NO: 7219 - DNA, 36 bp, Artificial Sequence
  Synthetic oligonucleotide
attgagaagctcagtgcactagtggcgagctacgta

SEQ ID NO: 7220 - DNA, 36 bp, Artificial Sequence
  Synthetic oligonucleotide
caccgacgtctggaagggacgatttggctaggatta

SEQ ID NO: 7221 - DNA, 35 bp, Artificial Sequence
  Synthetic oligonucleotide
ccaacgacagacgaagcatggaccgtaggtaagtt

SEQ ID NO: 7222 - DNA, 37 bp, Artificial Sequence
  Synthetic oligonucleotide
cccccgcctaaatcgcgcctggggtcttagacagtga

SEQ ID NO: 7223 - DNA, 35 bp, Artificial Sequence
  Synthetic oligonucleotide
gaactggacaatttgagtgtcgctgtcttgcggta

SEQ ID NO: 7224 - DNA, 36 bp, Artificial Sequence
  Synthetic oligonucleotide
gacactgcgggtgcgcgggatactcactcctatttt

SEQ ID NO: 7225 - DNA, 38 bp, Artificial Sequence
  Synthetic oligonucleotide
gatgcaggtcttgggggtatatacgaaaggacatttga

SEQ ID NO: 7226 - DNA, 35 bp, Artificial Sequence
  Synthetic oligonucleotide
gatgtaaagggggccctacagcccggctactgtgg

SEQ ID NO: 7227 - DNA, 36 bp, Artificial Sequence
  Synthetic oligonucleotide
gctcgtaaagttcatgcgagactcactgcatcagga

SEQ ID NO: 7228 - DNA, 35 bp, Artificial Sequence
  Synthetic oligonucleotide
gtaccatgcagtatatgggacgtctaacgtaaaat

SEQ ID NO: 7229 - DNA, 35 bp, Artificial Sequence
  Synthetic oligonucleotide
gtcatggaacgggtgcatggtggtcgggttcttag

SEQ ID NO: 7230 - DNA, 36 bp, Artificial Sequence
  Synthetic oligonucleotide
gtcgagtcctagatcttgtgtgtgtggctctcttga

SEQ ID NO: 7231 - DNA, 38 bp, Artificial Sequence
  Synthetic oligonucleotide
gtgcataaacatatcaccgacatatacgcatggcttga

SEQ ID NO: 7232 - DNA, 35 bp, Artificial Sequence
  Synthetic oligonucleotide
gtgcgcatgatttccttatacgcaagcaacgggct

SEQ ID NO: 7233 - DNA, 36 bp, Artificial Sequence
  Synthetic oligonucleotide
gtgcgtcatgtaaaacggacggtaatgtaacgagaa

SEQ ID NO: 7234 - DNA, 35 bp, Artificial Sequence
  Synthetic oligonucleotide
gtggcatttaccggaggcccggtaattaaagggta

SEQ ID NO: 7235 - DNA, 35 bp, Artificial Sequence
  Synthetic oligonucleotide
gttagtgcggtgcggggtgaccgtgttgggctgcc

SEQ ID NO: 7236 - DNA, 36 bp, Artificial Sequence
  Synthetic oligonucleotide
tagcgttcatgctggcatgctgtgtaagttatgtaa

SEQ ID NO: 7237 - DNA, 36 bp, Artificial Sequence
  Synthetic oligonucleotide
tatcagctactacggagggagggcgtactatacgca

SEQ ID NO: 7238 - DNA, 36 bp, Artificial Sequence
  Synthetic oligonucleotide
tccagttcacaggagacatgggaatctggaagcgaa

SEQ ID NO: 7239 - DNA, 35 bp, Artificial Sequence
  Synthetic oligonucleotide
tccgccaattcaatgtactacaggcaccgctgagt

SEQ ID NO: 7240 - DNA, 35 bp, Artificial Sequence
  Synthetic oligonucleotide
tcgactagactgtagtggcaatcacgacctacatg

SEQ ID NO: 7241 - DNA, 35 bp, Artificial Sequence
  Synthetic oligonucleotide
tctaaaagccctcgctccgttttaaacgacggcgc

SEQ ID NO: 7242 - DNA, 35 bp, Artificial Sequence
  Synthetic oligonucleotide
tgaagctggatcaactaccagtgaaaggcgttggc

SEQ ID NO: 7243 - DNA, 38 bp, Artificial Sequence
  Synthetic oligonucleotide
tggaaatatcgaggtggacaggtttgcaaacgccctga

SEQ ID NO: 7244 - DNA, 35 bp, Artificial Sequence
  Synthetic oligonucleotide
tgtccaaatgtaacactaggacgcctgttgcgctt

SEQ ID NO: 7245 - DNA, 36 bp, Artificial Sequence
  Synthetic oligonucleotide
ttggtcacgctgtggatagtcacggaatgagtgcta

SEQ ID NO: 7246 - DNA, 38 bp, Artificial Sequence
  Synthetic oligonucleotide
ttgtgagtgactacagctcccccacgtccaaaacttga

SEQ ID NO: 7247 - DNA, 35 bp, Artificial Sequence
  Synthetic oligonucleotide
tttgcgttgagctcatgagaataacaccttcactt

SEQ ID NO: 7248 - DNA, 37 bp, Artificial Sequence
  Synthetic oligonucleotide
aggggcccgaatcgtacctgcattcgggctcctacga

SEQ ID NO: 7249 - DNA, 35 bp, Artificial Sequence
  Synthetic oligonucleotide
agcaatcatgacaatcttcagcacggtcttccgtg

SEQ ID NO: 7250 - DNA, 35 bp, Artificial Sequence
  Synthetic oligonucleotide
attggggtccgcgagttgaaataaagcgaagctat

SEQ ID NO: 7251 - DNA, 37 bp, Artificial Sequence
  Synthetic oligonucleotide
aaaagcccgataccccgcggacttttaggataacgga

SEQ ID NO: 7252 - DNA, 36 bp, Artificial Sequence
  Synthetic oligonucleotide
aacgtatacagtgctctttttgtgtgttgtgggaga

SEQ ID NO: 7253 - DNA, 35 bp, Artificial Sequence
  Synthetic oligonucleotide
acgcggagattcatgtaatgttctaccgggacatt

SEQ ID NO: 7254 - DNA, 35 bp, Artificial Sequence
  Synthetic oligonucleotide
agcgagttaaaccctactcagcatcactatgctga

SEQ ID NO: 7255 - DNA, 38 bp, Artificial Sequence
  Synthetic oligonucleotide
aggctatggtgaaaaggatcatgtgtttgaggacttga

SEQ ID NO: 7256 - DNA, 36 bp, Artificial Sequence
  Synthetic oligonucleotide
agggcacgatccgcgttgtcataaattcaggggtta

SEQ ID NO: 7257 - DNA, 37 bp, Artificial Sequence
  Synthetic oligonucleotide
attcagtatggcatgatgcgagtggtttcgccgtgga

SEQ ID NO: 7258 - DNA, 36 bp, Artificial Sequence
  Synthetic oligonucleotide
cactagctttttgcaacagtatattactgcggggaa

SEQ ID NO: 7259 - DNA, 35 bp, Artificial Sequence
  Synthetic oligonucleotide
gccactgatcaagggaccactcgaagggtaggtaa

SEQ ID NO: 7260 - DNA, 38 bp, Artificial Sequence
  Synthetic oligonucleotide
ggaaaactggtgtatcagatggaaaagggtatggatga

SEQ ID NO: 7261 - DNA, 37 bp, Artificial Sequence
  Synthetic oligonucleotide
ggggtgggatgttggcatcgacctaaacagttcaaga

SEQ ID NO: 7262 - DNA, 35 bp, Artificial Sequence
  Synthetic oligonucleotide
gttattcgtagcaaagtgattcaaaccggcctagg

SEQ ID NO: 7263 - DNA, 36 bp, Artificial Sequence
  Synthetic oligonucleotide
tacggggagagtagcggaacgtaacttctgctagta

SEQ ID NO: 7264 - DNA, 38 bp, Artificial Sequence
  Synthetic oligonucleotide
tcatggtgcaatctttggatgtacaaatcgacgcttga

SEQ ID NO: 7265 - DNA, 35 bp, Artificial Sequence
  Synthetic oligonucleotide
tgctatgtgggctctgcatagtgatactgggcgta

SEQ ID NO: 7266 - DNA, 38 bp, Artificial Sequence
  Synthetic oligonucleotide
ttagtcgcgccggcgcacttaccgtgcagatagaatga

SEQ ID NO: 7267 - DNA, 37 bp, Artificial Sequence
  Synthetic oligonucleotide
ttgaggagtctagttacccaggtggttagtgagttta

SEQ ID NO: 7268 - DNA, 36 bp, Artificial Sequence
  Synthetic oligonucleotide
acacggggaagagttttggtacgtacgcgtgctata

SEQ ID NO: 7269 - DNA, 37 bp, Artificial Sequence
  Synthetic oligonucleotide
aagtacttcagccgatacaatagccaggtaaagttga

SEQ ID NO: 7270 - DNA, 36 bp, Artificial Sequence
  Synthetic oligonucleotide
actgtttatctgaggttgaaggggaaaactggggta

SEQ ID NO: 7271 - DNA, 37 bp, Artificial Sequence
  Synthetic oligonucleotide
agcaagattaatctgataagtgaagtagggcggacga

SEQ ID NO: 7272 - DNA, 36 bp, Artificial Sequence
  Synthetic oligonucleotide
ataggggctaggcctctgtaggaatgtccgatggga

SEQ ID NO: 7273 - DNA, 36 bp, Artificial Sequence
  Synthetic oligonucleotide
ctggactttcggtgcccgttgacgaactagctggga

SEQ ID NO: 7274 - DNA, 36 bp, Artificial Sequence
  Synthetic oligonucleotide
gaagaagctcgcgcaacatgtcgtaatcaacttcga

SEQ ID NO: 7275 - DNA, 36 bp, Artificial Sequence
  Synthetic oligonucleotide
gaagaccgttgacgggctgctagtctcacgtaggaa

SEQ ID NO: 7276 - DNA, 37 bp, Artificial Sequence
  Synthetic oligonucleotide
gcatgggtcatatcccgggaccgaaggagcttacaga

SEQ ID NO: 7277 - DNA, 38 bp, Artificial Sequence
  Synthetic oligonucleotide
gtgtcgtcgtggagtaagagggtggactcaagcgttga

SEQ ID NO: 7278 - DNA, 35 bp, Artificial Sequence
  Synthetic oligonucleotide
tactgcaatcgttagatggatacgtcaggcgattt

SEQ ID NO: 7279 - DNA, 36 bp, Artificial Sequence
  Synthetic oligonucleotide
ttttgcgaatcgcgctgtcattggttccgggattca

SEQ ID NO: 7280 - DNA, 37 bp, Artificial Sequence
  Synthetic oligonucleotide
aatgagggcgaagtcgcgccccgaccatgggcatcta

SEQ ID NO: 7281 - DNA, 35 bp, Artificial Sequence
  Synthetic oligonucleotide
agtgttgcctaagttgtgtgctgagcgaggatata

SEQ ID NO: 7282 - DNA, 35 bp, Artificial Sequence
  Synthetic oligonucleotide
ggtttggttgggctattcgctctaatgaatggacg

SEQ ID NO: 7283 - DNA, 35 bp, Artificial Sequence
  Synthetic oligonucleotide
tgtgtcttgttatagttcccggactggttcatgta

SEQ ID NO: 7284 - DNA, 35 bp, Artificial Sequence
  Synthetic oligonucleotide
ttccgtaatctagttcgtgtcagaggctacttcca

SEQ ID NO: 7285 - DNA, 35 bp, Artificial Sequence
  Synthetic oligonucleotide
tagtcatggggggtgggatggcttcaggtagaggc

SEQ ID NO: 7286 - DNA, 37 bp, Artificial Sequence
  Synthetic oligonucleotide
gccgagggtatactgtaactgagctcttgtgtctgga

SEQ ID NO: 7287 - DNA, 35 bp, Artificial Sequence
  Synthetic oligonucleotide
aacatacacgccaatataaagcacgtagcattagt

SEQ ID NO: 7288 - DNA, 36 bp, Artificial Sequence
  Synthetic oligonucleotide
aacggacgtacggtgagcaaaggctaatgttcagga

SEQ ID NO: 7289 - DNA, 35 bp, Artificial Sequence
  Synthetic oligonucleotide
aagcaagtgacaggtcgtcccttcaccactacctg

SEQ ID NO: 7290 - DNA, 35 bp, Artificial Sequence
  Synthetic oligonucleotide
acgcaaggaggctacgttgcgcacggcgcctcacc

SEQ ID NO: 7291 - DNA, 35 bp, Artificial Sequence
  Synthetic oligonucleotide
agggcctttagagcgagatgcctagttatggagta

SEQ ID NO: 7292 - DNA, 38 bp, Artificial Sequence
  Synthetic oligonucleotide
atcagcccacatcgggttgtgatacgcttctgtggtga

SEQ ID NO: 7293 - DNA, 38 bp, Artificial Sequence
  Synthetic oligonucleotide
atgaggtataagggtcctctgaagcgtatgcaccatga

SEQ ID NO: 7294 - DNA, 36 bp, Artificial Sequence
  Synthetic oligonucleotide
atgtacttcatagtgcggtccacataaggttacgaa

SEQ ID NO: 7295 - DNA, 35 bp, Artificial Sequence
  Synthetic oligonucleotide
attattgggcgcttccaattagtcgaatgcacatt

SEQ ID NO: 7296 - DNA, 37 bp, Artificial Sequence
  Synthetic oligonucleotide
attccaacggcattcaacgcgactcgttagtcttgga

SEQ ID NO: 7297 - DNA, 36 bp, Artificial Sequence
  Synthetic oligonucleotide
cttggaaataattacatcacgcttgtgggtgcagta

SEQ ID NO: 7298 - DNA, 35 bp, Artificial Sequence
  Synthetic oligonucleotide
gaactatgagcatgcttagttgagggaccgttatt

SEQ ID NO: 7299 - DNA, 25 bp, Artificial Sequence
  Synthetic oligonucleotide
gaagatttactgtgggaaggaaagt

SEQ ID NO: 7300 - DNA, 38 bp, Artificial Sequence
  Synthetic oligonucleotide
gcacccacccgggtggacatacttccactctactgtga

SEQ ID NO: 7301 - DNA, 36 bp, Artificial Sequence
  Synthetic oligonucleotide
gcatagtacgtacaggtccagctcttcgcgtggaca

SEQ ID NO: 7302 - DNA, 36 bp, Artificial Sequence
  Synthetic oligonucleotide
gcctgtttaaaggatacgtgactactgccttgggaa

SEQ ID NO: 7303 - DNA, 35 bp, Artificial Sequence
  Synthetic oligonucleotide
gcgtacttcgttttccaacaaagccagactcgtag

SEQ ID NO: 7304 - DNA, 38 bp, Artificial Sequence
  Synthetic oligonucleotide
ggatgagcgcctcccgtgagtcatgatatgggtaatga

SEQ ID NO: 7305 - DNA, 36 bp, Artificial Sequence
  Synthetic oligonucleotide
ggcttcgtcaaagattgcttatgttgccgatcgcga

SEQ ID NO: 7306 - DNA, 36 bp, Artificial Sequence
  Synthetic oligonucleotide
ggtggatcgcctttgttaggggaacctcactatcta

SEQ ID NO: 7307 - DNA, 35 bp, Artificial Sequence
  Synthetic oligonucleotide
gtagggttcttcatcagctcaccatttgctcctca

SEQ ID NO: 7308 - DNA, 36 bp, Artificial Sequence
  Synthetic oligonucleotide
gtcacggcccgggggctcatacacaaagccacgtga

SEQ ID NO: 7309 - DNA, 35 bp, Artificial Sequence
  Synthetic oligonucleotide
gtcagacgtcccgctcgatgcacgggtatcccttg

SEQ ID NO: 7310 - DNA, 37 bp, Artificial Sequence
  Synthetic oligonucleotide
gtcaggacacggtatgaaagtgtaacggccaaggtga

SEQ ID NO: 7311 - DNA, 35 bp, Artificial Sequence
  Synthetic oligonucleotide
gtcgacggttcaaaaaagggcttaggaatactcag

SEQ ID NO: 7312 - DNA, 35 bp, Artificial Sequence
  Synthetic oligonucleotide
gtgacaaatattaaggccaaggtactggcggactg

SEQ ID NO: 7313 - DNA, 35 bp, Artificial Sequence
  Synthetic oligonucleotide
gtgtggcgtctgggtactgagcaatccagtcactg

SEQ ID NO: 7314 - DNA, 38 bp, Artificial Sequence
  Synthetic oligonucleotide
gtgtgtgcgtgcatgttaggttatgtaggttcgtctga

SEQ ID NO: 7315 - DNA, 37 bp, Artificial Sequence
  Synthetic oligonucleotide
taagacaccacctcagtagtctaattcgatgatctga

SEQ ID NO: 7316 - DNA, 35 bp, Artificial Sequence
  Synthetic oligonucleotide
taggctgagtactcgccaccattgaagtactcgag

SEQ ID NO: 7317 - DNA, 35 bp, Artificial Sequence
  Synthetic oligonucleotide
tccggacccgttgggctcagccggtaacaccagta

SEQ ID NO: 7318 - DNA, 37 bp, Artificial Sequence
  Synthetic oligonucleotide
tcgtaagcttattgcattcatgaactttgctggaaga

SEQ ID NO: 7319 - DNA, 38 bp, Artificial Sequence
  Synthetic oligonucleotide
tgattgcggattatgttcataagggttcatactggtga

SEQ ID NO: 7320 - DNA, 37 bp, Artificial Sequence
  Synthetic oligonucleotide
acccccggacgtattatagtctggattagcaagacga

SEQ ID NO: 7321 - DNA, 37 bp, Artificial Sequence
  Synthetic oligonucleotide
accgatccttgtttcatggatcaagactgactggaga

SEQ ID NO: 7322 - DNA, 36 bp, Artificial Sequence
  Synthetic oligonucleotide
acctggtttagttgtatggttagcgctactttagta

SEQ ID NO: 7323 - DNA, 38 bp, Artificial Sequence
  Synthetic oligonucleotide
agcacaatgggtgacgctaggacatgggggctagctga

SEQ ID NO: 7324 - DNA, 36 bp, Artificial Sequence
  Synthetic oligonucleotide
agtgggtagcaaagtgggggaagcctttcgttatga

SEQ ID NO: 7325 - DNA, 35 bp, Artificial Sequence
  Synthetic oligonucleotide
atcatcaaccgcacgtcatgacgttagggaaattt

SEQ ID NO: 7326 - DNA, 38 bp, Artificial Sequence
  Synthetic oligonucleotide
gaaagtttagcctgcgacgaactgctaatgtatcctga

SEQ ID NO: 7327 - DNA, 35 bp, Artificial Sequence
  Synthetic oligonucleotide
gaatgagttagagggtaagttcacgtcgatatggt

SEQ ID NO: 7328 - DNA, 37 bp, Artificial Sequence
  Synthetic oligonucleotide
gacagtgatttaactggaagcagctgacggggtgaga

SEQ ID NO: 7329 - DNA, 35 bp, Artificial Sequence
  Synthetic oligonucleotide
gaccggagttctacgttgtgacggtgctggaaatg

SEQ ID NO: 7330 - DNA, 38 bp, Artificial Sequence
  Synthetic oligonucleotide
gatgagaaagagctctcgcacatggacgtccgatgtga

SEQ ID NO: 7331 - DNA, 35 bp, Artificial Sequence
  Synthetic oligonucleotide
gcattcagggacgctttaggcggtggctctaggtc

SEQ ID NO: 7332 - DNA, 38 bp, Artificial Sequence
  Synthetic oligonucleotide
ggtactctgcatcggggcccgtcgctatgataatgtga

SEQ ID NO: 7333 - DNA, 37 bp, Artificial Sequence
  Synthetic oligonucleotide
gtgttggagataacctagcctttccgtttagattgga

SEQ ID NO: 7334 - DNA, 37 bp, Artificial Sequence
  Synthetic oligonucleotide
gtttgggtactgtatcgcgtgaatgcattttgcccga

SEQ ID NO: 7335 - DNA, 38 bp, Artificial Sequence
  Synthetic oligonucleotide
taatacagcacggtcattaaacccatcgatgatgttga

SEQ ID NO: 7336 - DNA, 35 bp, Artificial Sequence
  Synthetic oligonucleotide
tcattccgagttttgttcagttatgctgtaagaag

SEQ ID NO: 7337 - DNA, 38 bp, Artificial Sequence
  Synthetic oligonucleotide
tcttgccactcaagactcttgtcaagcactaagcctga

SEQ ID NO: 7338 - DNA, 36 bp, Artificial Sequence
  Synthetic oligonucleotide
tgcccttacatcggtccacgtgagaatggagggcca

SEQ ID NO: 7339 - DNA, 36 bp, Artificial Sequence
  Synthetic oligonucleotide
agagctggaatcgggacgggtatatgccgcctgtca

SEQ ID NO: 7340 - DNA, 36 bp, Artificial Sequence
  Synthetic oligonucleotide
attggagagcagtacctcccttgaacaatctagcga

SEQ ID NO: 7341 - DNA, 38 bp, Artificial Sequence
  Synthetic oligonucleotide
gacaggagcagtcgcgtaagtgtcataacacccactga

SEQ ID NO: 7342 - DNA, 38 bp, Artificial Sequence
  Synthetic oligonucleotide
gagatcgtgaggcgatcgcacacttgagaatctgttga

SEQ ID NO: 7343 - DNA, 38 bp, Artificial Sequence
  Synthetic oligonucleotide
gggtcctagctaaatttgcttatcaaccaggcccgtga

SEQ ID NO: 7344 - DNA, 38 bp, Artificial Sequence
  Synthetic oligonucleotide
tgggatactaacgtagggtgacgtctacgcctgagtga

SEQ ID NO: 7345 - DNA, 38 bp, Artificial Sequence
  Synthetic oligonucleotide
ggtccgctcgacaatattgcgcggctcggcttaactga

SEQ ID NO: 7346 - DNA, 36 bp, Artificial Sequence
  Synthetic oligonucleotide
gagggcctacccattgggtcaggggccatctagtga

SEQ ID NO: 7347 - DNA, 38 bp, Artificial Sequence
  Synthetic oligonucleotide
gcacacatcagtctatttcgattaatcgagtaggatga

SEQ ID NO: 7348 - DNA, 38 bp, Artificial Sequence
  Synthetic oligonucleotide
ggtcatgttcgtggtgaaagtgcgcgggtaagccatga

SEQ ID NO: 7349 - DNA, 37 bp, Artificial Sequence
  Synthetic oligonucleotide
tccccgttcctggggttacgtgctgaggatagagcga

SEQ ID NO: 7350 - DNA, 35 bp, Artificial Sequence
  Synthetic oligonucleotide
acaagcattacatgttatgaattagctttacaagc

SEQ ID NO: 7351 - DNA, 36 bp, Artificial Sequence
  Synthetic oligonucleotide
gataccgagcgcccatggttaagtgttagtgcaaga

SEQ ID NO: 7352 - DNA, 37 bp, Artificial Sequence
  Synthetic oligonucleotide
ggtcgcgcgacacgtttcttaaagtgatgggtgtgga

SEQ ID NO: 7353 - DNA, 37 bp, Artificial Sequence
  Synthetic oligonucleotide
aacataccccgtacacacgacacgtgtggaatggaga

SEQ ID NO: 7354 - DNA, 37 bp, Artificial Sequence
  Synthetic oligonucleotide
aatcgtatgaaatatacgtctgcaactcgcgttggga

SEQ ID NO: 7355 - DNA, 35 bp, Artificial Sequence
  Synthetic oligonucleotide
aattgcagtcacgaggattgtgatatagttgagag

SEQ ID NO: 7356 - DNA, 36 bp, Artificial Sequence
  Synthetic oligonucleotide
acagcccacttggtcgcctgtgtctgagtctgggga

SEQ ID NO: 7357 - DNA, 36 bp, Artificial Sequence
  Synthetic oligonucleotide
acatacggacatctgtctctgcctgcaatgacggta

SEQ ID NO: 7358 - DNA, 37 bp, Artificial Sequence
  Synthetic oligonucleotide
acgatgggtaccaaattttaaactgacgctccgccga

SEQ ID NO: 7359 - DNA, 35 bp, Artificial Sequence
  Synthetic oligonucleotide
acgctactaataacaaggtgttcgttgagatgtat

SEQ ID NO: 7360 - DNA, 36 bp, Artificial Sequence
  Synthetic oligonucleotide
agagcgtgggagcctattacagcgattgttcgctga

SEQ ID NO: 7361 - DNA, 38 bp, Artificial Sequence
  Synthetic oligonucleotide
agcactgggcggtagacgatgatagtgatctcagttga

SEQ ID NO: 7362 - DNA, 35 bp, Artificial Sequence
  Synthetic oligonucleotide
aggtatccagtggaagacttaatgtatatatacgg

SEQ ID NO: 7363 - DNA, 38 bp, Artificial Sequence
  Synthetic oligonucleotide
aggtcatgggagtctagagctatacacggttacggtga

SEQ ID NO: 7364 - DNA, 38 bp, Artificial Sequence
  Synthetic oligonucleotide
agtctgaggaggctgtgttatgttagggtggtttgtga

SEQ ID NO: 7365 - DNA, 37 bp, Artificial Sequence
  Synthetic oligonucleotide
agtgggaccaatgtggtgcttgggcaaaggttataga

SEQ ID NO: 7366 - DNA, 37 bp, Artificial Sequence
  Synthetic oligonucleotide
agtttactggatgaaaaaggattaggatactcactga

SEQ ID NO: 7367 - DNA, 36 bp, Artificial Sequence
  Synthetic oligonucleotide
atactcgcacatggattgggcgaggacccctagcca

SEQ ID NO: 7368 - DNA, 37 bp, Artificial Sequence
  Synthetic oligonucleotide
atttccacagcattatagaaaggctggatgactctga

SEQ ID NO: 7369 - DNA, 37 bp, Artificial Sequence
  Synthetic oligonucleotide
cctatctcgcccccgcagataggactagagcattcga

SEQ ID NO: 7370 - DNA, 29 bp, Artificial Sequence
  Synthetic oligonucleotide
gaaagctgattcatcttgttatagaagga

SEQ ID NO: 7371 - DNA, 37 bp, Artificial Sequence
  Synthetic oligonucleotide
gaaggagaactgtaatgtggcgtgtgataggccagga

SEQ ID NO: 7372 - DNA, 36 bp, Artificial Sequence
  Synthetic oligonucleotide
gacaaatggcggacctttagttttatgagtccacga

SEQ ID NO: 7373 - DNA, 35 bp, Artificial Sequence
  Synthetic oligonucleotide
gacaatatgtcacgaggtactacttggactacaat

SEQ ID NO: 7374 - DNA, 35 bp, Artificial Sequence
  Synthetic oligonucleotide
gacgtattgcaagtaaagtgaccctacagaaaatg

SEQ ID NO: 7375 - DNA, 35 bp, Artificial Sequence
  Synthetic oligonucleotide
gacgtccggcctttgtcttagtaggttgaaaggtt

SEQ ID NO: 7376 - DNA, 36 bp, Artificial Sequence
  Synthetic oligonucleotide
gacttagcaaatgcgtgctgcagtttatacgcgaaa

SEQ ID NO: 7377 - DNA, 35 bp, Artificial Sequence
  Synthetic oligonucleotide
gagccggagaatattttctccagtcacagaggctg

SEQ ID NO: 7378 - DNA, 36 bp, Artificial Sequence
  Synthetic oligonucleotide
gcataccaaacctagtatttcgtctgggagttgaaa

SEQ ID NO: 7379 - DNA, 38 bp, Artificial Sequence
  Synthetic oligonucleotide
gccgtttagagtagtactgtcagttatggaatcagtga

SEQ ID NO: 7380 - DNA, 36 bp, Artificial Sequence
  Synthetic oligonucleotide
gcgctctgcccataaaacagtggagcctacatacaa

SEQ ID NO: 7381 - DNA, 37 bp, Artificial Sequence
  Synthetic oligonucleotide
gcgtaggctgggggcccggaatttcgatttggggtga

SEQ ID NO: 7382 - DNA, 35 bp, Artificial Sequence
  Synthetic oligonucleotide
gctggaaaggtgtgtctatcgagacgcgggcttgc

SEQ ID NO: 7383 - DNA, 38 bp, Artificial Sequence
  Synthetic oligonucleotide
gtaagataactccggtctcgaacctgcagtaatggtga

SEQ ID NO: 7384 - DNA, 35 bp, Artificial Sequence
  Synthetic oligonucleotide
gtacaagtcagtcgctcgcgacacgacaactcggg

SEQ ID NO: 7385 - DNA, 35 bp, Artificial Sequence
  Synthetic oligonucleotide
gtcagggttagtgcatcacgctcaaatgcctcctg

SEQ ID NO: 7386 - DNA, 36 bp, Artificial Sequence
  Synthetic oligonucleotide
gtcatagcgaacccggagcacgttagtctaggtcga

SEQ ID NO: 7387 - DNA, 37 bp, Artificial Sequence
  Synthetic oligonucleotide
gtccgatcacgtcctattaccaggctggctgggtaga

SEQ ID NO: 7388 - DNA, 38 bp, Artificial Sequence
  Synthetic oligonucleotide
gtctagcggagggctttccctctcttcccctcgcctga

SEQ ID NO: 7389 - DNA, 35 bp, Artificial Sequence
  Synthetic oligonucleotide
gtgtcactgtatgtgtggtatctggaaggaactgt

SEQ ID NO: 7390 - DNA, 37 bp, Artificial Sequence
  Synthetic oligonucleotide
taaacagttagctacggttgagtcatggatatggaga

SEQ ID NO: 7391 - DNA, 35 bp, Artificial Sequence
  Synthetic oligonucleotide
tacacttctgcagacacggtaaattagagatgtat

SEQ ID NO: 7392 - DNA, 35 bp, Artificial Sequence
  Synthetic oligonucleotide
taccaagtactggccgttttgtatgaccagataag

SEQ ID NO: 7393 - DNA, 37 bp, Artificial Sequence
  Synthetic oligonucleotide
tacttcggcccataccgactaggaaaaccatcgaaga

SEQ ID NO: 7394 - DNA, 35 bp, Artificial Sequence
  Synthetic oligonucleotide
tagaaacgaccggtcctaacggtataggttacggg

SEQ ID NO: 7395 - DNA, 36 bp, Artificial Sequence
  Synthetic oligonucleotide
tccacacgaccaatttatgaatccgtggtacgctga

SEQ ID NO: 7396 - DNA, 38 bp, Artificial Sequence
  Synthetic oligonucleotide
tcgtattggcatagcgccgggtttatcattgatattga

SEQ ID NO: 7397 - DNA, 38 bp, Artificial Sequence
  Synthetic oligonucleotide
ttaggtacccacgtcatttgatgtgggaccaagcttga

SEQ ID NO: 7398 - DNA, 36 bp, Artificial Sequence
  Synthetic oligonucleotide
ggccaatctggaaaaaaccacacgttgcctacgcga

SEQ ID NO: 7399 - DNA, 36 bp, Artificial Sequence
  Synthetic oligonucleotide
atgcgcctcgtgtactgaacggtaacagcctctgta

SEQ ID NO: 7400 - DNA, 36 bp, Artificial Sequence
  Synthetic oligonucleotide
gtggagttccagttccgactctgggtacagaagaca

SEQ ID NO: 7401 - DNA, 36 bp, Artificial Sequence
  Synthetic oligonucleotide
acctaggacgatttgcatccagggagttctctcaga

SEQ ID NO: 7402 - DNA, 38 bp, Artificial Sequence
  Synthetic oligonucleotide
catcagactagtggctaggtccttgtgaaatgtactga

SEQ ID NO: 7403 - DNA, 35 bp, Artificial Sequence
  Synthetic oligonucleotide
ggctgaaagcgtactgggatcaggcaaactaagtc

SEQ ID NO: 7404 - DNA, 35 bp, Artificial Sequence
  Synthetic oligonucleotide
ttgaactttgtactctggtcaagttatgatgttag

SEQ ID NO: 7405 - DNA, 36 bp, Artificial Sequence
  Synthetic oligonucleotide
acaccagttgcaagcggtgtgcgctgtaatattgta

SEQ ID NO: 7406 - DNA, 38 bp, Artificial Sequence
  Synthetic oligonucleotide
accggcggttatcattgtttgtttgccgggtccgctga

SEQ ID NO: 7407 - DNA, 36 bp, Artificial Sequence
  Synthetic oligonucleotide
agcctacttcctttggcgtgtccgtaggaactggta

SEQ ID NO: 7408 - DNA, 36 bp, Artificial Sequence
  Synthetic oligonucleotide
atggggctgtgggtttgtctctggccgcttttcgta

SEQ ID NO: 7409 - DNA, 38 bp, Artificial Sequence
  Synthetic oligonucleotide
gccctaggtccggtccggagtcgttcggggtaaggtga

SEQ ID NO: 7410 - DNA, 36 bp, Artificial Sequence
  Synthetic oligonucleotide
gtgctaaggtcacggacgggaccttcatcgggccta

SEQ ID NO: 7411 - DNA, 37 bp, Artificial Sequence
  Synthetic oligonucleotide
tcggactggaaagtgtcatgttgaaacagggcgacga

SEQ ID NO: 7412 - DNA, 36 bp, Artificial Sequence
  Synthetic oligonucleotide
tctagtgtcattttgcggcattgggcgtgcccgaac

SEQ ID NO: 7413 - DNA, 35 bp, Artificial Sequence
  Synthetic oligonucleotide
aagagagcagtttgtgcgcaccgggctactgcaag

SEQ ID NO: 7414 - DNA, 36 bp, Artificial Sequence
  Synthetic oligonucleotide
aagtcgctattgcggatactagagtacgtccacata

SEQ ID NO: 7415 - DNA, 36 bp, Artificial Sequence
  Synthetic oligonucleotide
acgagaccgaactgcattggtaataagtcgcaggaa

SEQ ID NO: 7416 - DNA, 37 bp, Artificial Sequence
  Synthetic oligonucleotide
agaccctcactcacagatcataagttcggaaacctga

SEQ ID NO: 7417 - DNA, 38 bp, Artificial Sequence
  Synthetic oligonucleotide
agccgacttatgacgtttcaaggcccacatcccgatga

SEQ ID NO: 7418 - DNA, 35 bp, Artificial Sequence
  Synthetic oligonucleotide
agctggagtcgcattacacgaaacctggtgctagt

SEQ ID NO: 7419 - DNA, 37 bp, Artificial Sequence
  Synthetic oligonucleotide
aggatactgaatccatggcttaaagggtgatgtggga

SEQ ID NO: 7420 - DNA, 38 bp, Artificial Sequence
  Synthetic oligonucleotide
atagtggtcttgggtacgtattgctatgtacggcttga

SEQ ID NO: 7421 - DNA, 35 bp, Artificial Sequence
  Synthetic oligonucleotide
atgataggccaagcttggaccttatcagtcccacg

SEQ ID NO: 7422 - DNA, 36 bp, Artificial Sequence
  Synthetic oligonucleotide
attgaagtccggcttagggttcgatcatggtctgaa

SEQ ID NO: 7423 - DNA, 36 bp, Artificial Sequence
  Synthetic oligonucleotide
cgacctagtgcgcccattaaatagcacttggagcga

SEQ ID NO: 7424 - DNA, 36 bp, Artificial Sequence
  Synthetic oligonucleotide
gaaaaagctaggcatcggaacgagtcatcgcggtta

SEQ ID NO: 7425 - DNA, 35 bp, Artificial Sequence
  Synthetic oligonucleotide
gcacggtaagtgcagattagcatcctcccttgggg

SEQ ID NO: 7426 - DNA, 35 bp, Artificial Sequence
  Synthetic oligonucleotide
gcatgcaatcggagatcctggtccaaggtgactta

SEQ ID NO: 7427 - DNA, 36 bp, Artificial Sequence
  Synthetic oligonucleotide
gccagtcatcagggtgcacacgggggattgccatga

SEQ ID NO: 7428 - DNA, 37 bp, Artificial Sequence
  Synthetic oligonucleotide
gtgatatttacgccgatatattgttgtcatacggaga

SEQ ID NO: 7429 - DNA, 37 bp, Artificial Sequence
  Synthetic oligonucleotide
gtgccaggactggtaaaaaggtcaactaggtatcaga

SEQ ID NO: 7430 - DNA, 38 bp, Artificial Sequence
  Synthetic oligonucleotide
gttgcacgacttccccgtagggagggtaaacggtctga

SEQ ID NO: 7431 - DNA, 35 bp, Artificial Sequence
  Synthetic oligonucleotide
taagtcaccatgagctttatgatctttacaggacg

SEQ ID NO: 7432 - DNA, 35 bp, Artificial Sequence
  Synthetic oligonucleotide
taatgggactttaacatcacttattgtgtgacatg

SEQ ID NO: 7433 - DNA, 35 bp, Artificial Sequence
  Synthetic oligonucleotide
tagtctgcagttatgtctaggtttcaaattaccca

SEQ ID NO: 7434 - DNA, 35 bp, Artificial Sequence
  Synthetic oligonucleotide
tatgcagagcacgtacgaagggtaaacgaatgata

SEQ ID NO: 7435 - DNA, 35 bp, Artificial Sequence
  Synthetic oligonucleotide
tcccccctactattgggcttgtgacgtggaactgg

SEQ ID NO: 7436 - DNA, 36 bp, Artificial Sequence
  Synthetic oligonucleotide
tcgcagagtgcacacgaaatccacgctaaaggtgaa

SEQ ID NO: 7437 - DNA, 38 bp, Artificial Sequence
  Synthetic oligonucleotide
tcttaggcatcctttccaggggtgcaggaggtctatga

SEQ ID NO: 7438 - DNA, 36 bp, Artificial Sequence
  Synthetic oligonucleotide
tggtttggggaccggcgagcttgtgaagacaagcca

SEQ ID NO: 7439 - DNA, 35 bp, Artificial Sequence
  Synthetic oligonucleotide
tgtagaacagctgttccgacccggaggagctacga

SEQ ID NO: 7440 - DNA, 38 bp, Artificial Sequence
  Synthetic oligonucleotide
aaaagtcactagcggaatcgtccaccagaacgctctga

SEQ ID NO: 7441 - DNA, 35 bp, Artificial Sequence
  Synthetic oligonucleotide
aaccgagccaccactagtcgcagttcttcactttg

SEQ ID NO: 7442 - DNA, 36 bp, Artificial Sequence
  Synthetic oligonucleotide
aaccgtaagccacggatagaagtcctgcacctatga

SEQ ID NO: 7443 - DNA, 36 bp, Artificial Sequence
  Synthetic oligonucleotide
aacgccgaggccgtgatgcactgagtacttgtagaa

SEQ ID NO: 7444 - DNA, 38 bp, Artificial Sequence
  Synthetic oligonucleotide
aacggatgcgtaatgcggggtactttttggcgtactga

SEQ ID NO: 7445 - DNA, 38 bp, Artificial Sequence
  Synthetic oligonucleotide
aagttatggatgaattgaagtcgtttaagcgagtgtga

SEQ ID NO: 7446 - DNA, 35 bp, Artificial Sequence
  Synthetic oligonucleotide
acactgtcaggttccgcaggcgttatatgaaccga

SEQ ID NO: 7447 - DNA, 35 bp, Artificial Sequence
  Synthetic oligonucleotide
acagtcatggaggtgcaatttgcggagaacgtggt

SEQ ID NO: 7448 - DNA, 35 bp, Artificial Sequence
  Synthetic oligonucleotide
acatcgatagaccgaccgtagcggagcgtatacta

SEQ ID NO: 7449 - DNA, 36 bp, Artificial Sequence
  Synthetic oligonucleotide
accaggagatagggttcatatgacggccggaggcca

SEQ ID NO: 7450 - DNA, 35 bp, Artificial Sequence
  Synthetic oligonucleotide
accgaccgttgtcacacggttaaggacgctatttg

SEQ ID NO: 7451 - DNA, 38 bp, Artificial Sequence
  Synthetic oligonucleotide
acgaggcgttccacacgtactttttccagatccgttga

SEQ ID NO: 7452 - DNA, 35 bp, Artificial Sequence
  Synthetic oligonucleotide
agagagctcatagcgacacctctgcgccatgtaac

SEQ ID NO: 7453 - DNA, 38 bp, Artificial Sequence
  Synthetic oligonucleotide
agatgaaggagtgtgactcaatgcgcagatggcgctga

SEQ ID NO: 7454 - DNA, 37 bp, Artificial Sequence
  Synthetic oligonucleotide
agattgcaaaggcattatgtaacttgggtcactgcga

SEQ ID NO: 7455 - DNA, 35 bp, Artificial Sequence
  Synthetic oligonucleotide
agcagttagacgacacgttggaagattctggtgag

SEQ ID NO: 7456 - DNA, 35 bp, Artificial Sequence
  Synthetic oligonucleotide
agcgcggggtagggaactacgacgccgagctttat

SEQ ID NO: 7457 - DNA, 38 bp, Artificial Sequence
  Synthetic oligonucleotide
agtccgtgtgtctcatggatccgccctggtggagctga

SEQ ID NO: 7458 - DNA, 38 bp, Artificial Sequence
  Synthetic oligonucleotide
agtgtggatatgttcccacttcaaaggacgcttgctga

SEQ ID NO: 7459 - DNA, 35 bp, Artificial Sequence
  Synthetic oligonucleotide
atatgactgactaggcctaatgactatgttggaaa

SEQ ID NO: 7460 - DNA, 36 bp, Artificial Sequence
  Synthetic oligonucleotide
atcagctatgcgagaggaaatcgagtactgctgaaa

SEQ ID NO: 7461 - DNA, 36 bp, Artificial Sequence
  Synthetic oligonucleotide
atcagctggggcttcgggctggtgtacgcacgccga

SEQ ID NO: 7462 - DNA, 35 bp, Artificial Sequence
  Synthetic oligonucleotide
atgagtgggctccggtaccaccattgtttgcgacc

SEQ ID NO: 7463 - DNA, 38 bp, Artificial Sequence
  Synthetic oligonucleotide
atggtccattgtgaagaaaggaacgactcaaatcgtga

SEQ ID NO: 7464 - DNA, 36 bp, Artificial Sequence
  Synthetic oligonucleotide
atgtgatgggcatggtcgggattttctggcgaacta

SEQ ID NO: 7465 - DNA, 38 bp, Artificial Sequence
  Synthetic oligonucleotide
ccagttaccggcttagggatcactaggtttagtgctga

SEQ ID NO: 7466 - DNA, 36 bp, Artificial Sequence
  Synthetic oligonucleotide
ccatgcagatgaaagtcaatagcgaagtgtggggca

SEQ ID NO: 7467 - DNA, 38 bp, Artificial Sequence
  Synthetic oligonucleotide
ccgatagtcacgtgatacactgggtgtcgcttacttga

SEQ ID NO: 7468 - DNA, 37 bp, Artificial Sequence
  Synthetic oligonucleotide
cctatcggtaggtgggactaaatataggtgccaagga

SEQ ID NO: 7469 - DNA, 36 bp, Artificial Sequence
  Synthetic oligonucleotide
ccttatcagccaagtaaggtattcggagcttagcta

SEQ ID NO: 7470 - DNA, 37 bp, Artificial Sequence
  Synthetic oligonucleotide
ctactggtcctcgttgcatgcgggacggcccttccga

SEQ ID NO: 7471 - DNA, 35 bp, Artificial Sequence
  Synthetic oligonucleotide
ctgcactctactggctaatcagtagagcgcatctg

SEQ ID NO: 7472 - DNA, 35 bp, Artificial Sequence
  Synthetic oligonucleotide
gaaagacttcaactccagttggtttatgctgacag

SEQ ID NO: 7473 - DNA, 38 bp, Artificial Sequence
  Synthetic oligonucleotide
gaactccccgcgtatgtgaaggaaccctgctatgggga

SEQ ID NO: 7474 - DNA, 35 bp, Artificial Sequence
  Synthetic oligonucleotide
gaagcatctattaacaagcgtgctctccccttacg

SEQ ID NO: 7475 - DNA, 38 bp, Artificial Sequence
  Synthetic oligonucleotide
gaattgcaagtcttcgagttacatttcactgcatctga

SEQ ID NO: 7476 - DNA, 36 bp, Artificial Sequence
  Synthetic oligonucleotide
gacgggctatccatttgaccgagtccgtacggtgca

SEQ ID NO: 7477 - DNA, 36 bp, Artificial Sequence
  Synthetic oligonucleotide
gaggagagtggctcacgttttttttagcgatcttga

SEQ ID NO: 7478 - DNA, 38 bp, Artificial Sequence
  Synthetic oligonucleotide
gccgattcctctggctcaggggttagaacagggcgtga

SEQ ID NO: 7479 - DNA, 36 bp, Artificial Sequence
  Synthetic oligonucleotide
gccgcagtccaggacacgaattgttttctgtgggaa

SEQ ID NO: 7480 - DNA, 38 bp, Artificial Sequence
  Synthetic oligonucleotide
gcctgtggtacagctggtcgtaaaattgtaagtcgtga

SEQ ID NO: 7481 - DNA, 35 bp, Artificial Sequence
  Synthetic oligonucleotide
gcgaaggctaagggaaacttttggttctctgcata

SEQ ID NO: 7482 - DNA, 36 bp, Artificial Sequence
  Synthetic oligonucleotide
gctggcaccgcttcactcgaaaataacactccttta

SEQ ID NO: 7483 - DNA, 36 bp, Artificial Sequence
  Synthetic oligonucleotide
gctggggaggaatattgtggctcaagatttatttca

SEQ ID NO: 7484 - DNA, 37 bp, Artificial Sequence
  Synthetic oligonucleotide
gcttatacggtcaacaagaccccaccgcctgattaga

SEQ ID NO: 7485 - DNA, 37 bp, Artificial Sequence
  Synthetic oligonucleotide
ggaaagcttacagtcctcgtacaaatgtggatccaga

SEQ ID NO: 7486 - DNA, 38 bp, Artificial Sequence
  Synthetic oligonucleotide
ggccctcgcaaagtttgcacgtacatatggtactttga

SEQ ID NO: 7487 - DNA, 38 bp, Artificial Sequence
  Synthetic oligonucleotide
gggcccaaagcgtgtaacatacggtcgaggcacactga

SEQ ID NO: 7488 - DNA, 38 bp, Artificial Sequence
  Synthetic oligonucleotide
ggtctaacacggtaggcgcaatagggagtgtgtagtga

SEQ ID NO: 7489 - DNA, 36 bp, Artificial Sequence
  Synthetic oligonucleotide
gtagccatttagtctatcaaactctagcaggaagtg

SEQ ID NO: 7490 - DNA, 38 bp, Artificial Sequence
  Synthetic oligonucleotide
gtcatgcagtgatagtcaataaccgctagtatatgtga

SEQ ID NO: 7491 - DNA, 35 bp, Artificial Sequence
  Synthetic oligonucleotide
gtctgcctccgaggacaatcctatgcagcccctag

SEQ ID NO: 7492 - DNA, 35 bp, Artificial Sequence
  Synthetic oligonucleotide
gtctggcaacgtaaacttgcattccaacgtggtga

SEQ ID NO: 7493 - DNA, 35 bp, Artificial Sequence
  Synthetic oligonucleotide
taaagtaaagtgccttcctgatgaaaaccacgcga

SEQ ID NO: 7494 - DNA, 38 bp, Artificial Sequence
  Synthetic oligonucleotide
taaattgtgcagtctgcaagtacaatgactggggttga

SEQ ID NO: 7495 - DNA, 35 bp, Artificial Sequence
  Synthetic oligonucleotide
taacgcgggggcctttgtttaggctattatgttat

SEQ ID NO: 7496 - DNA, 35 bp, Artificial Sequence
  Synthetic oligonucleotide
taaggacttacagaatggactgtgggggtcttcat

SEQ ID NO: 7497 - DNA, 37 bp, Artificial Sequence
  Synthetic oligonucleotide
taattgaccgtcaaggcgtgactaggtgtcgcgccga

SEQ ID NO: 7498 - DNA, 37 bp, Artificial Sequence
  Synthetic oligonucleotide
tacaaagaacgggaaaggcgccataggatctcgacga

SEQ ID NO: 7499 - DNA, 36 bp, Artificial Sequence
  Synthetic oligonucleotide
tacggatgtggtctgtagaggtgtgcggtcttgcct

SEQ ID NO: 7500 - DNA, 38 bp, Artificial Sequence
  Synthetic oligonucleotide
tatgtgagccatcaaatggagccggattatcattatga

SEQ ID NO: 7501 - DNA, 37 bp, Artificial Sequence
  Synthetic oligonucleotide
tcatacgagggcggtgttccatcgacctctgaacgga

SEQ ID NO: 7502 - DNA, 35 bp, Artificial Sequence
  Synthetic oligonucleotide
tcatactagtgcctccacagcagaattttactgat

SEQ ID NO: 7503 - DNA, 34 bp, Artificial Sequence
  Synthetic oligonucleotide
tcatgcgccgggcctccaacaagtacataacggc

SEQ ID NO: 7504 - DNA, 35 bp, Artificial Sequence
  Synthetic oligonucleotide
tcgtacaactacagttcaaccctggactattaatc

SEQ ID NO: 7505 - DNA, 37 bp, Artificial Sequence
  Synthetic oligonucleotide
tctcgtctaatgcgcgccatttgactggtggtgacga

SEQ ID NO: 7506 - DNA, 36 bp, Artificial Sequence
  Synthetic oligonucleotide
tgaagccgtcagagaagtaatctaccaggcttatta

SEQ ID NO: 7507 - DNA, 38 bp, Artificial Sequence
  Synthetic oligonucleotide
tgagtccggtgaaaaagtacggcactcatgccttatga

SEQ ID NO: 7508 - DNA, 38 bp, Artificial Sequence
  Synthetic oligonucleotide
tgagtgccgtgaggcgcataaactcaaggttcacttga

SEQ ID NO: 7509 - DNA, 35 bp, Artificial Sequence
  Synthetic oligonucleotide
tgcgatccaagttgacacacgaatcacacgtgttg

SEQ ID NO: 7510 - DNA, 38 bp, Artificial Sequence
  Synthetic oligonucleotide
tgcgatccgagggcatcgttacgaaaagaacggtttta

SEQ ID NO: 7511 - DNA, 38 bp, Artificial Sequence
  Synthetic oligonucleotide
tggggtcatctgggcggtattttgccccgagcgggtga

SEQ ID NO: 7512 - DNA, 36 bp, Artificial Sequence
  Synthetic oligonucleotide
tggtgttctggcacaggttctgtcgtactaatagta

SEQ ID NO: 7513 - DNA, 37 bp, Artificial Sequence
  Synthetic oligonucleotide
tgtagtggagatcagcttaagtggaaactagttttga

SEQ ID NO: 7514 - DNA, 38 bp, Artificial Sequence
  Synthetic oligonucleotide
ttatgggtggctggtaaatccacttttgtcatggctga

SEQ ID NO: 7515 - DNA, 36 bp, Artificial Sequence
  Synthetic oligonucleotide
ttcccgtgtgttttagcggtcgggccctgtttttca

SEQ ID NO: 7516 - DNA, 38 bp, Artificial Sequence
  Synthetic oligonucleotide
tttactgaagtctgtagtatgtagctcgttaaaattga

SEQ ID NO: 7517 - DNA, 36 bp, Artificial Sequence
  Synthetic oligonucleotide
tttaggcaatatggctaacgcgagcgctggctgaaa

SEQ ID NO: 7518 - DNA, 36 bp, Artificial Sequence
  Synthetic oligonucleotide
gtggtatctggggggcatcagtaaaattgtttgtta

SEQ ID NO: 7519 - DNA, 36 bp, Artificial Sequence
  Synthetic oligonucleotide
ctggtggttctttaatagaagagaactcccccccga

SEQ ID NO: 7520 - DNA, 37 bp, Artificial Sequence
  Synthetic oligonucleotide
acacagtgacccatttgaactcatgagcacgagctga

SEQ ID NO: 7521 - DNA, 38 bp, Artificial Sequence
  Synthetic oligonucleotide
ggactgccggaaggaactgggtggattgcgcatggtga

SEQ ID NO: 7522 - DNA, 38 bp, Artificial Sequence
  Synthetic oligonucleotide
gggcgtagctacagtcggactttatatttacagcttga

SEQ ID NO: 7523 - DNA, 38 bp, Artificial Sequence
  Synthetic oligonucleotide
gtaggggccttatcctatcggccacacgaagtgcgtga

SEQ ID NO: 7524 - DNA, 36 bp, Artificial Sequence
  Synthetic oligonucleotide
taaaccgagtacccagtgcattacgcaccaacggga

SEQ ID NO: 7525 - DNA, 37 bp, Artificial Sequence
  Synthetic oligonucleotide
tactagcataagaggacagtttgttatgaggcgccaa

SEQ ID NO: 7526 - DNA, 35 bp, Artificial Sequence
  Synthetic oligonucleotide
aaccctggggctcgtgttgcgttgtacattaacgt

SEQ ID NO: 7527 - DNA, 36 bp, Artificial Sequence
  Synthetic oligonucleotide
acgcgttgtcgggcctaactgttcttggaaggggga

SEQ ID NO: 7528 - DNA, 37 bp, Artificial Sequence
  Synthetic oligonucleotide
ataccctggggaaacgtgagcagggaactggcaatga

SEQ ID NO: 7529 - DNA, 36 bp, Artificial Sequence
  Synthetic oligonucleotide
atgcaaatcgttacggtcatggggtgtgacggggca

SEQ ID NO: 7530 - DNA, 36 bp, Artificial Sequence
  Synthetic oligonucleotide
attggacccaggtctgttcacccggacgactggtga

SEQ ID NO: 7531 - DNA, 34 bp, Artificial Sequence
  Synthetic oligonucleotide
ccaggcttcgacttggtgaaccacgagccaactg

SEQ ID NO: 7532 - DNA, 35 bp, Artificial Sequence
  Synthetic oligonucleotide
ccatggttgaaaagcttaaagcgctgctagacttg

SEQ ID NO: 7533 - DNA, 37 bp, Artificial Sequence
  Synthetic oligonucleotide
gaagtggtcaagatagtcaagggcttagttcgcttga

SEQ ID NO: 7534 - DNA, 36 bp, Artificial Sequence
  Synthetic oligonucleotide
gaccgattccagactcggtttactaatttacacgga

SEQ ID NO: 7535 - DNA, 37 bp, Artificial Sequence
  Synthetic oligonucleotide
gaccggccaattcattgtgtgtcatctttaagcgaga

SEQ ID NO: 7536 - DNA, 35 bp, Artificial Sequence
  Synthetic oligonucleotide
gatcaacacttaacaggcgtagcagtggccagagc

SEQ ID NO: 7537 - DNA, 38 bp, Artificial Sequence
  Synthetic oligonucleotide
gctggaaccacagacttgtaggcactgacatgagctga

SEQ ID NO: 7538 - DNA, 37 bp, Artificial Sequence
  Synthetic oligonucleotide
ggaaacgcctcccagtctcaacatggtatgttgccga

SEQ ID NO: 7539 - DNA, 35 bp, Artificial Sequence
  Synthetic oligonucleotide
ggatggctggaagtagtttatgcgttgggctcaga

SEQ ID NO: 7540 - DNA, 36 bp, Artificial Sequence
  Synthetic oligonucleotide
gtactgttccagtgagaaagttaggttgtgcactta

SEQ ID NO: 7541 - DNA, 36 bp, Artificial Sequence
  Synthetic oligonucleotide
gtgcaggatccgctccattagcaaagttgggacaga

SEQ ID NO: 7542 - DNA, 35 bp, Artificial Sequence
  Synthetic oligonucleotide
tacaaaaacgtcacctgcgacgtggaaggggcgta

SEQ ID NO: 7543 - DNA, 37 bp, Artificial Sequence
  Synthetic oligonucleotide
tgacaagtgactgcagtctaatgcgtgctatttaaga

SEQ ID NO: 7544 - DNA, 38 bp, Artificial Sequence
  Synthetic oligonucleotide
tgtggttcgcttctatatccagatctgcttcaagttga

SEQ ID NO: 7545 - DNA, 37 bp, Artificial Sequence
  Synthetic oligonucleotide
ttgcattgccaaaggtagggcacgacgcccccggtga

SEQ ID NO: 7546 - DNA, 37 bp, Artificial Sequence
  Synthetic oligonucleotide
ttgtcaaccgaaccgcgtgctacaggatatgatatga

SEQ ID NO: 7547 - DNA, 38 bp, Artificial Sequence
  Synthetic oligonucleotide
gtactgaagatccgtgagtggcttggagaagaggttga

SEQ ID NO: 7548 - DNA, 37 bp, Artificial Sequence
  Synthetic oligonucleotide
gatagagttgttggcaatgtgggactgtacgaggcga

SEQ ID NO: 7549 - DNA, 36 bp, Artificial Sequence
  Synthetic oligonucleotide
aaagcatatggccggacaaataaagctggcgcaaca

SEQ ID NO: 7550 - DNA, 34 bp, Artificial Sequence
  Synthetic oligonucleotide
aagcaaaatgcctactaacgtcacgtaacggttt

SEQ ID NO: 7551 - DNA, 36 bp, Artificial Sequence
  Synthetic oligonucleotide
acacacaacaagccctgctaaaatgtagggacatca

SEQ ID NO: 7552 - DNA, 38 bp, Artificial Sequence
  Synthetic oligonucleotide
acattgtagcaatgattgcgataaggagtaacagctga

SEQ ID NO: 7553 - DNA, 35 bp, Artificial Sequence
  Synthetic oligonucleotide
agacaaatacaggagaacgcgcagtgcgcgaggct

SEQ ID NO: 7554 - DNA, 37 bp, Artificial Sequence
  Synthetic oligonucleotide
agattggatcacggaggtgcaaaatgaggacgtctga

SEQ ID NO: 7555 - DNA, 35 bp, Artificial Sequence
  Synthetic oligonucleotide
agggaaggagtgggatatacacttctcgagtatct

SEQ ID NO: 7556 - DNA, 36 bp, Artificial Sequence
  Synthetic oligonucleotide
atccgcacatggaaatactggctgtccacaaatcaa

SEQ ID NO: 7557 - DNA, 37 bp, Artificial Sequence
  Synthetic oligonucleotide
atcgatcgcaggatcgggcttggatcttttgggaaga

SEQ ID NO: 7558 - DNA, 37 bp, Artificial Sequence
  Synthetic oligonucleotide
ccagtcatggcggtacagaactcacgtcctctatcga

SEQ ID NO: 7559 - DNA, 36 bp, Artificial Sequence
  Synthetic oligonucleotide
cttgcaattaggcgtactgagaggtcgctggtacaa

SEQ ID NO: 7560 - DNA, 35 bp, Artificial Sequence
  Synthetic oligonucleotide
gaccaatgcactgagtggatagcaatcctcgagtg

SEQ ID NO: 7561 - DNA, 37 bp, Artificial Sequence
  Synthetic oligonucleotide
gagaagcagtttgcggatactccgttttggggcatga

SEQ ID NO: 7562 - DNA, 36 bp, Artificial Sequence
  Synthetic oligonucleotide
gagcatgtgctccatttgaactttagcagtgcatca

SEQ ID NO: 7563 - DNA, 37 bp, Artificial Sequence
  Synthetic oligonucleotide
gataggccagtgtgttcgaacaacaatgtccgaacga

SEQ ID NO: 7564 - DNA, 36 bp, Artificial Sequence
  Synthetic oligonucleotide
gatgtgcggacacatcatgcttccaaggccatagga

SEQ ID NO: 7565 - DNA, 35 bp, Artificial Sequence
  Synthetic oligonucleotide
gcactgagtagagaactaaatcatttacgagaggg

SEQ ID NO: 7566 - DNA, 36 bp, Artificial Sequence
  Synthetic oligonucleotide
gccctgagtattgttataacgttcgacgcataataa

SEQ ID NO: 7567 - DNA, 37 bp, Artificial Sequence
  Synthetic oligonucleotide
gccgctgggtgcgtactttagggattagtcccacaga

SEQ ID NO: 7568 - DNA, 36 bp, Artificial Sequence
  Synthetic oligonucleotide
gccggttccatgcatcattttagatatatgcgagca

SEQ ID NO: 7569 - DNA, 36 bp, Artificial Sequence
  Synthetic oligonucleotide
gcgcgcacgctaaccgggaaatagcactccggagaa

SEQ ID NO: 7570 - DNA, 37 bp, Artificial Sequence
  Synthetic oligonucleotide
gcttttctagctagtcatgaaataacggatttatgga

SEQ ID NO: 7571 - DNA, 35 bp, Artificial Sequence
  Synthetic oligonucleotide
ggacttgcattacgatactttccattaggaatgtc

SEQ ID NO: 7572 - DNA, 37 bp, Artificial Sequence
  Synthetic oligonucleotide
ggcgggaattccacttaagggatgtaaatggacacga

SEQ ID NO: 7573 - DNA, 38 bp, Artificial Sequence
  Synthetic oligonucleotide
gggattggacatttactttgaaccatggcccgctttga

SEQ ID NO: 7574 - DNA, 36 bp, Artificial Sequence
  Synthetic oligonucleotide
ggtaacatttcatatacgtagacatagtatccagca

SEQ ID NO: 7575 - DNA, 35 bp, Artificial Sequence
  Synthetic oligonucleotide
ggtgaagcagttcttgatcggagatatcgggctgt

SEQ ID NO: 7576 - DNA, 36 bp, Artificial Sequence
  Synthetic oligonucleotide
gtacacgcgcaggctgtgtgaaggtcggttcttaca

SEQ ID NO: 7577 - DNA, 35 bp, Artificial Sequence
  Synthetic oligonucleotide
gtagagcccctactaactctcaatgggttacgatc

SEQ ID NO: 7578 - DNA, 37 bp, Artificial Sequence
  Synthetic oligonucleotide
gtgacgttaacaacactgtataattcatggggtaaga

SEQ ID NO: 7579 - DNA, 35 bp, Artificial Sequence
  Synthetic oligonucleotide
gtgggacaacactactagtttatacgggcgaattc

SEQ ID NO: 7580 - DNA, 36 bp, Artificial Sequence
  Synthetic oligonucleotide
taatgggatgttcataattctgtgtctgcgttccta

SEQ ID NO: 7581 - DNA, 35 bp, Artificial Sequence
  Synthetic oligonucleotide
tattcgtgctgttcacggagtgtattcatttcgag

SEQ ID NO: 7582 - DNA, 38 bp, Artificial Sequence
  Synthetic oligonucleotide
tccacgctcggcgtgtttgagtctttgtgtgcatatga

SEQ ID NO: 7583 - DNA, 37 bp, Artificial Sequence
  Synthetic oligonucleotide
tccctcaaaagagcattatagctgtagaggatacgga

SEQ ID NO: 7584 - DNA, 35 bp, Artificial Sequence
  Synthetic oligonucleotide
tcgatttggatataattgcttcgcacttagggttg

SEQ ID NO: 7585 - DNA, 36 bp, Artificial Sequence
  Synthetic oligonucleotide
tctgttgaacactgatagatgtagtgatgtgggtaa

SEQ ID NO: 7586 - DNA, 38 bp, Artificial Sequence
  Synthetic oligonucleotide
tgacatgcattaacaacagagtaaggacgggtacctga

SEQ ID NO: 7587 - DNA, 36 bp, Artificial Sequence
  Synthetic oligonucleotide
tggtacggactatgcagtccggcggtatgtcgacca

SEQ ID NO: 7588 - DNA, 38 bp, Artificial Sequence
  Synthetic oligonucleotide
tttggcggtagagcctggcatcagtaagactcgattga

SEQ ID NO: 7589 - DNA, 38 bp, Artificial Sequence
  Synthetic oligonucleotide
accaggactgcggttaactctaggctattacaacgtga

SEQ ID NO: 7590 - DNA, 37 bp, Artificial Sequence
  Synthetic oligonucleotide
ggtactggacctcagcgattcccccgcgtgggtagga

SEQ ID NO: 7591 - DNA, 38 bp, Artificial Sequence
  Synthetic oligonucleotide
tccaaaagtgccaaatgggacaagggggccgtacgtga

SEQ ID NO: 7592 - DNA, 36 bp, Artificial Sequence
  Synthetic oligonucleotide
tgcaccggaccgaagtagtttcatgataatggccca

SEQ ID NO: 7593 - DNA, 37 bp, Artificial Sequence
  Synthetic oligonucleotide
accaaggaattgagcggggggaagtgccttgtccaga

SEQ ID NO: 7594 - DNA, 35 bp, Artificial Sequence
  Synthetic oligonucleotide
acgctgtggagcttataccggagctgtgtggcgct

SEQ ID NO: 7595 - DNA, 38 bp, Artificial Sequence
  Synthetic oligonucleotide
agccacatgggtggttgctgaatactttttcatagtga

SEQ ID NO: 7596 - DNA, 36 bp, Artificial Sequence
  Synthetic oligonucleotide
atttgaggggtccgacacgtttgtggcgttgttgga

SEQ ID NO: 7597 - DNA, 36 bp, Artificial Sequence
  Synthetic oligonucleotide
ctgtccccgattcgagcattaggtggctccgtgcca

SEQ ID NO: 7598 - DNA, 36 bp, Artificial Sequence
  Synthetic oligonucleotide
gaggttcggggtgttggttcgttgttaagggtttta

SEQ ID NO: 7599 - DNA, 36 bp, Artificial Sequence
  Synthetic oligonucleotide
gccttagtggagaatgtactgccaggtggaaagcga

SEQ ID NO: 7600 - DNA, 37 bp, Artificial Sequence
  Synthetic oligonucleotide
gcttagagcgccaaaatatgtcacatagttaacccga

SEQ ID NO: 7601 - DNA, 35 bp, Artificial Sequence
  Synthetic oligonucleotide
gtacaggggccgtactcgccgcgatccagcgcaac

SEQ ID NO: 7602 - DNA, 37 bp, Artificial Sequence
  Synthetic oligonucleotide
gtatcgggtcgggaacgagattcattggtgctcagga

SEQ ID NO: 7603 - DNA, 35 bp, Artificial Sequence
  Synthetic oligonucleotide
gtttagccgaacaaggggccgcggtgtaacctgta

SEQ ID NO: 7604 - DNA, 37 bp, Artificial Sequence
  Synthetic oligonucleotide
taagaatggctcaggaaatctgaagggttctagtcga

SEQ ID NO: 7605 - DNA, 35 bp, Artificial Sequence
  Synthetic oligonucleotide
tacatgggatctaatgaacctaggtaataggctca

SEQ ID NO: 7606 - DNA, 38 bp, Artificial Sequence
  Synthetic oligonucleotide
tcaatccaataacgtaataagggatctgtacaaggtga

SEQ ID NO: 7607 - DNA, 37 bp, Artificial Sequence
  Synthetic oligonucleotide
tgcaacattccgagggacgaacggagggggtattgga

SEQ ID NO: 7608 - DNA, 38 bp, Artificial Sequence
  Synthetic oligonucleotide
tttgtaagcggatgttacaaatcgcacaaacgagctga

SEQ ID NO: 7609 - DNA, 37 bp, Artificial Sequence
  Synthetic oligonucleotide
ggttgacgaatgggatgccgccccggtatggtcatga

SEQ ID NO: 7610 - DNA, 36 bp, Artificial Sequence
  Synthetic oligonucleotide
taaacgtcgcaagggaaggacgtagcaggcgtgtta

SEQ ID NO: 7611 - DNA, 38 bp, Artificial Sequence
  Synthetic oligonucleotide
aaatcggtcgtagtgcgctagacttcaggcacatttga

SEQ ID NO: 7612 - DNA, 37 bp, Artificial Sequence
  Synthetic oligonucleotide
acatccacgctggtgggtgttaaacgggtacctgtga

SEQ ID NO: 7613 - DNA, 38 bp, Artificial Sequence
  Synthetic oligonucleotide
actaccggaatgttgtagcactgaagttccaatcctga

SEQ ID NO: 7614 - DNA, 35 bp, Artificial Sequence
  Synthetic oligonucleotide
agtcacgttcactgttcaggggccactgagtgcat

SEQ ID NO: 7615 - DNA, 38 bp, Artificial Sequence
  Synthetic oligonucleotide
atagcgccgcacctctatgactagtgggagatttatga

SEQ ID NO: 7616 - DNA, 35 bp, Artificial Sequence
  Synthetic oligonucleotide
atgtccctgctgtccggatagtgctccctttgttc

SEQ ID NO: 7617 - DNA, 36 bp, Artificial Sequence
  Synthetic oligonucleotide
attaaggaagagtggaaacgcctattcagtcgagca

SEQ ID NO: 7618 - DNA, 35 bp, Artificial Sequence
  Synthetic oligonucleotide
attcatgttcgtgcagaggtgcgtgctgccgctct

SEQ ID NO: 7619 - DNA, 37 bp, Artificial Sequence
  Synthetic oligonucleotide
cactgaaggcaagagttgcattcatgaggtccaggga

SEQ ID NO: 7620 - DNA, 35 bp, Artificial Sequence
  Synthetic oligonucleotide
ctgaagtcccaagaacgcgtgggttgtggctaatg

SEQ ID NO: 7621 - DNA, 37 bp, Artificial Sequence
  Synthetic oligonucleotide
gaagccaccctcaggtgcctgaatacctggaactcga

SEQ ID NO: 7622 - DNA, 38 bp, Artificial Sequence
  Synthetic oligonucleotide
gatactggatcacggagtggccatcggtgttgggctga

SEQ ID NO: 7623 - DNA, 35 bp, Artificial Sequence
  Synthetic oligonucleotide
gccacaccgagaatgtaattttcattacgggccga

SEQ ID NO: 7624 - DNA, 38 bp, Artificial Sequence
  Synthetic oligonucleotide
gccctagagtgggctaaaggcccggtgaagaggcttga

SEQ ID NO: 7625 - DNA, 37 bp, Artificial Sequence
  Synthetic oligonucleotide
gcctattagtgtcctctatattaagttccacgacaga

SEQ ID NO: 7626 - DNA, 37 bp, Artificial Sequence
  Synthetic oligonucleotide
gctgggtctactttttggcttggaatggaccggtaga

SEQ ID NO: 7627 - DNA, 35 bp, Artificial Sequence
  Synthetic oligonucleotide
gcttcaccggaccgggttcacgacaaacgggccct

SEQ ID NO: 7628 - DNA, 38 bp, Artificial Sequence
  Synthetic oligonucleotide
ggaacaagtcgattgtacgagcccaacccgctgggtga

SEQ ID NO: 7629 - DNA, 35 bp, Artificial Sequence
  Synthetic oligonucleotide
ggactattggcccttggtagtaccccgagtactgt

SEQ ID NO: 7630 - DNA, 38 bp, Artificial Sequence
  Synthetic oligonucleotide
ggattcgctggccccgctggcaacatgcaattgcatga

SEQ ID NO: 7631 - DNA, 35 bp, Artificial Sequence
  Synthetic oligonucleotide
gtccacgtagctagtcccggtaggttataaggctc

SEQ ID NO: 7632 - DNA, 35 bp, Artificial Sequence
  Synthetic oligonucleotide
gtgcttggagccacgactacttacacattggggta

SEQ ID NO: 7633 - DNA, 38 bp, Artificial Sequence
  Synthetic oligonucleotide
gttcatgtatgcaggtggttagggtgaaccatttttga

SEQ ID NO: 7634 - DNA, 37 bp, Artificial Sequence
  Synthetic oligonucleotide
gttggtacacacggattatccagggtaggggacatga

SEQ ID NO: 7635 - DNA, 35 bp, Artificial Sequence
  Synthetic oligonucleotide
taaatcgctgagtatggttaacactgataaagctc

SEQ ID NO: 7636 - DNA, 35 bp, Artificial Sequence
  Synthetic oligonucleotide
tacaaatcatcgggattttagccagggcacaactg

SEQ ID NO: 7637 - DNA, 36 bp, Artificial Sequence
  Synthetic oligonucleotide
tacacagaggtagcaagggtgtacctatagtgtcta

SEQ ID NO: 7638 - DNA, 38 bp, Artificial Sequence
  Synthetic oligonucleotide
taggtcatggtcggggggatacatctgagtgcacatga

SEQ ID NO: 7639 - DNA, 38 bp, Artificial Sequence
  Synthetic oligonucleotide
tcagtctggaacattagtttagtcagggtgagttatga

SEQ ID NO: 7640 - DNA, 37 bp, Artificial Sequence
  Synthetic oligonucleotide
tcgcattgggattgacaccaaagcgagcttaagttga

SEQ ID NO: 7641 - DNA, 38 bp, Artificial Sequence
  Synthetic oligonucleotide
tgatactcctgcgtggcggaagtcatatgcttcactga

SEQ ID NO: 7642 - DNA, 37 bp, Artificial Sequence
  Synthetic oligonucleotide
tgcaaacggtaatatagcgtacagagtgacggtgcga

SEQ ID NO: 7643 - DNA, 37 bp, Artificial Sequence
  Synthetic oligonucleotide
tgtaggtgcaagtaccatacaacttctgctaaaagga

SEQ ID NO: 7644 - DNA, 35 bp, Artificial Sequence
  Synthetic oligonucleotide
ttagagactgactgccatttgtatagtcttgactc

SEQ ID NO: 7645 - DNA, 37 bp, Artificial Sequence
  Synthetic oligonucleotide
ttccgaattaagctattcgtacttcgtgacacgcgga

SEQ ID NO: 7646 - DNA, 35 bp, Artificial Sequence
  Synthetic oligonucleotide
ttgaggcttccggtaactaacgatgcgagtttccg

SEQ ID NO: 7647 - DNA, 36 bp, Artificial Sequence
  Synthetic oligonucleotide
ttggactcccttgcgtaagaggggcgtaaatgcgta

SEQ ID NO: 7648 - DNA, 38 bp, Artificial Sequence
  Synthetic oligonucleotide
ttggactgtgttatgtaatggcaaaaagtgaattctga

SEQ ID NO: 7649 - DNA, 37 bp, Artificial Sequence
  Synthetic oligonucleotide
tgcgtgccgtacaaacctatcggaagaaaaggcacga

SEQ ID NO: 7650 - DNA, 35 bp, Artificial Sequence
  Synthetic oligonucleotide
ggggggggctttttatggtttctgggggacctgat

SEQ ID NO: 7651 - DNA, 37 bp, Artificial Sequence
  Synthetic oligonucleotide
aacggaagtatctaaagctgcacaagggtcttaccga

SEQ ID NO: 7652 - DNA, 37 bp, Artificial Sequence
  Synthetic oligonucleotide
aatactgggtcgcgtgtattcgagcctgataggccga

SEQ ID NO: 7653 - DNA, 38 bp, Artificial Sequence
  Synthetic oligonucleotide
acacctccatgagcgattctgagaagtcatgtacctga

SEQ ID NO: 7654 - DNA, 37 bp, Artificial Sequence
  Synthetic oligonucleotide
acgtctgagccgacggccaccttacgcattcacatga

SEQ ID NO: 7655 - DNA, 36 bp, Artificial Sequence
  Synthetic oligonucleotide
acttctgaacagagaagccgtatgaaaggcatgaaa

SEQ ID NO: 7656 - DNA, 35 bp, Artificial Sequence
  Synthetic oligonucleotide
gacgggggtgcgatacgtgccgaggtagggttggt

SEQ ID NO: 7657 - DNA, 35 bp, Artificial Sequence
  Synthetic oligonucleotide
ggattcaggcaacttctactacacggtctaggcac

SEQ ID NO: 7658 - DNA, 35 bp, Artificial Sequence
  Synthetic oligonucleotide
gtacgtgctaaattaagaaatctcaccgagaacgc

SEQ ID NO: 7659 - DNA, 35 bp, Artificial Sequence
  Synthetic oligonucleotide
taattcggcaattccggtttaatcgctccttgggc

SEQ ID NO: 7660 - DNA, 36 bp, Artificial Sequence
  Synthetic oligonucleotide
tacacgggtaataaaagtacgggtagggggttgtca

SEQ ID NO: 7661 - DNA, 35 bp, Artificial Sequence
  Synthetic oligonucleotide
tacgtcctgttcgccaagcccttgcccagtttttt

SEQ ID NO: 7662 - DNA, 36 bp, Artificial Sequence
  Synthetic oligonucleotide
tgtatgaggttgtgaggcttaagttgggctcgacga

SEQ ID NO: 7663 - DNA, 35 bp, Artificial Sequence
  Synthetic oligonucleotide
tgttactctcacgtagctgcgattgccagatcaag

SEQ ID NO: 7664 - DNA, 35 bp, Artificial Sequence
  Synthetic oligonucleotide
ataaggagtttgcaccgcgacaccttcctttatgt

SEQ ID NO: 7665 - DNA, 35 bp, Artificial Sequence
  Synthetic oligonucleotide
tcatcgggttgaacgcagtacctaccactggagaa

SEQ ID NO: 7666 - DNA, 36 bp, Artificial Sequence
  Synthetic oligonucleotide
gtagtgcactgaatttgttcgcctcccccgcagaca

SEQ ID NO: 7667 - DNA, 36 bp, Artificial Sequence
  Synthetic oligonucleotide
acggttggtacgctgcaatataatgctggggctaca

SEQ ID NO: 7668 - DNA, 37 bp, Artificial Sequence
  Synthetic oligonucleotide
agagcttggacctcatttcgacggttgcgatctaaga

SEQ ID NO: 7669 - DNA, 35 bp, Artificial Sequence
  Synthetic oligonucleotide
aggtaaagtatcgttggtccatggagagacatagt

SEQ ID NO: 7670 - DNA, 38 bp, Artificial Sequence
  Synthetic oligonucleotide
agtctaaggctacgaggtactcggggagagagcattga

SEQ ID NO: 7671 - DNA, 36 bp, Artificial Sequence
  Synthetic oligonucleotide
ataaggtcaacagtccggggtgggagttcttgacca

SEQ ID NO: 7672 - DNA, 35 bp, Artificial Sequence
  Synthetic oligonucleotide
atgtaagtaaaccgctgtaatttaatagtggggaa

SEQ ID NO: 7673 - DNA, 37 bp, Artificial Sequence
  Synthetic oligonucleotide
attgacgtccatttcgcatagttgaatcttagaagga

SEQ ID NO: 7674 - DNA, 38 bp, Artificial Sequence
  Synthetic oligonucleotide
cctaagagtatgcagtgcgtatgctaattaatgcatga

SEQ ID NO: 7675 - DNA, 36 bp, Artificial Sequence
  Synthetic oligonucleotide
gcaggagactccacgctttagtaggggacgggctca

SEQ ID NO: 7676 - DNA, 38 bp, Artificial Sequence
  Synthetic oligonucleotide
gcattggttagtaaagaggcgctccgcctcgttgatga

SEQ ID NO: 7677 - DNA, 38 bp, Artificial Sequence
  Synthetic oligonucleotide
gcgtacctacggttgacaaacacctacattgaaagtga

SEQ ID NO: 7678 - DNA, 35 bp, Artificial Sequence
  Synthetic oligonucleotide
gctgtagggggtagggtgtgtaattttttaacatt

SEQ ID NO: 7679 - DNA, 35 bp, Artificial Sequence
  Synthetic oligonucleotide
ggtagacttgagcgagttacttcgacgatcgtaat

SEQ ID NO: 7680 - DNA, 38 bp, Artificial Sequence
  Synthetic oligonucleotide
ggtgaatgctacgaggcatcgtagagacattgtcttga

SEQ ID NO: 7681 - DNA, 35 bp, Artificial Sequence
  Synthetic oligonucleotide
gtcgacaagtagggcttactttcagccgccgggac

SEQ ID NO: 7682 - DNA, 37 bp, Artificial Sequence
  Synthetic oligonucleotide
gtggaacaacagaaagcgatagtctaggaggttgaga

SEQ ID NO: 7683 - DNA, 36 bp, Artificial Sequence
  Synthetic oligonucleotide
taattagaaggatggacgaggttgaataagtaccta

SEQ ID NO: 7684 - DNA, 35 bp, Artificial Sequence
  Synthetic oligonucleotide
tacgtggtgatgcaagagcgttcaatgagcgaacg

SEQ ID NO: 7685 - DNA, 35 bp, Artificial Sequence
  Synthetic oligonucleotide
tactacaacgtgggctcctccgagaaaggatctga

SEQ ID NO: 7686 - DNA, 36 bp, Artificial Sequence
  Synthetic oligonucleotide
tcaaagccgcatggtcttcagaccctacagcagtaa

SEQ ID NO: 7687 - DNA, 38 bp, Artificial Sequence
  Synthetic oligonucleotide
tgtctacgccgtcatcatggactatttacttcatgtga

SEQ ID NO: 7688 - DNA, 38 bp, Artificial Sequence
  Synthetic oligonucleotide
ttcgagctggcgcatgaagcgctagagcgctaggctga

SEQ ID NO: 7689 - DNA, 36 bp, Artificial Sequence
  Synthetic oligonucleotide
ggtcgcattcaaggaggagagccccgttatgtcaca

SEQ ID NO: 7690 - DNA, 35 bp, Artificial Sequence
  Synthetic oligonucleotide
actcaatggctcataagtcgcaatgcatggtcatt

SEQ ID NO: 7691 - DNA, 38 bp, Artificial Sequence
  Synthetic oligonucleotide
ccgaaaccaggaataggaaccggcaccacggggtatga

SEQ ID NO: 7692 - DNA, 35 bp, Artificial Sequence
  Synthetic oligonucleotide
gacaacaagtactataatcgtgcgtgccagataga

SEQ ID NO: 7693 - DNA, 37 bp, Artificial Sequence
  Synthetic oligonucleotide
gactgaagtaatggggtttgcacaccggaggttgcga

SEQ ID NO: 7694 - DNA, 35 bp, Artificial Sequence
  Synthetic oligonucleotide
gaggcagtcatgaatatgatgcgtgcttactaaca

SEQ ID NO: 7695 - DNA, 36 bp, Artificial Sequence
  Synthetic oligonucleotide
gcatagggaaagcattacaggtcaatctttgtttta

SEQ ID NO: 7696 - DNA, 35 bp, Artificial Sequence
  Synthetic oligonucleotide
gggacgatacttacgatgttaccagcgcactacag

SEQ ID NO: 7697 - DNA, 37 bp, Artificial Sequence
  Synthetic oligonucleotide
taactatgggcccatgctgggctaaggggttcatcga

SEQ ID NO: 7698 - DNA, 37 bp, Artificial Sequence
  Synthetic oligonucleotide
tgacattaaacggtacaaatgacagagacacggatga

SEQ ID NO: 7699 - DNA, 35 bp, Artificial Sequence
  Synthetic oligonucleotide
ttgacatcagtcgacgtctgtcatcgccgctagga

SEQ ID NO: 7700 - DNA, 37 bp, Artificial Sequence
  Synthetic oligonucleotide
acaaacagccaatatgtgacagaggtctgattgagga

SEQ ID NO: 7701 - DNA, 38 bp, Artificial Sequence
  Synthetic oligonucleotide
tcgttttggtccgacttactacttgaagggggggctga

SEQ ID NO: 7702 - DNA, 36 bp, Artificial Sequence
  Synthetic oligonucleotide
tttgtacacgctcatacagtcgtttaaggagtgcga

SEQ ID NO: 7703 - DNA, 35 bp, Artificial Sequence
  Synthetic oligonucleotide
ttcgaaatggcctgcagttatcccttatgagatta

SEQ ID NO: 7704 - DNA, 37 bp, Artificial Sequence
  Synthetic oligonucleotide
ttcgtagagaaatgggaattggaagacaatgatgtga

SEQ ID NO: 7705 - DNA, 35 bp, Artificial Sequence
  Synthetic oligonucleotide
aacgtattaggcgctagaagactctcggtcgaagc

SEQ ID NO: 7706 - DNA, 36 bp, Artificial Sequence
  Synthetic oligonucleotide
acaaaagtgcgtctggacaaccgaatatgccacata

SEQ ID NO: 7707 - DNA, 38 bp, Artificial Sequence
  Synthetic oligonucleotide
acagacgcagtctggggcattccagtggttttacttga

SEQ ID NO: 7708 - DNA, 36 bp, Artificial Sequence
  Synthetic oligonucleotide
acagtcacagtggagttttagtaatttggtttcaga

SEQ ID NO: 7709 - DNA, 35 bp, Artificial Sequence
  Synthetic oligonucleotide
acctacagaaggggcgaacggtgttgcagatacgt

SEQ ID NO: 7710 - DNA, 35 bp, Artificial Sequence
  Synthetic oligonucleotide
acgctgtgctccacatgtaacgagcgtgatgataa

SEQ ID NO: 7711 - DNA, 37 bp, Artificial Sequence
  Synthetic oligonucleotide
acgggctttctagtggggaaattctttcttaccctga

SEQ ID NO: 7712 - DNA, 37 bp, Artificial Sequence
  Synthetic oligonucleotide
actatcgggccgcatgggccaacgagggttttgctga

SEQ ID NO: 7713 - DNA, 37 bp, Artificial Sequence
  Synthetic oligonucleotide
acttatcaccgatcgggcatgatgcttggacgattga

SEQ ID NO: 7714 - DNA, 38 bp, Artificial Sequence
  Synthetic oligonucleotide
agacaacggtggtatgagtctttggacgattatattga

SEQ ID NO: 7715 - DNA, 37 bp, Artificial Sequence
  Synthetic oligonucleotide
agactctcggtagggcactgcagatcatctaaaggga

SEQ ID NO: 7716 - DNA, 38 bp, Artificial Sequence
  Synthetic oligonucleotide
agcgactcgcagccagagctgggtttcacatatgttga

SEQ ID NO: 7717 - DNA, 36 bp, Artificial Sequence
  Synthetic oligonucleotide
agcgatacacgcattcacggttatttttccgacgga

SEQ ID NO: 7718 - DNA, 38 bp, Artificial Sequence
  Synthetic oligonucleotide
agtactggttgtggaaggtatcctgtcgtggagactga

SEQ ID NO: 7719 - DNA, 36 bp, Artificial Sequence
  Synthetic oligonucleotide
agtccacgacgaggggtgtgcattgtcgggggggag

SEQ ID NO: 7720 - DNA, 38 bp, Artificial Sequence
  Synthetic oligonucleotide
agtctgcggaactacatatatgctatgcaacctcgtga

SEQ ID NO: 7721 - DNA, 38 bp, Artificial Sequence
  Synthetic oligonucleotide
agtgagtgtagtgtgtgttacttctaggcgtcaactga

SEQ ID NO: 7722 - DNA, 38 bp, Artificial Sequence
  Synthetic oligonucleotide
agtgtgttcgctatgttacactacgggacgaatcatga

SEQ ID NO: 7723 - DNA, 37 bp, Artificial Sequence
  Synthetic oligonucleotide
atacatgattaagtactggctcttctaagtccggtga

SEQ ID NO: 7724 - DNA, 37 bp, Artificial Sequence
  Synthetic oligonucleotide
atctcaatcgtgggtttacttggggagtgagatatga

SEQ ID NO: 7725 - DNA, 36 bp, Artificial Sequence
  Synthetic oligonucleotide
atctccggtactgacattctcaatccgggttgtgta

SEQ ID NO: 7726 - DNA, 35 bp, Artificial Sequence
  Synthetic oligonucleotide
atgggtgagatgcccattagttatggatagtagct

SEQ ID NO: 7727 - DNA, 37 bp, Artificial Sequence
  Synthetic oligonucleotide
attacgcggggtgcagttggatagatgaaatgctaca

SEQ ID NO: 7728 - DNA, 38 bp, Artificial Sequence
  Synthetic oligonucleotide
attagggacctgtgggaaaattacctgcccggtagtga

SEQ ID NO: 7729 - DNA, 36 bp, Artificial Sequence
  Synthetic oligonucleotide
attgaacgtacggttcggttatctacagaagtcaga

SEQ ID NO: 7730 - DNA, 37 bp, Artificial Sequence
  Synthetic oligonucleotide
caaaccgtttgagcgactaaggaaggatatgtacgga

SEQ ID NO: 7731 - DNA, 35 bp, Artificial Sequence
  Synthetic oligonucleotide
catgtgcaccggtcgtgagtaggtgtcatgactag

SEQ ID NO: 7732 - DNA, 38 bp, Artificial Sequence
  Synthetic oligonucleotide
cgaaccgacgttaggcatccggtgtcatccgtgcgtga

SEQ ID NO: 7733 - DNA, 36 bp, Artificial Sequence
  Synthetic oligonucleotide
cgcccccccgccctctcccatggcgatgttcgcaca

SEQ ID NO: 7734 - DNA, 37 bp, Artificial Sequence
  Synthetic oligonucleotide
ctacaggctaagtttacggcatccaggggactgcgga

SEQ ID NO: 7735 - DNA, 35 bp, Artificial Sequence
  Synthetic oligonucleotide
ctctgacttggctaactgcagagtgagaggcgatt

SEQ ID NO: 7736 - DNA, 37 bp, Artificial Sequence
  Synthetic oligonucleotide
gaaagcctcagccagggggcaatgggctttgtggtga

SEQ ID NO: 7737 - DNA, 37 bp, Artificial Sequence
  Synthetic oligonucleotide
gacaaagtgttcgattggataccgtcttgcgacacga

SEQ ID NO: 7738 - DNA, 38 bp, Artificial Sequence
  Synthetic oligonucleotide
gacccatcggcttggttcagagcccgggatgcccgtga

SEQ ID NO: 7739 - DNA, 37 bp, Artificial Sequence
  Synthetic oligonucleotide
gaccgcggttctataagaaaacaggggtgaccggata

SEQ ID NO: 7740 - DNA, 38 bp, Artificial Sequence
  Synthetic oligonucleotide
gagccgcaagcctcctagcatttacgatcgaggcatga

SEQ ID NO: 7741 - DNA, 36 bp, Artificial Sequence
  Synthetic oligonucleotide
gagggcatcaactgatcctggcccatggctgttgca

SEQ ID NO: 7742 - DNA, 36 bp, Artificial Sequence
  Synthetic oligonucleotide
gagtaccggaggcacaatttatggggctggacctca

SEQ ID NO: 7743 - DNA, 36 bp, Artificial Sequence
  Synthetic oligonucleotide
gatcgtcgtattgaacaatatcaggtagaggctcta

SEQ ID NO: 7744 - DNA, 37 bp, Artificial Sequence
  Synthetic oligonucleotide
gattcgtaacggagtaatgtcttgataacgttagcga

SEQ ID NO: 7745 - DNA, 37 bp, Artificial Sequence
  Synthetic oligonucleotide
gcatcatgagggctaccatggtttcccccgacaggga

SEQ ID NO: 7746 - DNA, 38 bp, Artificial Sequence
  Synthetic oligonucleotide
gcattggttgggaaaagtcttgaatgataaggccttga

SEQ ID NO: 7747 - DNA, 38 bp, Artificial Sequence
  Synthetic oligonucleotide
gccgcaccgcttagttcattgtgtgtttcgaatactga

SEQ ID NO: 7748 - DNA, 35 bp, Artificial Sequence
  Synthetic oligonucleotide
gcgtttccgctaacatcattcaaagtccgcccatt

SEQ ID NO: 7749 - DNA, 36 bp, Artificial Sequence
  Synthetic oligonucleotide
gctgagtgtgtctgatcatgcggggatttgcactta

SEQ ID NO: 7750 - DNA, 35 bp, Artificial Sequence
  Synthetic oligonucleotide
gcttacgaaacgcctggtaatgccgctgactttac

SEQ ID NO: 7751 - DNA, 36 bp, Artificial Sequence
  Synthetic oligonucleotide
gcttccgggggtgtgttaaagattggacttatcgaa

SEQ ID NO: 7752 - DNA, 36 bp, Artificial Sequence
  Synthetic oligonucleotide
gggagagtgaaataatgtacggagacttaatttcta

SEQ ID NO: 7753 - DNA, 35 bp, Artificial Sequence
  Synthetic oligonucleotide
gggaggtgaagtgactacccgaggggtgtcgcgga

SEQ ID NO: 7754 - DNA, 35 bp, Artificial Sequence
  Synthetic oligonucleotide
gggggaacgcacaacggacacctcaggggagttga

SEQ ID NO: 7755 - DNA, 36 bp, Artificial Sequence
  Synthetic oligonucleotide
ggtacgtaggtgctgttatataacttttcgttatga

SEQ ID NO: 7756 - DNA, 37 bp, Artificial Sequence
  Synthetic oligonucleotide
ggtctattcgcaatcaagggttaagaatagaaaacga

SEQ ID NO: 7757 - DNA, 35 bp, Artificial Sequence
  Synthetic oligonucleotide
ggtgattgatagcaaaatttacgcgccaacggatg

SEQ ID NO: 7758 - DNA, 38 bp, Artificial Sequence
  Synthetic oligonucleotide
gtagagtatacgtattggtttcgtgctggtctttatga

SEQ ID NO: 7759 - DNA, 37 bp, Artificial Sequence
  Synthetic oligonucleotide
gtcatgcgaataattaaccgtaaaacatccggggcga

SEQ ID NO: 7760 - DNA, 37 bp, Artificial Sequence
  Synthetic oligonucleotide
gttcctgcgcgcccgagatctacgccttagcaaccga

SEQ ID NO: 7761 - DNA, 35 bp, Artificial Sequence
  Synthetic oligonucleotide
gttgggcggtgcgtacgatcgcaaaccgcaacctt

SEQ ID NO: 7762 - DNA, 35 bp, Artificial Sequence
  Synthetic oligonucleotide
gttgtatgcatgtatacctgtagtcttgtacgttc

SEQ ID NO: 7763 - DNA, 36 bp, Artificial Sequence
  Synthetic oligonucleotide
gtttcactgtgtgtctcggacattgttggttacata

SEQ ID NO: 7764 - DNA, 35 bp, Artificial Sequence
  Synthetic oligonucleotide
taaatcctagaaagaggggcaagatacgtcgtcat

SEQ ID NO: 7765 - DNA, 35 bp, Artificial Sequence
  Synthetic oligonucleotide
taattcgcacagacttgtggaggcaatttaaaacg

SEQ ID NO: 7766 - DNA, 38 bp, Artificial Sequence
  Synthetic oligonucleotide
tacaccctgggtgtgtatgaacgggtgttcgttcttga

SEQ ID NO: 7767 - DNA, 36 bp, Artificial Sequence
  Synthetic oligonucleotide
tacatttgcgctagtgtaaccggccgttaacaagta

SEQ ID NO: 7768 - DNA, 35 bp, Artificial Sequence
  Synthetic oligonucleotide
tagacggttgtgtagatgtgctaagcgacaatcga

SEQ ID NO: 7769 - DNA, 38 bp, Artificial Sequence
  Synthetic oligonucleotide
tagactgcgtgtggctgtactagcttcaacacgcgtga

SEQ ID NO: 7770 - DNA, 35 bp, Artificial Sequence
  Synthetic oligonucleotide
tagcgccttccctgccgggcgaaaaaagcctgtgc

SEQ ID NO: 7771 - DNA, 36 bp, Artificial Sequence
  Synthetic oligonucleotide
taggcgtcgcccaatctctgtgtgcagggcccacta

SEQ ID NO: 7772 - DNA, 38 bp, Artificial Sequence
  Synthetic oligonucleotide
taggtcaagcactgcatatacgtggatttccacgctga

SEQ ID NO: 7773 - DNA, 37 bp, Artificial Sequence
  Synthetic oligonucleotide
tatacccgatacatgtgcggatgtcacgcggccatga

SEQ ID NO: 7774 - DNA, 35 bp, Artificial Sequence
  Synthetic oligonucleotide
tccaacaagaacgggcaaactgggaaccgagggtc

SEQ ID NO: 7775 - DNA, 36 bp, Artificial Sequence
  Synthetic oligonucleotide
tccccgcaataaggtagactgcgaaagacatacaga

SEQ ID NO: 7776 - DNA, 38 bp, Artificial Sequence
  Synthetic oligonucleotide
tcgtggtttataatgcgcacactgtaccctcgctgtga

SEQ ID NO: 7777 - DNA, 38 bp, Artificial Sequence
  Synthetic oligonucleotide
tgagttcaagttctcgcataacatgaccctgcgtttga

SEQ ID NO: 7778 - DNA, 36 bp, Artificial Sequence
  Synthetic oligonucleotide
tgcaccatcacatcgtccgagtacgttcggggtgaa

SEQ ID NO: 7779 - DNA, 35 bp, Artificial Sequence
  Synthetic oligonucleotide
tgccacaaagacgcgagctatcgagaccggcgatg

SEQ ID NO: 7780 - DNA, 36 bp, Artificial Sequence
  Synthetic oligonucleotide
tggttgcccgcccgtacgcctagatcgatgggcaca

SEQ ID NO: 7781 - DNA, 38 bp, Artificial Sequence
  Synthetic oligonucleotide
tgtaccaaacgatgccgaggtgtatgggagtgcggtga

SEQ ID NO: 7782 - DNA, 37 bp, Artificial Sequence
  Synthetic oligonucleotide
tgtctgtcagggagaatgggagcttctagctattaga

SEQ ID NO: 7783 - DNA, 35 bp, Artificial Sequence
  Synthetic oligonucleotide
ttactgtcatgattccgaaatcttcctatggaacg

SEQ ID NO: 7784 - DNA, 38 bp, Artificial Sequence
  Synthetic oligonucleotide
ttcgttcgccttccacaccgtatgagtgccacctatga

SEQ ID NO: 7785 - DNA, 35 bp, Artificial Sequence
  Synthetic oligonucleotide
ttgcagtatcttcggtcagaactcggggtgaacta

SEQ ID NO: 7786 - DNA, 37 bp, Artificial Sequence
  Synthetic oligonucleotide
ttgcgacgcgttcaatggcatacttatatagcggaga

SEQ ID NO: 7787 - DNA, 38 bp, Artificial Sequence
  Synthetic oligonucleotide
ttggtaccagaggtaggctagaagcgttgggaccttga

SEQ ID NO: 7788 - DNA, 38 bp, Artificial Sequence
  Synthetic oligonucleotide
ttggttcagacaaccgaacgacttcttgggaaggttga

SEQ ID NO: 7789 - DNA, 37 bp, Artificial Sequence
  Synthetic oligonucleotide
ttgtctccatcctgtaaggtgtattggtcgtccagga

SEQ ID NO: 7790 - DNA, 36 bp, Artificial Sequence
  Synthetic oligonucleotide
tgataaacgtccgaaggtgaaggcataccaccctta

SEQ ID NO: 7791 - DNA, 35 bp, Artificial Sequence
  Synthetic oligonucleotide
aatccagtatagtttccaatcctgagcattccgtg

SEQ ID NO: 7792 - DNA, 35 bp, Artificial Sequence
  Synthetic oligonucleotide
attgagaatagcgtgacgtgagttgccaccgcgag

SEQ ID NO: 7793 - DNA, 38 bp, Artificial Sequence
  Synthetic oligonucleotide
cacggtcgcgactagccggcgagtgaagtactccatga

SEQ ID NO: 7794 - DNA, 38 bp, Artificial Sequence
  Synthetic oligonucleotide
gacgccatgatttgcgtctagtcacgtatcgtcaatga

SEQ ID NO: 7795 - DNA, 35 bp, Artificial Sequence
  Synthetic oligonucleotide
ttcacgggtactgtagcacgaccgtaagttaaaca

SEQ ID NO: 7796 - DNA, 37 bp, Artificial Sequence
  Synthetic oligonucleotide
accgacaagctgtggtaggagtccttatattgtccga

SEQ ID NO: 7797 - DNA, 38 bp, Artificial Sequence
  Synthetic oligonucleotide
aacccggagctctgcaaagtgtcagcagttatggttga

SEQ ID NO: 7798 - DNA, 35 bp, Artificial Sequence
  Synthetic oligonucleotide
acaataaattacgtactatgttgtatgaaaggcgc

SEQ ID NO: 7799 - DNA, 36 bp, Artificial Sequence
  Synthetic oligonucleotide
acctgcaagggtcgaccaatctcgtgtccgcgccga

SEQ ID NO: 7800 - DNA, 37 bp, Artificial Sequence
  Synthetic oligonucleotide
atgacgcccagaagcgcaaatggacggttattcagga

SEQ ID NO: 7801 - DNA, 36 bp, Artificial Sequence
  Synthetic oligonucleotide
gcgagtcacaggcggtgctataggctacagattaga

SEQ ID NO: 7802 - DNA, 35 bp, Artificial Sequence
  Synthetic oligonucleotide
gctcctgctcgttatcgccgcgagacgtttagtga

SEQ ID NO: 7803 - DNA, 37 bp, Artificial Sequence
  Synthetic oligonucleotide
ggaacacatatgcttgcttcagtactacggtagacga

SEQ ID NO: 7804 - DNA, 38 bp, Artificial Sequence
  Synthetic oligonucleotide
ggggaggcgctacgttagcttaacccgttccagtctga

SEQ ID NO: 7805 - DNA, 35 bp, Artificial Sequence
  Synthetic oligonucleotide
gtggggggacgtgattacaccgaggggactacaga

SEQ ID NO: 7806 - DNA, 38 bp, Artificial Sequence
  Synthetic oligonucleotide
tcagtttgggaacgttataatacagttccaataagtga

SEQ ID NO: 7807 - DNA, 37 bp, Artificial Sequence
  Synthetic oligonucleotide
tgtaggtccccgccacactagattgcggtcataacga

SEQ ID NO: 7808 - DNA, 35 bp, Artificial Sequence
  Synthetic oligonucleotide
ttgaaccgcgccgagtgggagaagtgccccccact

SEQ ID NO: 7809 - DNA, 36 bp, Artificial Sequence
  Synthetic oligonucleotide
ttgcacttcggtgtcatggggttacggccggtccaa

SEQ ID NO: 7810 - DNA, 35 bp, Artificial Sequence
  Synthetic oligonucleotide
gagctcccccccagatgtccatacgtgtcacacga

SEQ ID NO: 7811 - DNA, 35 bp, Artificial Sequence
  Synthetic oligonucleotide
aatgtcagttccggattccgactttgtggacttaa

SEQ ID NO: 7812 - DNA, 36 bp, Artificial Sequence
  Synthetic oligonucleotide
acaaagcggagtgtatcgggtagtcggtgattttta

SEQ ID NO: 7813 - DNA, 35 bp, Artificial Sequence
  Synthetic oligonucleotide
acatgttttacagtcggaaacaagatgctgcgaaa

SEQ ID NO: 7814 - DNA, 35 bp, Artificial Sequence
  Synthetic oligonucleotide
acgggcaaatgggtgcaagtaacacccccctactc

SEQ ID NO: 7815 - DNA, 36 bp, Artificial Sequence
  Synthetic oligonucleotide
agacgtacctggctgccctatcatagacgtgtaaaa

SEQ ID NO: 7816 - DNA, 35 bp, Artificial Sequence
  Synthetic oligonucleotide
agaggaggacccgaaccgtcgctacgaaggttatg

SEQ ID NO: 7817 - DNA, 36 bp, Artificial Sequence
  Synthetic oligonucleotide
agatcagaactgcagtatcggctatcccgaacaggg

SEQ ID NO: 7818 - DNA, 36 bp, Artificial Sequence
  Synthetic oligonucleotide
aggtagatgaacattaagaatctacacagtgcggaa

SEQ ID NO: 7819 - DNA, 37 bp, Artificial Sequence
  Synthetic oligonucleotide
agtacactagtcagaaaccgcgctaattgccccacga

SEQ ID NO: 7820 - DNA, 36 bp, Artificial Sequence
  Synthetic oligonucleotide
agttcgcttcgcccccttgttgactaatgtaaaaaa

SEQ ID NO: 7821 - DNA, 36 bp, Artificial Sequence
  Synthetic oligonucleotide
atatcatgcgcacagaagggtctttatgggaaccaa

SEQ ID NO: 7822 - DNA, 38 bp, Artificial Sequence
  Synthetic oligonucleotide
atgagacacagctcctacttgggatttgtgaccaatga

SEQ ID NO: 7823 - DNA, 35 bp, Artificial Sequence
  Synthetic oligonucleotide
catgcgagttcgtccagaatgtttaacatctctta

SEQ ID NO: 7824 - DNA, 35 bp, Artificial Sequence
  Synthetic oligonucleotide
ccataccgtattcgctccttggacgtagctgagtc

SEQ ID NO: 7825 - DNA, 38 bp, Artificial Sequence
  Synthetic oligonucleotide
cgcagtccaggtgctcaggtaagctcgttctaccttga

SEQ ID NO: 7826 - DNA, 37 bp, Artificial Sequence
  Synthetic oligonucleotide
ctatcaattgtacagcaatcatgatctacggtaatga

SEQ ID NO: 7827 - DNA, 37 bp, Artificial Sequence
  Synthetic oligonucleotide
gaagcactgaccaggattgtccgctcccggtatggga

SEQ ID NO: 7828 - DNA, 37 bp, Artificial Sequence
  Synthetic oligonucleotide
gaataccgttaaccgctgtcgaacttacctgggatga

SEQ ID NO: 7829 - DNA, 37 bp, Artificial Sequence
  Synthetic oligonucleotide
gaatggtttctgcctgacccagtaggtgttacccaga

SEQ ID NO: 7830 - DNA, 35 bp, Artificial Sequence
  Synthetic oligonucleotide
gacgatgaggggggcaaggagcctaacattttaga

SEQ ID NO: 7831 - DNA, 38 bp, Artificial Sequence
  Synthetic oligonucleotide
gagctagactgggtaatatgttggcacagagcctctga

SEQ ID NO: 7832 - DNA, 38 bp, Artificial Sequence
  Synthetic oligonucleotide
gagggcgcacgtaatccagtctgttagtgggtgaatga

SEQ ID NO: 7833 - DNA, 35 bp, Artificial Sequence
  Synthetic oligonucleotide
gaggtatcgctaggcgaggagatacgtgacgctgt

SEQ ID NO: 7834 - DNA, 35 bp, Artificial Sequence
  Synthetic oligonucleotide
gagtgtactgcggtccagggttatggggttggcta

SEQ ID NO: 7835 - DNA, 38 bp, Artificial Sequence
  Synthetic oligonucleotide
gccaaatgtagtcatgctgtcccatagttggagagtga

SEQ ID NO: 7836 - DNA, 37 bp, Artificial Sequence
  Synthetic oligonucleotide
gcctgcaagtactttcgtattgagtctagagcggaga

SEQ ID NO: 7837 - DNA, 35 bp, Artificial Sequence
  Synthetic oligonucleotide
gcgatgcatcattaggtctgttgcagctacgtgtg

SEQ ID NO: 7838 - DNA, 36 bp, Artificial Sequence
  Synthetic oligonucleotide
gcgtaccgctagatcataattacccgccgttgacta

SEQ ID NO: 7839 - DNA, 36 bp, Artificial Sequence
  Synthetic oligonucleotide
gctagtgacgctgcgtactatgaatggattgtaaca

SEQ ID NO: 7840 - DNA, 37 bp, Artificial Sequence
  Synthetic oligonucleotide
gctttgtgtacgccaagaggtcaggatgtacatagga

SEQ ID NO: 7841 - DNA, 37 bp, Artificial Sequence
  Synthetic oligonucleotide
ggtaccagtcctaaatgtgccgcctcccccatgtaga

SEQ ID NO: 7842 - DNA, 37 bp, Artificial Sequence
  Synthetic oligonucleotide
ggtgaaaatcaaggctagcgatacgcttgggaaaaga

SEQ ID NO: 7843 - DNA, 36 bp, Artificial Sequence
  Synthetic oligonucleotide
ggttcccagccataggaatgcccagggataagcata

SEQ ID NO: 7844 - DNA, 36 bp, Artificial Sequence
  Synthetic oligonucleotide
ggttctcctgagtcacgtccgttaggccctttcgta

SEQ ID NO: 7845 - DNA, 35 bp, Artificial Sequence
  Synthetic oligonucleotide
gtgaggcgcgctgaaatcgttgaactgcagaattc

SEQ ID NO: 7846 - DNA, 36 bp, Artificial Sequence
  Synthetic oligonucleotide
gtgatatctgtacgatagcccccctgcccctgcgca

SEQ ID NO: 7847 - DNA, 31 bp, Artificial Sequence
  Synthetic oligonucleotide
gtgtttccaaaaggtgagcggcaaacgtgaa

SEQ ID NO: 7848 - DNA, 35 bp, Artificial Sequence
  Synthetic oligonucleotide
gttaccaggttggcttaacgtagctgagtaatata

SEQ ID NO: 7849 - DNA, 38 bp, Artificial Sequence
  Synthetic oligonucleotide
gttgaggatctagtcaagcacgatagacctatttctga

SEQ ID NO: 7850 - DNA, 37 bp, Artificial Sequence
  Synthetic oligonucleotide
taaaaaaggcgcttcttccaaaggccatacctttgga

SEQ ID NO: 7851 - DNA, 36 bp, Artificial Sequence
  Synthetic oligonucleotide
taatcgaagcatacttactattcatcatgcagtgga

SEQ ID NO: 7852 - DNA, 37 bp, Artificial Sequence
  Synthetic oligonucleotide
tagtctgctaatatggcgggcggattgcaattcgaga

SEQ ID NO: 7853 - DNA, 38 bp, Artificial Sequence
  Synthetic oligonucleotide
tatggatatggggttgtcagctaaatatttaggcgtga

SEQ ID NO: 7854 - DNA, 35 bp, Artificial Sequence
  Synthetic oligonucleotide
tcgctgatcgcatcgtgatggcggaccagctatta

SEQ ID NO: 7855 - DNA, 36 bp, Artificial Sequence
  Synthetic oligonucleotide
tgaccaacgctgaggcctggacgatctctactccta

SEQ ID NO: 7856 - DNA, 35 bp, Artificial Sequence
  Synthetic oligonucleotide
tgccgactagcttcgtagattatcgcattctatgt

SEQ ID NO: 7857 - DNA, 35 bp, Artificial Sequence
  Synthetic oligonucleotide
tgtagagatgacacacgatcgtctgcctgtcggga

SEQ ID NO: 7858 - DNA, 36 bp, Artificial Sequence
  Synthetic oligonucleotide
ttagcacttcagtaatagcgacggcgatacatcgaa

SEQ ID NO: 7859 - DNA, 37 bp, Artificial Sequence
  Synthetic oligonucleotide
ttcacggtgtgtgtataaagcaacgcacataaataga

SEQ ID NO: 7860 - DNA, 38 bp, Artificial Sequence
  Synthetic oligonucleotide
ttgacgaccgtcgtgaatgtataccagttaggcaatga

SEQ ID NO: 7861 - DNA, 35 bp, Artificial Sequence
  Synthetic oligonucleotide
aaggcctatacttggtattcaggcttatcgaactg

SEQ ID NO: 7862 - DNA, 36 bp, Artificial Sequence
  Synthetic oligonucleotide
gcctatccaagaatgtacaagggatccggacacgaa

SEQ ID NO: 7863 - DNA, 37 bp, Artificial Sequence
  Synthetic oligonucleotide
gtcatgcctccccccgcccaccttgaaaacatattga

SEQ ID NO: 7864 - DNA, 37 bp, Artificial Sequence
  Synthetic oligonucleotide
gaatcccactgggaccgcaggatgccagtccttgtga

SEQ ID NO: 7865 - DNA, 35 bp, Artificial Sequence
  Synthetic oligonucleotide
gccctaggtgataatgcagtaggctagcttaagga

SEQ ID NO: 7866 - DNA, 36 bp, Artificial Sequence
  Synthetic oligonucleotide
gcgccgctcgtgtcacgagccgataaatctcgccta

SEQ ID NO: 7867 - DNA, 35 bp, Artificial Sequence
  Synthetic oligonucleotide
ggtaggctcttaagcgtctcgatactacgactatt

SEQ ID NO: 7868 - DNA, 35 bp, Artificial Sequence
  Synthetic oligonucleotide
tctctcacatatgtatctgctgagaatgccccgca

SEQ ID NO: 7869 - DNA, 35 bp, Artificial Sequence
  Synthetic oligonucleotide
tgacggcgtctgagcttcagaattctcgtgtataa

SEQ ID NO: 7870 - DNA, 38 bp, Artificial Sequence
  Synthetic oligonucleotide
ttcgaatcgtccgttgttgtttacgtgacgcacgatga

SEQ ID NO: 7871 - DNA, 36 bp, Artificial Sequence
  Synthetic oligonucleotide
acgacctggtcaagaaaagtgggtttgaaaatgcga

SEQ ID NO: 7872 - DNA, 38 bp, Artificial Sequence
  Synthetic oligonucleotide
tatgcatggtgcgtattcacgcatgtcgctttggctga

SEQ ID NO: 7873 - DNA, 35 bp, Artificial Sequence
  Synthetic oligonucleotide
acaggcgtagtagggcgctcatgccgttgttcgta

SEQ ID NO: 7874 - DNA, 37 bp, Artificial Sequence
  Synthetic oligonucleotide
agtccgcgatatgccaggtatcggaatagtcgcacga

SEQ ID NO: 7875 - DNA, 36 bp, Artificial Sequence
  Synthetic oligonucleotide
ataggcggactgcagcatggttggaaggggtcgata

SEQ ID NO: 7876 - DNA, 38 bp, Artificial Sequence
  Synthetic oligonucleotide
gcaacgcgccacattcatgtggataggtcaactcttga

SEQ ID NO: 7877 - DNA, 36 bp, Artificial Sequence
  Synthetic oligonucleotide
gctgagggtgtccaacgggtaataacgcaggtgcta

SEQ ID NO: 7878 - DNA, 36 bp, Artificial Sequence
  Synthetic oligonucleotide
gctgcattgaaacatgggagctagcttcgctactta

SEQ ID NO: 7879 - DNA, 36 bp, Artificial Sequence
  Synthetic oligonucleotide
gctggtctgtttcgcgagacttgtcattgaactgaa

SEQ ID NO: 7880 - DNA, 36 bp, Artificial Sequence
  Synthetic oligonucleotide
taacgtacaggctcactgttacacgagtcctggaaa

SEQ ID NO: 7881 - DNA, 37 bp, Artificial Sequence
  Synthetic oligonucleotide
tatgtcacttggcctgatctggacaatcactgggtga

SEQ ID NO: 7882 - DNA, 36 bp, Artificial Sequence
  Synthetic oligonucleotide
tattggcgcacttagaaaaagtgacgatttttcgga

SEQ ID NO: 7883 - DNA, 35 bp, Artificial Sequence
  Synthetic oligonucleotide
ttgagccaaaagaatgcgcaccgcttccattttgt

SEQ ID NO: 7884 - DNA, 35 bp, Artificial Sequence
  Synthetic oligonucleotide
tttggatcagctatttggctcggtttgttcaccaa

SEQ ID NO: 7885 - DNA, 35 bp, Artificial Sequence
  Synthetic oligonucleotide
aagtgcagtcctatggggaatgagctggaagacca

SEQ ID NO: 7886 - DNA, 37 bp, Artificial Sequence
  Synthetic oligonucleotide
gtcatgattggccgaatccagtacaatgtatgggcga

SEQ ID NO: 7887 - DNA, 35 bp, Artificial Sequence
  Synthetic oligonucleotide
catgcgccgccctccagagaactccccccaaaccg

SEQ ID NO: 7888 - DNA, 38 bp, Artificial Sequence
  Synthetic oligonucleotide
gtacgttcaacggttgtcccagttggtactggtaatga

SEQ ID NO: 7889 - DNA, 35 bp, Artificial Sequence
  Synthetic oligonucleotide
aaccgagtacggatgatcggcccgatagggcgact

SEQ ID NO: 7890 - DNA, 35 bp, Artificial Sequence
  Synthetic oligonucleotide
aactcgatgcgaacgtgccgcgcgaagctctcatg

SEQ ID NO: 7891 - DNA, 38 bp, Artificial Sequence
  Synthetic oligonucleotide
aagttactggtggtcgttcgtctatgcggaccacttga

SEQ ID NO: 7892 - DNA, 38 bp, Artificial Sequence
  Synthetic oligonucleotide
acacaagagcatgcgttaggtgctctgatacatattga

SEQ ID NO: 7893 - DNA, 35 bp, Artificial Sequence
  Synthetic oligonucleotide
acatactacaaaccatctacagcattgggcataag

SEQ ID NO: 7894 - DNA, 35 bp, Artificial Sequence
  Synthetic oligonucleotide
accgcttatagggattcacatagagcctggtgact

SEQ ID NO: 7895 - DNA, 37 bp, Artificial Sequence
  Synthetic oligonucleotide
acgtactaaagggttcatcgatttacgtttgagtgga

SEQ ID NO: 7896 - DNA, 36 bp, Artificial Sequence
  Synthetic oligonucleotide
actgcgggccatagcggggaagagtggcatgattaa

SEQ ID NO: 7897 - DNA, 35 bp, Artificial Sequence
  Synthetic oligonucleotide
acttacttagcacgatgacgtcaagtcaggttagc

SEQ ID NO: 7898 - DNA, 38 bp, Artificial Sequence
  Synthetic oligonucleotide
agacgtgaaggtttatttgaagctcgaaggtaggctga

SEQ ID NO: 7899 - DNA, 37 bp, Artificial Sequence
  Synthetic oligonucleotide
catgcgtcgaggcgtggattacgtaagaatgcaaaga

SEQ ID NO: 7900 - DNA, 36 bp, Artificial Sequence
  Synthetic oligonucleotide
gaacttgcgtactccagcaaggtggttcctgtgata

SEQ ID NO: 7901 - DNA, 38 bp, Artificial Sequence
  Synthetic oligonucleotide
gaagtccagtgatatcatggtgagtctctgacacgtga

SEQ ID NO: 7902 - DNA, 38 bp, Artificial Sequence
  Synthetic oligonucleotide
gctcgcaggcaatcagcacggcctgctgtgctagatga

SEQ ID NO: 7903 - DNA, 37 bp, Artificial Sequence
  Synthetic oligonucleotide
ggagtagctgggtcctcaaactcgtactcgggataga

SEQ ID NO: 7904 - DNA, 38 bp, Artificial Sequence
  Synthetic oligonucleotide
ggtcccggctctaaagcccgaaggtttcttagtggtga

SEQ ID NO: 7905 - DNA, 37 bp, Artificial Sequence
  Synthetic oligonucleotide
gtaaacgtggaacagtcactagtgtttatgtggtgga

SEQ ID NO: 7906 - DNA, 35 bp, Artificial Sequence
  Synthetic oligonucleotide
gtaacctgggatggatcggatacgtttaacttggt

SEQ ID NO: 7907 - DNA, 37 bp, Artificial Sequence
  Synthetic oligonucleotide
gtatcccaacgatacccggcgggtcaatggcggaaga

SEQ ID NO: 7908 - DNA, 36 bp, Artificial Sequence
  Synthetic oligonucleotide
gttactgacggttacgtgcgtaggctagggtgccaa

SEQ ID NO: 7909 - DNA, 38 bp, Artificial Sequence
  Synthetic oligonucleotide
taacacgaccgggcgtattggcaatcgtagctcattga

SEQ ID NO: 7910 - DNA, 36 bp, Artificial Sequence
  Synthetic oligonucleotide
tacaagacctgggtcgtgagatgaccatggtactga

SEQ ID NO: 7911 - DNA, 36 bp, Artificial Sequence
  Synthetic oligonucleotide
tacggcgtgggctgtccatgccggatatgacacaga

SEQ ID NO: 7912 - DNA, 35 bp, Artificial Sequence
  Synthetic oligonucleotide
tcacgtggcatgacgcgttggttgagccaattaga

SEQ ID NO: 7913 - DNA, 36 bp, Artificial Sequence
  Synthetic oligonucleotide
tcctgcaggctccactggcgttagataatagttgaa

SEQ ID NO: 7914 - DNA, 37 bp, Artificial Sequence
  Synthetic oligonucleotide
tccttcatgcgccaaaaagcacttgtgtgtagtacga

SEQ ID NO: 7915 - DNA, 36 bp, Artificial Sequence
  Synthetic oligonucleotide
caataatgacgactgcaaaacgcaaacacccgagca

SEQ ID NO: 7916 - DNA, 37 bp, Artificial Sequence
  Synthetic oligonucleotide
ggtcacacggacagtattgctcgattgcaatattgga

SEQ ID NO: 7917 - DNA, 36 bp, Artificial Sequence
  Synthetic oligonucleotide
taccgcagttaatggttatgaacggctattcatgca

SEQ ID NO: 7918 - DNA, 35 bp, Artificial Sequence
  Synthetic oligonucleotide
tggtagttacgtactaccgagataggcggtctggc

SEQ ID NO: 7919 - DNA, 36 bp, Artificial Sequence
  Synthetic oligonucleotide
tgttttgctacagggatacacgagaccttgggaaga

SEQ ID NO: 7920 - DNA, 37 bp, Artificial Sequence
  Synthetic oligonucleotide
ttaatactgccaatcagtacttaagtgaaccggtcga

SEQ ID NO: 7921 - DNA, 38 bp, Artificial Sequence
  Synthetic oligonucleotide
ttgtcgaggtagtccagcagtcctcgtaacattcatga

SEQ ID NO: 7922 - DNA, 35 bp, Artificial Sequence
  Synthetic oligonucleotide
gacaccgctatcattatctcacagcacggagccta

SEQ ID NO: 7923 - DNA, 38 bp, Artificial Sequence
  Synthetic oligonucleotide
acgtgcgtaaacctggtcatatggcgtatggatattga

SEQ ID NO: 7924 - DNA, 36 bp, Artificial Sequence
  Synthetic oligonucleotide
aaaagcggactcagcgatgctaaaaactagcggaaa

SEQ ID NO: 7925 - DNA, 38 bp, Artificial Sequence
  Synthetic oligonucleotide
aaggtacgaaccgcagtaagaaacgttccgtgcactga

SEQ ID NO: 7926 - DNA, 35 bp, Artificial Sequence
  Synthetic oligonucleotide
actgcggagtgtcggtcatccctagaccgactaag

SEQ ID NO: 7927 - DNA, 37 bp, Artificial Sequence
  Synthetic oligonucleotide
atccaagtagctacggactggaggagttggttggcga

SEQ ID NO: 7928 - DNA, 37 bp, Artificial Sequence
  Synthetic oligonucleotide
atttccttcggtgctactacaagtcatgctgatgcga

SEQ ID NO: 7929 - DNA, 34 bp, Artificial Sequence
  Synthetic oligonucleotide
gactctcttatgagattgcgggtaaaacacggta

SEQ ID NO: 7930 - DNA, 36 bp, Artificial Sequence
  Synthetic oligonucleotide
gagccgtttggagagactgacgttaagccataggga

SEQ ID NO: 7931 - DNA, 37 bp, Artificial Sequence
  Synthetic oligonucleotide
gagtcacactagggaacgtactgtgatgcagaaggga

SEQ ID NO: 7932 - DNA, 36 bp, Artificial Sequence
  Synthetic oligonucleotide
gataaggggtagggcaggcccgggcttatcactgta

SEQ ID NO: 7933 - DNA, 37 bp, Artificial Sequence
  Synthetic oligonucleotide
ggccgctattggactttgcagagacctaatcttctga

SEQ ID NO: 7934 - DNA, 37 bp, Artificial Sequence
  Synthetic oligonucleotide
ggttgacatcgcctcaactgagggagcgcgtttaaga

SEQ ID NO: 7935 - DNA, 35 bp, Artificial Sequence
  Synthetic oligonucleotide
gtttatggggggacacgcatttcaagacatgcagg

SEQ ID NO: 7936 - DNA, 36 bp, Artificial Sequence
  Synthetic oligonucleotide
taagcactgacgccatggggaggtcatggtatttta

SEQ ID NO: 7937 - DNA, 35 bp, Artificial Sequence
  Synthetic oligonucleotide
tacacatgctgatcattccatcgggtcatgtgcat

SEQ ID NO: 7938 - DNA, 35 bp, Artificial Sequence
  Synthetic oligonucleotide
tacgcaaggtgaatccttgtacgtacttatttgct

SEQ ID NO: 7939 - DNA, 37 bp, Artificial Sequence
  Synthetic oligonucleotide
tacgcttgcgaacactgtggatttgtttgtgtcctga

SEQ ID NO: 7940 - DNA, 37 bp, Artificial Sequence
  Synthetic oligonucleotide
tccagcaagttttgctcattacgacctggctacagga

SEQ ID NO: 7941 - DNA, 38 bp, Artificial Sequence
  Synthetic oligonucleotide
tctcccatgattctgcaacacaaggatcgtgggtatga

SEQ ID NO: 7942 - DNA, 36 bp, Artificial Sequence
  Synthetic oligonucleotide
tgacatggtgatatcttttcacatgacgcacgatga

SEQ ID NO: 7943 - DNA, 36 bp, Artificial Sequence
  Synthetic oligonucleotide
tgactggcttgacattgttaagtctaggttaatcca

SEQ ID NO: 7944 - DNA, 35 bp, Artificial Sequence
  Synthetic oligonucleotide
tgtaagtcacgaatggattatgacatcgccacaac

SEQ ID NO: 7945 - DNA, 37 bp, Artificial Sequence
  Synthetic oligonucleotide
tgtaatgccggcttgagatcatgcgttactggggtga

SEQ ID NO: 7946 - DNA, 37 bp, Artificial Sequence
  Synthetic oligonucleotide
ttaagtaactcgtgtgtaagcataagcgagaatagga

SEQ ID NO: 7947 - DNA, 36 bp, Artificial Sequence
  Synthetic oligonucleotide
ttcaagcaatggaccatctgatcgtttgtcgccgta

SEQ ID NO: 7948 - DNA, 36 bp, Artificial Sequence
  Synthetic oligonucleotide
ttcgttgagtgtgtcgccatggctcgatcttgagta

SEQ ID NO: 7949 - DNA, 37 bp, Artificial Sequence
  Synthetic oligonucleotide
gagccgcaagtcttttgaatggctgtacgtcctgtga

SEQ ID NO: 7950 - DNA, 36 bp, Artificial Sequence
  Synthetic oligonucleotide
ggtagataggggccaatggtttaaccttgctgacga

SEQ ID NO: 7951 - DNA, 37 bp, Artificial Sequence
  Synthetic oligonucleotide
tgtcggggacagtgactgaggtctctaccatgtgaga

SEQ ID NO: 7952 - DNA, 36 bp, Artificial Sequence
  Synthetic oligonucleotide
attgggcataggttacgtttagtaaggagctcacga

SEQ ID NO: 7953 - DNA, 36 bp, Artificial Sequence
  Synthetic oligonucleotide
ggaccggtagattcaagtctgtctggctagttgcta

SEQ ID NO: 7954 - DNA, 36 bp, Artificial Sequence
  Synthetic oligonucleotide
aaccgctttttactactccgcttaaagccgactgta

SEQ ID NO: 7955 - DNA, 35 bp, Artificial Sequence
  Synthetic oligonucleotide
aacggatttagatccttttcggactgacggttata

SEQ ID NO: 7956 - DNA, 37 bp, Artificial Sequence
  Synthetic oligonucleotide
actatagtgtcgccttcatggccctttggtggtagga

SEQ ID NO: 7957 - DNA, 35 bp, Artificial Sequence
  Synthetic oligonucleotide
acttatcagccaattcgtttagacccccaggggtg

SEQ ID NO: 7958 - DNA, 35 bp, Artificial Sequence
  Synthetic oligonucleotide
agcaggccaagttatactgtggattgcaaccgcta

SEQ ID NO: 7959 - DNA, 35 bp, Artificial Sequence
  Synthetic oligonucleotide
atggtatcgtaagtcaatacgtctaggatgggagt

SEQ ID NO: 7960 - DNA, 38 bp, Artificial Sequence
  Synthetic oligonucleotide
cctagtctgatgaatcgaccccgtactgctgaggctga

SEQ ID NO: 7961 - DNA, 37 bp, Artificial Sequence
  Synthetic oligonucleotide
cttgggtccgggtgaaccaaatcggtactacgaatga

SEQ ID NO: 7962 - DNA, 36 bp, Artificial Sequence
  Synthetic oligonucleotide
gagaagtagacagagcattgtctacgtgggaacgaa

SEQ ID NO: 7963 - DNA, 38 bp, Artificial Sequence
  Synthetic oligonucleotide
gagttgaaacgtctggtcgagcgggcggattgtcttga

SEQ ID NO: 7964 - DNA, 38 bp, Artificial Sequence
  Synthetic oligonucleotide
gatttagtgtggctaagcgcagtgccggccacttttga

SEQ ID NO: 7965 - DNA, 35 bp, Artificial Sequence
  Synthetic oligonucleotide
gcatggataggcttgcccaaaataagtactgatta

SEQ ID NO: 7966 - DNA, 38 bp, Artificial Sequence
  Synthetic oligonucleotide
gctacgtgagtgacgacgaaattcttcgcgcctactga

SEQ ID NO: 7967 - DNA, 35 bp, Artificial Sequence
  Synthetic oligonucleotide
ggaaggccgtgggttccaactacccgttattccaa

SEQ ID NO: 7968 - DNA, 35 bp, Artificial Sequence
  Synthetic oligonucleotide
gtaattaaagtgggatcatcgaaaaatgggcgcat

SEQ ID NO: 7969 - DNA, 35 bp, Artificial Sequence
  Synthetic oligonucleotide
gtacttcaatggctgtgaatactatattgtatgca

SEQ ID NO: 7970 - DNA, 35 bp, Artificial Sequence
  Synthetic oligonucleotide
gtgaaaacccataggctttggttggccacttccga

SEQ ID NO: 7971 - DNA, 37 bp, Artificial Sequence
  Synthetic oligonucleotide
gtgctgagggtgtaccgcattcgctggagggaacaga

SEQ ID NO: 7972 - DNA, 35 bp, Artificial Sequence
  Synthetic oligonucleotide
gttcggcgtacggggtcgtcccaacggcgatacag

SEQ ID NO: 7973 - DNA, 38 bp, Artificial Sequence
  Synthetic oligonucleotide
tacgccagtacgggcaacccaagagtaaatgacagtga

SEQ ID NO: 7974 - DNA, 35 bp, Artificial Sequence
  Synthetic oligonucleotide
tatggcgctgtgtgcggctgaagtacgtatgcaga

SEQ ID NO: 7975 - DNA, 37 bp, Artificial Sequence
  Synthetic oligonucleotide
tccacccggggaattccctcacacgggggtgattcga

SEQ ID NO: 7976 - DNA, 35 bp, Artificial Sequence
  Synthetic oligonucleotide
tccgttagttcgacacacaaggagggaaccgtggg

SEQ ID NO: 7977 - DNA, 35 bp, Artificial Sequence
  Synthetic oligonucleotide
tcgtcactgcccattatctcttagtttgtcgagag

SEQ ID NO: 7978 - DNA, 37 bp, Artificial Sequence
  Synthetic oligonucleotide
tctgaggggcgatcttgagtacactatgggacattga

SEQ ID NO: 7979 - DNA, 36 bp, Artificial Sequence
  Synthetic oligonucleotide
tgagctaagttttgggtgtaatgatgttcgccccca

SEQ ID NO: 7980 - DNA, 38 bp, Artificial Sequence
  Synthetic oligonucleotide
tgttcactacgccgtttcttccgccgtcgtatgactga

SEQ ID NO: 7981 - DNA, 35 bp, Artificial Sequence
  Synthetic oligonucleotide
ttcaattccgaatccagtggtgtatagcttgccta

SEQ ID NO: 7982 - DNA, 37 bp, Artificial Sequence
  Synthetic oligonucleotide
ttccaaaaggtcggttattatgacgaccatatcagga

SEQ ID NO: 7983 - DNA, 36 bp, Artificial Sequence
  Synthetic oligonucleotide
tttggagttctgcgtatgtgaacggcatgacgtaca

SEQ ID NO: 7984 - DNA, 38 bp, Artificial Sequence
  Synthetic oligonucleotide
atgctgacatggcgtgtacaatgtagtttagtggctga

SEQ ID NO: 7985 - DNA, 36 bp, Artificial Sequence
  Synthetic oligonucleotide
acagggcgattttggtagaaattcatgaaatacgta

SEQ ID NO: 7986 - DNA, 37 bp, Artificial Sequence
  Synthetic oligonucleotide
acatgtcctaacccgggttgatttttatgggtttgga

SEQ ID NO: 7987 - DNA, 35 bp, Artificial Sequence
  Synthetic oligonucleotide
agtaaaccgtcggtgcctgacttgaactggtagtg

SEQ ID NO: 7988 - DNA, 35 bp, Artificial Sequence
  Synthetic oligonucleotide
agtgtgagagagattcaatgatatgggtcacaata

SEQ ID NO: 7989 - DNA, 36 bp, Artificial Sequence
  Synthetic oligonucleotide
atacagtctatgcatatcaagcagtttgccattcaa

SEQ ID NO: 7990 - DNA, 38 bp, Artificial Sequence
  Synthetic oligonucleotide
atacctccggggacaagattcgagatactgccgcctga

SEQ ID NO: 7991 - DNA, 35 bp, Artificial Sequence
  Synthetic oligonucleotide
cgagtttgtataaacggagtagtgccaggtcgcct

SEQ ID NO: 7992 - DNA, 37 bp, Artificial Sequence
  Synthetic oligonucleotide
gcatattcatgccagatgaggcgcgagtgcgccttga

SEQ ID NO: 7993 - DNA, 38 bp, Artificial Sequence
  Synthetic oligonucleotide
gcccccgtgcttcccatgctgtttcgaagcagaagtga

SEQ ID NO: 7994 - DNA, 36 bp, Artificial Sequence
  Synthetic oligonucleotide
ggtacaggttagtcctttatgtggagccgctagtta

SEQ ID NO: 7995 - DNA, 35 bp, Artificial Sequence
  Synthetic oligonucleotide
gtctggagtggcctcttctccgccgagtctggttg

SEQ ID NO: 7996 - DNA, 37 bp, Artificial Sequence
  Synthetic oligonucleotide
gttcgacatatgaattgcacgtaggaaaccacattga

SEQ ID NO: 7997 - DNA, 38 bp, Artificial Sequence
  Synthetic oligonucleotide
tcaagggacatgcctttgtgagcaggctgatatgctga

SEQ ID NO: 7998 - DNA, 35 bp, Artificial Sequence
  Synthetic oligonucleotide
tccggaatgaatggagggagtcgaaactggaacag

SEQ ID NO: 7999 - DNA, 36 bp, Artificial Sequence
  Synthetic oligonucleotide
tgagatagccgaggtacgtcccaactgttcttcaca

SEQ ID NO: 8000 - DNA, 36 bp, Artificial Sequence
  Synthetic oligonucleotide
ttcggaccaagactggtgggggagtggccttccgga

SEQ ID NO: 8001 - DNA, 35 bp, Artificial Sequence
  Synthetic oligonucleotide
attgtacaagttgagccacctcctcgccctctggg

SEQ ID NO: 8002 - DNA, 38 bp, Artificial Sequence
  Synthetic oligonucleotide
gagccaagggggagctaaagcgatgataagcgctatga

SEQ ID NO: 8003 - DNA, 35 bp, Artificial Sequence
  Synthetic oligonucleotide
aaagtgcaaggtagagcttagcatacgtacgtagc

SEQ ID NO: 8004 - DNA, 35 bp, Artificial Sequence
  Synthetic oligonucleotide
agttggggcaaagcaaagtaagtcatcgaggttcg

SEQ ID NO: 8005 - DNA, 38 bp, Artificial Sequence
  Synthetic oligonucleotide
caaaggagctaactataacaaatcaggctcggtggtga

SEQ ID NO: 8006 - DNA, 36 bp, Artificial Sequence
  Synthetic oligonucleotide
gaggtgcctcacggaatgctgggtgattggatagta

SEQ ID NO: 8007 - DNA, 37 bp, Artificial Sequence
  Synthetic oligonucleotide
gatgtaaacgtctccgctacgtcgagtatcttagtga

SEQ ID NO: 8008 - DNA, 35 bp, Artificial Sequence
  Synthetic oligonucleotide
gccaaacatgaaagactggctggggtctggagtaa

SEQ ID NO: 8009 - DNA, 36 bp, Artificial Sequence
  Synthetic oligonucleotide
gccaagtatactgtacctgcaggtagcatggttgca

SEQ ID NO: 8010 - DNA, 36 bp, Artificial Sequence
  Synthetic oligonucleotide
taactggggtaattaatcattaggcataatgcctga

SEQ ID NO: 8011 - DNA, 37 bp, Artificial Sequence
  Synthetic oligonucleotide
tctctcctagtaccattgctgtagcaagtccagacga

SEQ ID NO: 8012 - DNA, 36 bp, Artificial Sequence
  Synthetic oligonucleotide
tgctggtcggggcacatgcctttttgagcgaatcaa

SEQ ID NO: 8013 - DNA, 35 bp, Artificial Sequence
  Synthetic oligonucleotide
acattcagggccggtgcggctggtactgtcctagt

SEQ ID NO: 8014 - DNA, 38 bp, Artificial Sequence
  Synthetic oligonucleotide
aggttaagcaatcaaaggcagttgccttataagggtga

SEQ ID NO: 8015 - DNA, 37 bp, Artificial Sequence
  Synthetic oligonucleotide
attcatgacggagaaaggagtttggtcaacctgcaga

SEQ ID NO: 8016 - DNA, 37 bp, Artificial Sequence
  Synthetic oligonucleotide
gtacgctcgagtgcaagcactttaaacaaggtaacga

SEQ ID NO: 8017 - DNA, 35 bp, Artificial Sequence
  Synthetic oligonucleotide
aagcaatcatgccggttttttgtacacgcaaaggt

SEQ ID NO: 8018 - DNA, 38 bp, Artificial Sequence
  Synthetic oligonucleotide
aaggtcgcgtggattgtaagagcccagcgatccattga

SEQ ID NO: 8019 - DNA, 35 bp, Artificial Sequence
  Synthetic oligonucleotide
aatcgcggcgttagctaacgtcctgcgcatcaacg

SEQ ID NO: 8020 - DNA, 38 bp, Artificial Sequence
  Synthetic oligonucleotide
acaatgaacgtactcaggcctgaaggttacgaatctga

SEQ ID NO: 8021 - DNA, 37 bp, Artificial Sequence
  Synthetic oligonucleotide
accaagaagtatggaaggcttttatagcagaaaatga

SEQ ID NO: 8022 - DNA, 36 bp, Artificial Sequence
  Synthetic oligonucleotide
acccgtctgatttgggggcgtgggccggaacccgta

SEQ ID NO: 8023 - DNA, 38 bp, Artificial Sequence
  Synthetic oligonucleotide
acgactctcatccaagaggttggatacttattatctga

SEQ ID NO: 8024 - DNA, 35 bp, Artificial Sequence
  Synthetic oligonucleotide
actgctgcaatagggttcggtaacgattatcgtga

SEQ ID NO: 8025 - DNA, 35 bp, Artificial Sequence
  Synthetic oligonucleotide
acttcacaccatcccgtgattggtggctgcagatc

SEQ ID NO: 8026 - DNA, 37 bp, Artificial Sequence
  Synthetic oligonucleotide
agaaccgtgcaagtaaacatgtcaagctgtttggcga

SEQ ID NO: 8027 - DNA, 37 bp, Artificial Sequence
  Synthetic oligonucleotide
agacagcactatccccctggtgagtgacgagatctga

SEQ ID NO: 8028 - DNA, 35 bp, Artificial Sequence
  Synthetic oligonucleotide
agatactcgaaatgaaggctatacataagtaggga

SEQ ID NO: 8029 - DNA, 35 bp, Artificial Sequence
  Synthetic oligonucleotide
agtcggatcagagggcctgctgctgggatcaccgg

SEQ ID NO: 8030 - DNA, 38 bp, Artificial Sequence
  Synthetic oligonucleotide
agttgacctgcagttttcatgggtaatcctagatttga

SEQ ID NO: 8031 - DNA, 36 bp, Artificial Sequence
  Synthetic oligonucleotide
atcgccagagggaaccaagtcacaacttagagcgga

SEQ ID NO: 8032 - DNA, 37 bp, Artificial Sequence
  Synthetic oligonucleotide
atcgcgggagagcgaaaccatcatgggagggacaaga

SEQ ID NO: 8033 - DNA, 35 bp, Artificial Sequence
  Synthetic oligonucleotide
atgaacactcagcaagagctcctttaatattcgtg

SEQ ID NO: 8034 - DNA, 36 bp, Artificial Sequence
  Synthetic oligonucleotide
atgcggctctaagggtattctgtactgtcagataaa

SEQ ID NO: 8035 - DNA, 38 bp, Artificial Sequence
  Synthetic oligonucleotide
atgggaaggctagccagctgtgccgtttcccctcgtga

SEQ ID NO: 8036 - DNA, 37 bp, Artificial Sequence
  Synthetic oligonucleotide
cagggcaatcatgcttcctcgccacttccaaattgga

SEQ ID NO: 8037 - DNA, 37 bp, Artificial Sequence
  Synthetic oligonucleotide
catacgttgagtcaggctttatgtgtactgagtaaga

SEQ ID NO: 8038 - DNA, 38 bp, Artificial Sequence
  Synthetic oligonucleotide
ccacctgcttcgtacgcgcaatggagacacgtaactga

SEQ ID NO: 8039 - DNA, 35 bp, Artificial Sequence
  Synthetic oligonucleotide
cgacctctcttcatatggttctagcggtactgact

SEQ ID NO: 8040 - DNA, 38 bp, Artificial Sequence
  Synthetic oligonucleotide
ctctcgtacagcaaaaggtaccggaagtggagacttga

SEQ ID NO: 8041 - DNA, 37 bp, Artificial Sequence
  Synthetic oligonucleotide
cttggggacgcatcatagtttatacatggttaactga

SEQ ID NO: 8042 - DNA, 38 bp, Artificial Sequence
  Synthetic oligonucleotide
gacgcatacggcatcactacagtggtgatgagaagtga

SEQ ID NO: 8043 - DNA, 35 bp, Artificial Sequence
  Synthetic oligonucleotide
gatatgctagatttctgcagagtacgggggtcttg

SEQ ID NO: 8044 - DNA, 35 bp, Artificial Sequence
  Synthetic oligonucleotide
gatgcttggcgcaggatcccgtgccaccagtacgt

SEQ ID NO: 8045 - DNA, 35 bp, Artificial Sequence
  Synthetic oligonucleotide
gcctgctcgtgagagatggcatacggttacggttc

SEQ ID NO: 8046 - DNA, 38 bp, Artificial Sequence
  Synthetic oligonucleotide
gcgatgacgcggtgtctttatcatttatgtgcggatga

SEQ ID NO: 8047 - DNA, 35 bp, Artificial Sequence
  Synthetic oligonucleotide
gctcaaaggccaagggtgctgatacgtccaaaccg

SEQ ID NO: 8048 - DNA, 35 bp, Artificial Sequence
  Synthetic oligonucleotide
gggcctgctataatgggaccaggctcacgccttat

SEQ ID NO: 8049 - DNA, 35 bp, Artificial Sequence
  Synthetic oligonucleotide
ggtcactgccacgacaggcttacagaaggtggtgc

SEQ ID NO: 8050 - DNA, 37 bp, Artificial Sequence
  Synthetic oligonucleotide
ggtgtagtccgttcagggctaccttaggtgttgtgga

SEQ ID NO: 8051 - DNA, 35 bp, Artificial Sequence
  Synthetic oligonucleotide
gtaagccaagtttaagttcaccccgggcactgacg

SEQ ID NO: 8052 - DNA, 37 bp, Artificial Sequence
  Synthetic oligonucleotide
gtcacgttactgtagtggataagtgttgaagcaggga

SEQ ID NO: 8053 - DNA, 36 bp, Artificial Sequence
  Synthetic oligonucleotide
gtcgtatggatactcctgaacccgttgtactcacga

SEQ ID NO: 8054 - DNA, 35 bp, Artificial Sequence
  Synthetic oligonucleotide
gtgcgtatcggactaatttcacggtccaacgttcg

SEQ ID NO: 8055 - DNA, 37 bp, Artificial Sequence
  Synthetic oligonucleotide
gtgctacttggttgcctgcatgactactgtcattgga

SEQ ID NO: 8056 - DNA, 37 bp, Artificial Sequence
  Synthetic oligonucleotide
gtggtgcgtgctgggaactcaagactactaccgctga

SEQ ID NO: 8057 - DNA, 35 bp, Artificial Sequence
  Synthetic oligonucleotide
taagagtcatgatggcattatgcctaatagagaac

SEQ ID NO: 8058 - DNA, 37 bp, Artificial Sequence
  Synthetic oligonucleotide
taccgtggtatagtgcttccagggataagcgtaatga

SEQ ID NO: 8059 - DNA, 37 bp, Artificial Sequence
  Synthetic oligonucleotide
tacgcctttacttaacaagtctcgaccggcataatga

SEQ ID NO: 8060 - DNA, 36 bp, Artificial Sequence
  Synthetic oligonucleotide
tacggcttgcatagtagtgctgctagtccggagtta

SEQ ID NO: 8061 - DNA, 38 bp, Artificial Sequence
  Synthetic oligonucleotide
tagttcagccgttgatacccgctgtcgagcaaaactga

SEQ ID NO: 8062 - DNA, 37 bp, Artificial Sequence
  Synthetic oligonucleotide
tattcggggaaaaaatagccccgaacgttgtgcacga

SEQ ID NO: 8063 - DNA, 37 bp, Artificial Sequence
  Synthetic oligonucleotide
tattggggaatgcgcagtcctacaggacgaatagaga

SEQ ID NO: 8064 - DNA, 37 bp, Artificial Sequence
  Synthetic oligonucleotide
tcccgcagggacgatgtatctgtataggtaagtcaga

SEQ ID NO: 8065 - DNA, 38 bp, Artificial Sequence
  Synthetic oligonucleotide
tcccttgggtcgttacttaggtctgacgggtgttgtga

SEQ ID NO: 8066 - DNA, 37 bp, Artificial Sequence
  Synthetic oligonucleotide
tccgggatacttggggaagggttctaatagctgtgga

SEQ ID NO: 8067 - DNA, 35 bp, Artificial Sequence
  Synthetic oligonucleotide
tcgccttcagtcaatgatcggagtaaagctatcag

SEQ ID NO: 8068 - DNA, 35 bp, Artificial Sequence
  Synthetic oligonucleotide
tgagggtataatggggtccatttgcctctctcgga

SEQ ID NO: 8069 - DNA, 38 bp, Artificial Sequence
  Synthetic oligonucleotide
tgatctggtcatgtttgaggtgttggtgacaactgtga

SEQ ID NO: 8070 - DNA, 35 bp, Artificial Sequence
  Synthetic oligonucleotide
ttaaaggctaacgaagagtctatcatgactctgag

SEQ ID NO: 8071 - DNA, 38 bp, Artificial Sequence
  Synthetic oligonucleotide
ttagcggtgtccatgcgaatctgcctaaccgtaactga

SEQ ID NO: 8072 - DNA, 36 bp, Artificial Sequence
  Synthetic oligonucleotide
ttcatggtgaggaacgtcgtactctcccgagtgcaa

SEQ ID NO: 8073 - DNA, 37 bp, Artificial Sequence
  Synthetic oligonucleotide
ttccggaactcagctgcacgtgagcgttgatctggga

SEQ ID NO: 8074 - DNA, 35 bp, Artificial Sequence
  Synthetic oligonucleotide
aatacgtaccatggataagtgcaactagccagcat

SEQ ID NO: 8075 - DNA, 35 bp, Artificial Sequence
  Synthetic oligonucleotide
catcccgttggtagttcaaccccggtcaggccatc

SEQ ID NO: 8076 - DNA, 38 bp, Artificial Sequence
  Synthetic oligonucleotide
cttcacatcacccatgatgggtgccgttagccgtgtga

SEQ ID NO: 8077 - DNA, 37 bp, Artificial Sequence
  Synthetic oligonucleotide
gctcatgggtaccatttgtatggcgtatactgtatga

SEQ ID NO: 8078 - DNA, 36 bp, Artificial Sequence
  Synthetic oligonucleotide
ggtacccagaactctaggcacattcgtgagtttgta

SEQ ID NO: 8079 - DNA, 35 bp, Artificial Sequence
  Synthetic oligonucleotide
tacgagctattatagcttatagctcggggcattag

SEQ ID NO: 8080 - DNA, 35 bp, Artificial Sequence
  Synthetic oligonucleotide
cccgcatacgtcactgaagggcgtgctatgtcacc

SEQ ID NO: 8081 - DNA, 36 bp, Artificial Sequence
  Synthetic oligonucleotide
aactgtggatggtgtaggtattcagcatacaggcga

SEQ ID NO: 8082 - DNA, 37 bp, Artificial Sequence
  Synthetic oligonucleotide
aaggattcatgcgtcgatgtagcctcccctagtctga

SEQ ID NO: 8083 - DNA, 36 bp, Artificial Sequence
  Synthetic oligonucleotide
acacgacgttgcacatgactgtactgcgactcgtta

SEQ ID NO: 8084 - DNA, 36 bp, Artificial Sequence
  Synthetic oligonucleotide
accaagaagcttagctgcagtcactgctcgaactca

SEQ ID NO: 8085 - DNA, 37 bp, Artificial Sequence
  Synthetic oligonucleotide
actaggagaacttagaaagcttaatgtggtgtacgga

SEQ ID NO: 8086 - DNA, 38 bp, Artificial Sequence
  Synthetic oligonucleotide
actagtgtggacccggcccgcactggtgcaatgcctga

SEQ ID NO: 8087 - DNA, 36 bp, Artificial Sequence
  Synthetic oligonucleotide
agccctcgggatggttcccggaagacagggctcgga

SEQ ID NO: 8088 - DNA, 38 bp, Artificial Sequence
  Synthetic oligonucleotide
agtcatcagtagaaccggacataactacaatgtactga

SEQ ID NO: 8089 - DNA, 35 bp, Artificial Sequence
  Synthetic oligonucleotide
agtcgaacacggccgtagcggtcgtgctttaatgt

SEQ ID NO: 8090 - DNA, 38 bp, Artificial Sequence
  Synthetic oligonucleotide
atagcctcccagttagtagctgagacgatcgagaatga

SEQ ID NO: 8091 - DNA, 35 bp, Artificial Sequence
  Synthetic oligonucleotide
attatacagccctcaaaaagggtggataactctgc

SEQ ID NO: 8092 - DNA, 36 bp, Artificial Sequence
  Synthetic oligonucleotide
caagtatatccaagctggtagataagcactcggtca

SEQ ID NO: 8093 - DNA, 36 bp, Artificial Sequence
  Synthetic oligonucleotide
catgtcgggggcaatggcatcttgcttatgatgaaa

SEQ ID NO: 8094 - DNA, 35 bp, Artificial Sequence
  Synthetic oligonucleotide
cccgccgggatgtattttgatctatacaagtgttg

SEQ ID NO: 8095 - DNA, 35 bp, Artificial Sequence
  Synthetic oligonucleotide
gaaccctgcgccgcattgattttaggggactatga

SEQ ID NO: 8096 - DNA, 36 bp, Artificial Sequence
  Synthetic oligonucleotide
gaattcgtccggttctttagtcataatcatgtacta

SEQ ID NO: 8097 - DNA, 36 bp, Artificial Sequence
  Synthetic oligonucleotide
gacccccaagcggtttcggaagtgaagtgcgcgtaa

SEQ ID NO: 8098 - DNA, 38 bp, Artificial Sequence
  Synthetic oligonucleotide
gcgggtcacgataaataagcattaaggtcgattactga

SEQ ID NO: 8099 - DNA, 38 bp, Artificial Sequence
  Synthetic oligonucleotide
ggagtcgacggggcactacaacagcacgatgggagtga

SEQ ID NO: 8100 - DNA, 36 bp, Artificial Sequence
  Synthetic oligonucleotide
ggctatatccggtgggagcatctatggagggtcgca

SEQ ID NO: 8101 - DNA, 36 bp, Artificial Sequence
  Synthetic oligonucleotide
ggggcgtatgcatcatcagtgtacgttggcgcctga

SEQ ID NO: 8102 - DNA, 35 bp, Artificial Sequence
  Synthetic oligonucleotide
ggtcttaggccgttcataccgtatatgttaacttt

SEQ ID NO: 8103 - DNA, 36 bp, Artificial Sequence
  Synthetic oligonucleotide
gtacggtacgacgtgtacgtgctaggtttatagtga

SEQ ID NO: 8104 - DNA, 38 bp, Artificial Sequence
  Synthetic oligonucleotide
gtactactgacaaatgtgctaacatggtagggatatga

SEQ ID NO: 8105 - DNA, 38 bp, Artificial Sequence
  Synthetic oligonucleotide
gtcgattagatacgacaaggattccattacgtgtctga

SEQ ID NO: 8106 - DNA, 35 bp, Artificial Sequence
  Synthetic oligonucleotide
gtctctagaagggacaaagtgatttggtgctaatc

SEQ ID NO: 8107 - DNA, 35 bp, Artificial Sequence
  Synthetic oligonucleotide
gtgagctctgggccgtgccggtgcatgccgtaatg

SEQ ID NO: 8108 - DNA, 37 bp, Artificial Sequence
  Synthetic oligonucleotide
gtgatgaagcactctacttatcaccgaatgattacga

SEQ ID NO: 8109 - DNA, 36 bp, Artificial Sequence
  Synthetic oligonucleotide
gttcccccctggatatacccaagggctctgtaggca

SEQ ID NO: 8110 - DNA, 37 bp, Artificial Sequence
  Synthetic oligonucleotide
gttttgcgccccctattggacaagcaatccgtactga

SEQ ID NO: 8111 - DNA, 35 bp, Artificial Sequence
  Synthetic oligonucleotide
taccacgtaggctatttatccgtaaggctacgggc

SEQ ID NO: 8112 - DNA, 35 bp, Artificial Sequence
  Synthetic oligonucleotide
tacgcggtgtgactaagttggttggtcccacggta

SEQ ID NO: 8113 - DNA, 35 bp, Artificial Sequence
  Synthetic oligonucleotide
tagggagttagtagtttcctcgaagtatacgttct

SEQ ID NO: 8114 - DNA, 35 bp, Artificial Sequence
  Synthetic oligonucleotide
tcaggttaaggaagtggccgagacctggcgcgttg

SEQ ID NO: 8115 - DNA, 38 bp, Artificial Sequence
  Synthetic oligonucleotide
tcccatcctggcatgtacaggcgatgatagcgcgctga

SEQ ID NO: 8116 - DNA, 35 bp, Artificial Sequence
  Synthetic oligonucleotide
tcgtaagtcaagaaccccatgcttttggtttgagg

SEQ ID NO: 8117 - DNA, 38 bp, Artificial Sequence
  Synthetic oligonucleotide
tcgtcaatctgtcaaagggggttgggccgttcaattga

SEQ ID NO: 8118 - DNA, 35 bp, Artificial Sequence
  Synthetic oligonucleotide
tcgtcctgcgagaatgtacaagccgtcacgcattc

SEQ ID NO: 8119 - DNA, 37 bp, Artificial Sequence
  Synthetic oligonucleotide
tctctgtgcacagagcgtaagaaatccgctcgcgaga

SEQ ID NO: 8120 - DNA, 37 bp, Artificial Sequence
  Synthetic oligonucleotide
tcttgaattacagaccgggtcttgtattcggtcgtga

SEQ ID NO: 8121 - DNA, 35 bp, Artificial Sequence
  Synthetic oligonucleotide
tgagttgatatgtttttggctaatgcaaatcgctg

SEQ ID NO: 8122 - DNA, 36 bp, Artificial Sequence
  Synthetic oligonucleotide
tgcaatcgcgacacgtacggaaggactttgttgtaa

SEQ ID NO: 8123 - DNA, 37 bp, Artificial Sequence
  Synthetic oligonucleotide
tgccccgaaagttggggaacttcgttggaggtttgga

SEQ ID NO: 8124 - DNA, 37 bp, Artificial Sequence
  Synthetic oligonucleotide
tgcccgtatccgcagggctggccaccctcgttcacga

SEQ ID NO: 8125 - DNA, 36 bp, Artificial Sequence
  Synthetic oligonucleotide
tgcgcgagtttcgtgtcgatcagtgctcgttgggga

SEQ ID NO: 8126 - DNA, 35 bp, Artificial Sequence
  Synthetic oligonucleotide
tgcgctaagacgaatacggatgcggtttaaaaggc

SEQ ID NO: 8127 - DNA, 35 bp, Artificial Sequence
  Synthetic oligonucleotide
ttccatggaggcgtgtcattagcacaaactgccgc

SEQ ID NO: 8128 - DNA, 36 bp, Artificial Sequence
  Synthetic oligonucleotide
ttcccgttactgcttaagagatcatcgcgaatgtga

SEQ ID NO: 8129 - DNA, 37 bp, Artificial Sequence
  Synthetic oligonucleotide
ttcggtggtccgaaaataagaccaaggactattgcga

SEQ ID NO: 8130 - DNA, 36 bp, Artificial Sequence
  Synthetic oligonucleotide
ttgagtcactggagcaaagaccctgatgtcgtaaga

SEQ ID NO: 8131 - DNA, 37 bp, Artificial Sequence
  Synthetic oligonucleotide
tttgggatatgacgactgggcttcgtttgatcacaga

SEQ ID NO: 8132 - DNA, 34 bp, Artificial Sequence
  Synthetic oligonucleotide
tagtacgcgaatagttgagttggtttgtgcggtc

SEQ ID NO: 8133 - DNA, 38 bp, Artificial Sequence
  Synthetic oligonucleotide
tactgcacgcgttttgttgaagtggtgctaccccctga

SEQ ID NO: 8134 - DNA, 35 bp, Artificial Sequence
  Synthetic oligonucleotide
agagcttggctcttcggtaaggcagtcaagaacta

SEQ ID NO: 8135 - DNA, 35 bp, Artificial Sequence
  Synthetic oligonucleotide
aagtaactgtaacatccagccacctggttgcactg

SEQ ID NO: 8136 - DNA, 35 bp, Artificial Sequence
  Synthetic oligonucleotide
aatctctagagcggaggtgctgtcacaaggagttc

SEQ ID NO: 8137 - DNA, 37 bp, Artificial Sequence
  Synthetic oligonucleotide
gcgcaaaaagacgagtcttgaatgcgcatcgagtttg

SEQ ID NO: 8138 - DNA, 37 bp, Artificial Sequence
  Synthetic oligonucleotide
gtgctggtatggggtagtttaaagacacttgcaacga

SEQ ID NO: 8139 - DNA, 35 bp, Artificial Sequence
  Synthetic oligonucleotide
tgcaatcattaggagtaaataatcactaggctgga

SEQ ID NO: 8140 - DNA, 35 bp, Artificial Sequence
  Synthetic oligonucleotide
aaaaagtcgaagctagggggcttcgggagtccttg

SEQ ID NO: 8141 - DNA, 36 bp, Artificial Sequence
  Synthetic oligonucleotide
aagcttcgtaagggtctaagcgctcgaatgcttgta

SEQ ID NO: 8142 - DNA, 37 bp, Artificial Sequence
  Synthetic oligonucleotide
acatgcggattgtcaagagtccgagactttctcagga

SEQ ID NO: 8143 - DNA, 36 bp, Artificial Sequence
  Synthetic oligonucleotide
accttcattagcgtttagcaagtccgtgaatgcgga

SEQ ID NO: 8144 - DNA, 35 bp, Artificial Sequence
  Synthetic oligonucleotide
agacctctcacaaggatgagctccgttctggtagg

SEQ ID NO: 8145 - DNA, 36 bp, Artificial Sequence
  Synthetic oligonucleotide
aggtcgggttatattagagaatgcagtaatgcggaa

SEQ ID NO: 8146 - DNA, 35 bp, Artificial Sequence
  Synthetic oligonucleotide
attgccaagaagaccgcgcatacggtgggcgaacg

SEQ ID NO: 8147 - DNA, 38 bp, Artificial Sequence
  Synthetic oligonucleotide
gaaatccgcccgttcaaggcactgcacctctactctga

SEQ ID NO: 8148 - DNA, 38 bp, Artificial Sequence
  Synthetic oligonucleotide
gaatcgttcacaaacactctggcatggcaaggaggtga

SEQ ID NO: 8149 - DNA, 36 bp, Artificial Sequence
  Synthetic oligonucleotide
gcctaaagtacacaagcatggaaacttacgttagta

SEQ ID NO: 8150 - DNA, 36 bp, Artificial Sequence
  Synthetic oligonucleotide
gctctggcgttgatggtccctagcttggtcaccgta

SEQ ID NO: 8151 - DNA, 38 bp, Artificial Sequence
  Synthetic oligonucleotide
ggatcaaaggctaccgagatcatcgctactcccgctga

SEQ ID NO: 8152 - DNA, 36 bp, Artificial Sequence
  Synthetic oligonucleotide
gggctcgggagggcttatccgggtccaagaagggca

SEQ ID NO: 8153 - DNA, 36 bp, Artificial Sequence
  Synthetic oligonucleotide
ggtgttcaacgtccagccgctggctattatgggata

SEQ ID NO: 8154 - DNA, 35 bp, Artificial Sequence
  Synthetic oligonucleotide
gtaatacgcggttgcaggttagtgtaggtgattat

SEQ ID NO: 8155 - DNA, 36 bp, Artificial Sequence
  Synthetic oligonucleotide
gtcatctgcagtgaggcctagctattcgtttgggta

SEQ ID NO: 8156 - DNA, 36 bp, Artificial Sequence
  Synthetic oligonucleotide
gtcatttacgcgtgtttcggcgtaacggacgctgta

SEQ ID NO: 8157 - DNA, 38 bp, Artificial Sequence
  Synthetic oligonucleotide
gtctaactcgcacggaccagacggagcatcctgggtga

SEQ ID NO: 8158 - DNA, 37 bp, Artificial Sequence
  Synthetic oligonucleotide
gttagtcacgacatctccggaatttttcaggacgtga

SEQ ID NO: 8159 - DNA, 36 bp, Artificial Sequence
  Synthetic oligonucleotide
tcaacaagtctgctgaagcccagtgggcttggtaca

SEQ ID NO: 8160 - DNA, 35 bp, Artificial Sequence
  Synthetic oligonucleotide
tcccccgcacgatctccagctggagctcgattctg

SEQ ID NO: 8161 - DNA, 37 bp, Artificial Sequence
  Synthetic oligonucleotide
tctagtggcccagcacgtagttgtaaaggcaaaacga

SEQ ID NO: 8162 - DNA, 36 bp, Artificial Sequence
  Synthetic oligonucleotide
tgaccactcttgaacttagcaatacagtgagaggta

SEQ ID NO: 8163 - DNA, 35 bp, Artificial Sequence
  Synthetic oligonucleotide
tggacttgatgcgccgattatggggctttcaaaag

SEQ ID NO: 8164 - DNA, 37 bp, Artificial Sequence
  Synthetic oligonucleotide
tggtaaccggcgatgtctcgaatcttcgtcctaagga

SEQ ID NO: 8165 - DNA, 37 bp, Artificial Sequence
  Synthetic oligonucleotide
tgtacttattaggccgatccatgcgccacccgtgcga

SEQ ID NO: 8166 - DNA, 37 bp, Artificial Sequence
  Synthetic oligonucleotide
ttagggttggcgttggctaacaagctccaggagaaga

SEQ ID NO: 8167 - DNA, 37 bp, Artificial Sequence
  Synthetic oligonucleotide
acgaccaggcatgaatgtctattgagtgcaactggga

SEQ ID NO: 8168 - DNA, 35 bp, Artificial Sequence
  Synthetic oligonucleotide
aggtctggttcagggtaattggctgtgacaccgcc

SEQ ID NO: 8169 - DNA, 37 bp, Artificial Sequence
  Synthetic oligonucleotide
atgggacttacaggatggggttcgctggacaagtgga

SEQ ID NO: 8170 - DNA, 38 bp, Artificial Sequence
  Synthetic oligonucleotide
taagtggttcgtaggaagaggtgacacacagagcatga

SEQ ID NO: 8171 - DNA, 36 bp, Artificial Sequence
  Synthetic oligonucleotide
tgcccacatgactactttataaacccccgggtgtga

SEQ ID NO: 8172 - DNA, 38 bp, Artificial Sequence
  Synthetic oligonucleotide
ttaatcgctccgatatgcgatacggtacgctgccttga

SEQ ID NO: 8173 - DNA, 36 bp, Artificial Sequence
  Synthetic oligonucleotide
catgcaagggcttcgaacaccaaagttgaacggcta

SEQ ID NO: 8174 - DNA, 35 bp, Artificial Sequence
  Synthetic oligonucleotide
aaaacctaacccgggcttgctaaagggcacaacgt

SEQ ID NO: 8175 - DNA, 36 bp, Artificial Sequence
  Synthetic oligonucleotide
aaagaactgagaagcctcgaaggagtgccgcgccta

SEQ ID NO: 8176 - DNA, 35 bp, Artificial Sequence
  Synthetic oligonucleotide
aagcactggtcctgcagaaagttttcgcggcgcac

SEQ ID NO: 8177 - DNA, 35 bp, Artificial Sequence
  Synthetic oligonucleotide
acccccaggacacttgtttctttaagcgggtctac

SEQ ID NO: 8178 - DNA, 36 bp, Artificial Sequence
  Synthetic oligonucleotide
accgcgaattagcagaaacgtggaggcgctggttta

SEQ ID NO: 8179 - DNA, 38 bp, Artificial Sequence
  Synthetic oligonucleotide
accgcgtctaaagggaaccttacgtcgggtatttgtga

SEQ ID NO: 8180 - DNA, 38 bp, Artificial Sequence
  Synthetic oligonucleotide
actaccgccatgagggtaaagttatctgcatcgcgtga

SEQ ID NO: 8181 - DNA, 37 bp, Artificial Sequence
  Synthetic oligonucleotide
ccggaggccaacctgtcaggaaaatggggtcccacga

SEQ ID NO: 8182 - DNA, 37 bp, Artificial Sequence
  Synthetic oligonucleotide
cctgacacaggccgttcgaaggactgagagggctaga

SEQ ID NO: 8183 - DNA, 38 bp, Artificial Sequence
  Synthetic oligonucleotide
gaatcaggaaagttataggacagtttctgtcgtactga

SEQ ID NO: 8184 - DNA, 36 bp, Artificial Sequence
  Synthetic oligonucleotide
gctggctaagcttgttgtcggggtaataagttcaga

SEQ ID NO: 8185 - DNA, 38 bp, Artificial Sequence
  Synthetic oligonucleotide
ggtgtactcccgtttagtggatacatatccgcttttga

SEQ ID NO: 8186 - DNA, 35 bp, Artificial Sequence
  Synthetic oligonucleotide
gtagtggggtttgatttgggatgctttgtgagatc

SEQ ID NO: 8187 - DNA, 36 bp, Artificial Sequence
  Synthetic oligonucleotide
taaacgtaggagctgacttccgtgacttagcgacca

SEQ ID NO: 8188 - DNA, 36 bp, Artificial Sequence
  Synthetic oligonucleotide
tacgcaagcttaaatgacaagtctttgtacgcacta

SEQ ID NO: 8189 - DNA, 35 bp, Artificial Sequence
  Synthetic oligonucleotide
tacgcactattgttaaacttgaaaccatatgttcg

SEQ ID NO: 8190 - DNA, 36 bp, Artificial Sequence
  Synthetic oligonucleotide
tagcgccccggcgaatgtacgtggtctgccaaaaca

SEQ ID NO: 8191 - DNA, 35 bp, Artificial Sequence
  Synthetic oligonucleotide
tagctgcctggtctagacgtacatgcggtttatag

SEQ ID NO: 8192 - DNA, 36 bp, Artificial Sequence
  Synthetic oligonucleotide
tatgacgacataggggggctccagttaaagactcaa

SEQ ID NO: 8193 - DNA, 37 bp, Artificial Sequence
  Synthetic oligonucleotide
tgcacatcctcaagcaaagggtaggttggctccgcga

SEQ ID NO: 8194 - DNA, 35 bp, Artificial Sequence
  Synthetic oligonucleotide
tgtacagtcaaaaacgtagtgtcggcctgtaggct

SEQ ID NO: 8195 - DNA, 38 bp, Artificial Sequence
  Synthetic oligonucleotide
tgttgctcatctatcggccaaccttagtcaatgtgtga

SEQ ID NO: 8196 - DNA, 37 bp, Artificial Sequence
  Synthetic oligonucleotide
ttataccgattacagatgacaggtgataagcggacga

SEQ ID NO: 8197 - DNA, 37 bp, Artificial Sequence
  Synthetic oligonucleotide
agtgcgtccgtcactactaaacgcgcttgtcgtgtga

SEQ ID NO: 8198 - DNA, 37 bp, Artificial Sequence
  Synthetic oligonucleotide
gccccctcgatggacagtaatggcggtggtctttaga

SEQ ID NO: 8199 - DNA, 35 bp, Artificial Sequence
  Synthetic oligonucleotide
tgccggtgtttgtagaacaaggctttacgaaactg

SEQ ID NO: 8200 - DNA, 36 bp, Artificial Sequence
  Synthetic oligonucleotide
agatggcctgccgccatgacaccgattgagcattta

SEQ ID NO: 8201 - DNA, 35 bp, Artificial Sequence
  Synthetic oligonucleotide
gcgaccgagcacgtatgtcaaggcatagtcaatat

SEQ ID NO: 8202 - DNA, 34 bp, Artificial Sequence
  Synthetic oligonucleotide
atacgtctcctgtaaagtcaatgctagctatgtt

SEQ ID NO: 8203 - DNA, 37 bp, Artificial Sequence
  Synthetic oligonucleotide
acgaacgaagcaaacatattactcggtgagtgagaga

SEQ ID NO: 8204 - DNA, 36 bp, Artificial Sequence
  Synthetic oligonucleotide
actgcatttccacacccatagttgtcagtctagtga

SEQ ID NO: 8205 - DNA, 35 bp, Artificial Sequence
  Synthetic oligonucleotide
gaaagtgggttaaaataagtgcctaactgtggggg

SEQ ID NO: 8206 - DNA, 35 bp, Artificial Sequence
  Synthetic oligonucleotide
gaccagctaactgtcacgccaataggagtctccct

SEQ ID NO: 8207 - DNA, 35 bp, Artificial Sequence
  Synthetic oligonucleotide
ttttggtccctccctgtcggttgtgtcacacggta

SEQ ID NO: 8208 - DNA, 37 bp, Artificial Sequence
  Synthetic oligonucleotide
aacgaatcttgcaaacaatctactgtaggcggatgga

SEQ ID NO: 8209 - DNA, 37 bp, Artificial Sequence
  Synthetic oligonucleotide
aactgttcgtcctggtatgaacaacgtacaagggcga

SEQ ID NO: 8210 - DNA, 35 bp, Artificial Sequence
  Synthetic oligonucleotide
acacacagtacaacgcaacatgggatgtgaatgga

SEQ ID NO: 8211 - DNA, 36 bp, Artificial Sequence
  Synthetic oligonucleotide
acaccagctgcgtgctgctagtcactgatgtacgta

SEQ ID NO: 8212 - DNA, 35 bp, Artificial Sequence
  Synthetic oligonucleotide
agagccgaacgtagaagggccgcatgtggtgcggg

SEQ ID NO: 8213 - DNA, 35 bp, Artificial Sequence
  Synthetic oligonucleotide
ataggtctgagggggaagtcacaatatgatgacca

SEQ ID NO: 8214 - DNA, 36 bp, Artificial Sequence
  Synthetic oligonucleotide
atgagcctacttaggacgaatctatatgtctccaca

SEQ ID NO: 8215 - DNA, 35 bp, Artificial Sequence
  Synthetic oligonucleotide
ctaacgcccaacaacagtcaatctgaataaggtta

SEQ ID NO: 8216 - DNA, 36 bp, Artificial Sequence
  Synthetic oligonucleotide
gaagggactagctggatcagccatagtactgcggga

SEQ ID NO: 8217 - DNA, 36 bp, Artificial Sequence
  Synthetic oligonucleotide
gcacagattgttagccaacaatgattgttatactta

SEQ ID NO: 8218 - DNA, 38 bp, Artificial Sequence
  Synthetic oligonucleotide
ggagtcgacatcaaactttagcacattctctatcgtga

SEQ ID NO: 8219 - DNA, 38 bp, Artificial Sequence
  Synthetic oligonucleotide
ggattgacgtgtggaaggccagttggtatacggtatga

SEQ ID NO: 8220 - DNA, 35 bp, Artificial Sequence
  Synthetic oligonucleotide
gtgcgtaaaggttcctggaacgataatgcttgtgg

SEQ ID NO: 8221 - DNA, 35 bp, Artificial Sequence
  Synthetic oligonucleotide
tcaagatggcacggttaatcacccggtatgaaggc

SEQ ID NO: 8222 - DNA, 36 bp, Artificial Sequence
  Synthetic oligonucleotide
tctaacggccggagtggtgtcacgagtatcatgcaa

SEQ ID NO: 8223 - DNA, 37 bp, Artificial Sequence
  Synthetic oligonucleotide
tgcgaacctcatcactagaccagtgcataaggacgga

SEQ ID NO: 8224 - DNA, 36 bp, Artificial Sequence
  Synthetic oligonucleotide
ttaccaatatccgggacatccattgtgtgattcgga

SEQ ID NO: 8225 - DNA, 33 bp, Artificial Sequence
  Synthetic oligonucleotide
ttgtgatgtcgttaaagatgtattaccgggccc

SEQ ID NO: 8226 - DNA, 37 bp, Artificial Sequence
  Synthetic oligonucleotide
tttgccgggaggttgatcttccgtctaaaccacgcga

SEQ ID NO: 8227 - DNA, 36 bp, Artificial Sequence
  Synthetic oligonucleotide
gagtacgcgaggaaagcagtccacgaatatttgaaa

SEQ ID NO: 8228 - DNA, 36 bp, Artificial Sequence
  Synthetic oligonucleotide
ctagtgtacgccggagctgcctgcgtagtgattgta

SEQ ID NO: 8229 - DNA, 38 bp, Artificial Sequence
  Synthetic oligonucleotide
gaaaaccactcaacgagtggtcttgcggtaaaaattga

SEQ ID NO: 8230 - DNA, 37 bp, Artificial Sequence
  Synthetic oligonucleotide
acttatactggactgcgggttcacgttgactgttgga

SEQ ID NO: 8231 - DNA, 36 bp, Artificial Sequence
  Synthetic oligonucleotide
agtgtcactggtctaaggggtccgtggcactacata

SEQ ID NO: 8232 - DNA, 35 bp, Artificial Sequence
  Synthetic oligonucleotide
ctttggtgacactgccctccttgtcgatcagatat

SEQ ID NO: 8233 - DNA, 35 bp, Artificial Sequence
  Synthetic oligonucleotide
gactccagtcacggagtgcgggccgtgatagactt

SEQ ID NO: 8234 - DNA, 37 bp, Artificial Sequence
  Synthetic oligonucleotide
gccatattacaagtgttggaacgcctacctggtgtga

SEQ ID NO: 8235 - DNA, 37 bp, Artificial Sequence
  Synthetic oligonucleotide
gctaaatagttactgaacgtttgcgtgcctggaacga

SEQ ID NO: 8236 - DNA, 38 bp, Artificial Sequence
  Synthetic oligonucleotide
tcagcagtccctaggcattcaccttagctagtcaatga

SEQ ID NO: 8237 - DNA, 37 bp, Artificial Sequence
  Synthetic oligonucleotide
tgagtcatggttgtcggacttatttatgagagcaaga

SEQ ID NO: 8238 - DNA, 38 bp, Artificial Sequence
  Synthetic oligonucleotide
tgattttggcgacgcgttgccgcagattcaatggctga

SEQ ID NO: 8239 - DNA, 36 bp, Artificial Sequence
  Synthetic oligonucleotide
ttaccccagacatcgaggaatgttgcccctggctaa

SEQ ID NO: 8240 - DNA, 35 bp, Artificial Sequence
  Synthetic oligonucleotide
ttacggggggtgtgaaattgccgtaaggaatgcta

SEQ ID NO: 8241 - DNA, 38 bp, Artificial Sequence
  Synthetic oligonucleotide
ttcgtagaacacgtacacatcaattcgtccctttatga

SEQ ID NO: 8242 - DNA, 36 bp, Artificial Sequence
  Synthetic oligonucleotide
aaagtacaagctagagacgctatgttgttaggttga

SEQ ID NO: 8243 - DNA, 37 bp, Artificial Sequence
  Synthetic oligonucleotide
aacgggttagtccttatgcatgttgtgctatgtgtga

SEQ ID NO: 8244 - DNA, 36 bp, Artificial Sequence
  Synthetic oligonucleotide
accgggctgggtgtgtacccttctactggttacgta

SEQ ID NO: 8245 - DNA, 36 bp, Artificial Sequence
  Synthetic oligonucleotide
acgcggagtgcttaccggcggagcgaacttgaaaaa

SEQ ID NO: 8246 - DNA, 36 bp, Artificial Sequence
  Synthetic oligonucleotide
cctgacgatgggcctactttcaccgtcatggctgta

SEQ ID NO: 8247 - DNA, 35 bp, Artificial Sequence
  Synthetic oligonucleotide
gacccaagaagacaaccgtgtgctaaagtgactga

SEQ ID NO: 8248 - DNA, 36 bp, Artificial Sequence
  Synthetic oligonucleotide
gtgtctgtcatgtagagttttggccgagggtacaaa

SEQ ID NO: 8249 - DNA, 38 bp, Artificial Sequence
  Synthetic oligonucleotide
tcaaggtgaacgtagtagttctatttccgtatcagtga

SEQ ID NO: 8250 - DNA, 36 bp, Artificial Sequence
  Synthetic oligonucleotide
tgcatgtgtttgtaacgtaatcttttagtacgccga

SEQ ID NO: 8251 - DNA, 38 bp, Artificial Sequence
  Synthetic oligonucleotide
tgtacagctcatgcggttctacgaccgtttaaccatga

SEQ ID NO: 8252 - DNA, 36 bp, Artificial Sequence
  Synthetic oligonucleotide
tgtacatcgaatttagagagataacaacctgccgta

SEQ ID NO: 8253 - DNA, 37 bp, Artificial Sequence
  Synthetic oligonucleotide
tgtcaacgtacttacccgtacacaggatgggatacga

SEQ ID NO: 8254 - DNA, 35 bp, Artificial Sequence
  Synthetic oligonucleotide
tgaaagtcaaggtacccctttgtgctatgtgacca

SEQ ID NO: 8255 - DNA, 36 bp, Artificial Sequence
  Synthetic oligonucleotide
acaaccgccgggtggtcgcccgccgttcataggata

SEQ ID NO: 8256 - DNA, 35 bp, Artificial Sequence
  Synthetic oligonucleotide
aggtaactttcagtttaacgggtccatgttaaggg

SEQ ID NO: 8257 - DNA, 38 bp, Artificial Sequence
  Synthetic oligonucleotide
gcactgcataccaggaagttgtattcaaatcagtttga

SEQ ID NO: 8258 - DNA, 35 bp, Artificial Sequence
  Synthetic oligonucleotide
gtgttgctacacacggttgtcatggtgcggtacta

SEQ ID NO: 8259 - DNA, 37 bp, Artificial Sequence
  Synthetic oligonucleotide
tcctgcacagtcggacgtctgcattcttaggaaaaga

SEQ ID NO: 8260 - DNA, 35 bp, Artificial Sequence
  Synthetic oligonucleotide
tgctctaactctaagtgcgaattgtaactgatgac

SEQ ID NO: 8261 - DNA, 35 bp, Artificial Sequence
  Synthetic oligonucleotide
aacgagggttgattagggcctagttggtactgaga

SEQ ID NO: 8262 - DNA, 37 bp, Artificial Sequence
  Synthetic oligonucleotide
aacgcacctcttactcatgtgtttcgtgtttgcggga

SEQ ID NO: 8263 - DNA, 35 bp, Artificial Sequence
  Synthetic oligonucleotide
aagagggcaatccctttgcgaatagggggagggag

SEQ ID NO: 8264 - DNA, 37 bp, Artificial Sequence
  Synthetic oligonucleotide
aagcattcaagctgagtctttgaatatcataccgaga

SEQ ID NO: 8265 - DNA, 35 bp, Artificial Sequence
  Synthetic oligonucleotide
aagttcatgttttagtccaccagaaccatgtgtag

SEQ ID NO: 8266 - DNA, 38 bp, Artificial Sequence
  Synthetic oligonucleotide
acaacatactcaggcggttcgtccctccgtccgaatga

SEQ ID NO: 8267 - DNA, 36 bp, Artificial Sequence
  Synthetic oligonucleotide
accagccaagctgggggacttacgtgacgcacatga

SEQ ID NO: 8268 - DNA, 35 bp, Artificial Sequence
  Synthetic oligonucleotide
acgcgaggcgaggcaatttttatcgagctagactt

SEQ ID NO: 8269 - DNA, 37 bp, Artificial Sequence
  Synthetic oligonucleotide
actgtatggccgatattcgcagtcctgtagaagcgga

SEQ ID NO: 8270 - DNA, 35 bp, Artificial Sequence
  Synthetic oligonucleotide
agcgtactgctgtgatagggtatttacctttgttg

SEQ ID NO: 8271 - DNA, 38 bp, Artificial Sequence
  Synthetic oligonucleotide
agtcgaatttttcgaggcgcttagtacgtggtcaatga

SEQ ID NO: 8272 - DNA, 37 bp, Artificial Sequence
  Synthetic oligonucleotide
ataagtaggcgacgacattcaaatagtgcactgcgga

SEQ ID NO: 8273 - DNA, 36 bp, Artificial Sequence
  Synthetic oligonucleotide
atagaactgagttgcagggagcaatttgtctccaaa

SEQ ID NO: 8274 - DNA, 35 bp, Artificial Sequence
  Synthetic oligonucleotide
atcgtgatgctgtgccaggtgaggcttgtaatcag

SEQ ID NO: 8275 - DNA, 35 bp, Artificial Sequence
  Synthetic oligonucleotide
atgggacgccatagccgggctccgtaccggatgtc

SEQ ID NO: 8276 - DNA, 38 bp, Artificial Sequence
  Synthetic oligonucleotide
atttgtgagtccgggctatttgatctgaattacattga

SEQ ID NO: 8277 - DNA, 36 bp, Artificial Sequence
  Synthetic oligonucleotide
caaacaacgtgctgtctggtgggttaacgggtagta

SEQ ID NO: 8278 - DNA, 36 bp, Artificial Sequence
  Synthetic oligonucleotide
caaacccgattgcaaggttaggagggtatgtatgta

SEQ ID NO: 8279 - DNA, 36 bp, Artificial Sequence
  Synthetic oligonucleotide
ccacgcatgaagccatatgtaattgtcacaggggca

SEQ ID NO: 8280 - DNA, 37 bp, Artificial Sequence
  Synthetic oligonucleotide
cctggcgctgcatagttctgactgaacaataggggga

SEQ ID NO: 8281 - DNA, 37 bp, Artificial Sequence
  Synthetic oligonucleotide
cctggcgtacgagcatggcgttatggggattgaggga

SEQ ID NO: 8282 - DNA, 37 bp, Artificial Sequence
  Synthetic oligonucleotide
cgtggtcgtataaatatctgcaccagagagagtcgga

SEQ ID NO: 8283 - DNA, 38 bp, Artificial Sequence
  Synthetic oligonucleotide
gagagagcgcactagatcctaccagctggaccgtgtga

SEQ ID NO: 8284 - DNA, 38 bp, Artificial Sequence
  Synthetic oligonucleotide
gaggtttctgccccggtgagctaaccaagaggtactga

SEQ ID NO: 8285 - DNA, 35 bp, Artificial Sequence
  Synthetic oligonucleotide
gatctgggtacccgcctgtccataagtacgcagtc

SEQ ID NO: 8286 - DNA, 36 bp, Artificial Sequence
  Synthetic oligonucleotide
gcactcctacgcacgtttctggtggtaaccttggga

SEQ ID NO: 8287 - DNA, 37 bp, Artificial Sequence
  Synthetic oligonucleotide
gcatgaaaagtgtgcttctccctacgttgtatggaga

SEQ ID NO: 8288 - DNA, 37 bp, Artificial Sequence
  Synthetic oligonucleotide
gcattcctctgagcgatttaccacaggcccagctgga

SEQ ID NO: 8289 - DNA, 35 bp, Artificial Sequence
  Synthetic oligonucleotide
gccgggcggtgctgaacgcgcgatacggacaggac

SEQ ID NO: 8290 - DNA, 36 bp, Artificial Sequence
  Synthetic oligonucleotide
gcgtattaaacaagattgtttggggacgtagatgta

SEQ ID NO: 8291 - DNA, 35 bp, Artificial Sequence
  Synthetic oligonucleotide
gctaccattgtaccgtactggtaatatgacacgtg

SEQ ID NO: 8292 - DNA, 36 bp, Artificial Sequence
  Synthetic oligonucleotide
gctacgaataaccccccttcgaagtcgagagtgaca

SEQ ID NO: 8293 - DNA, 35 bp, Artificial Sequence
  Synthetic oligonucleotide
gctgcactctcagagttacattggggtcgtcaacc

SEQ ID NO: 8294 - DNA, 38 bp, Artificial Sequence
  Synthetic oligonucleotide
ggatcactgtgtggccttcttcagttggtaacgtttga

SEQ ID NO: 8295 - DNA, 37 bp, Artificial Sequence
  Synthetic oligonucleotide
ggattcgagcccgtttccgcatgtaaaacagcagaga

SEQ ID NO: 8296 - DNA, 35 bp, Artificial Sequence
  Synthetic oligonucleotide
gggacactgtatcctggtaacaaatttggtggact

SEQ ID NO: 8297 - DNA, 35 bp, Artificial Sequence
  Synthetic oligonucleotide
gggtgcacgaatctgcaggataagctggcgctagc

SEQ ID NO: 8298 - DNA, 38 bp, Artificial Sequence
  Synthetic oligonucleotide
gtatcaggccagggtgttcaggcttcaaactctaatga

SEQ ID NO: 8299 - DNA, 36 bp, Artificial Sequence
  Synthetic oligonucleotide
gtcaggaaacagtctaaccagctattctgctgttaa

SEQ ID NO: 8300 - DNA, 36 bp, Artificial Sequence
  Synthetic oligonucleotide
gtcatggtagaagggcctgttcgcaattccagacta

SEQ ID NO: 8301 - DNA, 38 bp, Artificial Sequence
  Synthetic oligonucleotide
gtcgccccattggcatggggggttaccctatctgttga

SEQ ID NO: 8302 - DNA, 38 bp, Artificial Sequence
  Synthetic oligonucleotide
gtcgctcgttcaattgcaccgggtaacgtgactactga

SEQ ID NO: 8303 - DNA, 37 bp, Artificial Sequence
  Synthetic oligonucleotide
gtctggggcatttatctaggtgccggtctccacatga

SEQ ID NO: 8304 - DNA, 36 bp, Artificial Sequence
  Synthetic oligonucleotide
gtgagctaagtctgcaatcactcgacaattgtaaaa

SEQ ID NO: 8305 - DNA, 35 bp, Artificial Sequence
  Synthetic oligonucleotide
gtgtcgtgtcttccatctggatagtttacgtgcct

SEQ ID NO: 8306 - DNA, 35 bp, Artificial Sequence
  Synthetic oligonucleotide
gtgttaacgcagggggccaagcacaaccgggggcc

SEQ ID NO: 8307 - DNA, 37 bp, Artificial Sequence
  Synthetic oligonucleotide
gttaggaggtttgatgacgagcgtggggggcctggga

SEQ ID NO: 8308 - DNA, 38 bp, Artificial Sequence
  Synthetic oligonucleotide
gttcattacaactgcggctaataaattagcgtgcgtga

SEQ ID NO: 8309 - DNA, 34 bp, Artificial Sequence
  Synthetic oligonucleotide
taagcgggagttgagctaacaaggatggactgct

SEQ ID NO: 8310 - DNA, 37 bp, Artificial Sequence
  Synthetic oligonucleotide
tacctcgggggcctgctagggcacatgagacaaggga

SEQ ID NO: 8311 - DNA, 36 bp, Artificial Sequence
  Synthetic oligonucleotide
tcaaagtacgagccggtgctggatggttgggtgata

SEQ ID NO: 8312 - DNA, 38 bp, Artificial Sequence
  Synthetic oligonucleotide
tccaattacggtacggatcaacatatgcttggttttga

SEQ ID NO: 8313 - DNA, 37 bp, Artificial Sequence
  Synthetic oligonucleotide
tcgccttgtttggcgtactacttcggtgcgatggaga

SEQ ID NO: 8314 - DNA, 38 bp, Artificial Sequence
  Synthetic oligonucleotide
tcgtacctcccgtgtgcaattattaacctgtggtatga

SEQ ID NO: 8315 - DNA, 35 bp, Artificial Sequence
  Synthetic oligonucleotide
tctgtcagtggaatcctgacggatgcgcatactat

SEQ ID NO: 8316 - DNA, 38 bp, Artificial Sequence
  Synthetic oligonucleotide
tctgttcagaggcaaaaagagaactctgcagaaagtga

SEQ ID NO: 8317 - DNA, 37 bp, Artificial Sequence
  Synthetic oligonucleotide
tgacttcgccgtttaagcggtattatcaggtgccgga

SEQ ID NO: 8318 - DNA, 36 bp, Artificial Sequence
  Synthetic oligonucleotide
tgatcacctacgtcaccggattcacggagccgacta

SEQ ID NO: 8319 - DNA, 37 bp, Artificial Sequence
  Synthetic oligonucleotide
tgatggtcgaaaatggtgtcaagcaaggaaggttgga

SEQ ID NO: 8320 - DNA, 36 bp, Artificial Sequence
  Synthetic oligonucleotide
tgcgagttaagtcgggtgaaattactttccgttcga

SEQ ID NO: 8321 - DNA, 37 bp, Artificial Sequence
  Synthetic oligonucleotide
tgggcgcatgttagaagcgccagaggacccgcacgga

SEQ ID NO: 8322 - DNA, 35 bp, Artificial Sequence
  Synthetic oligonucleotide
tgtcatcagtacttcatttccccggaattcgatat

SEQ ID NO: 8323 - DNA, 37 bp, Artificial Sequence
  Synthetic oligonucleotide
ttaacctcgggtcatgagaaagaacctcctgtcggga

SEQ ID NO: 8324 - DNA, 36 bp, Artificial Sequence
  Synthetic oligonucleotide
ttaccaccgatatgctagttgttacatgggtacgga

SEQ ID NO: 8325 - DNA, 38 bp, Artificial Sequence
  Synthetic oligonucleotide
ttcgcgtacctagggagaagacagttctgggagattga

SEQ ID NO: 8326 - DNA, 37 bp, Artificial Sequence
  Synthetic oligonucleotide
tttgcttagtgcgcaaggcgagctttttgtcctggga

SEQ ID NO: 8327 - DNA, 35 bp, Artificial Sequence
  Synthetic oligonucleotide
ttttcggcgagtgggcaggagattgccccgtttga

SEQ ID NO: 8328 - DNA, 37 bp, Artificial Sequence
  Synthetic oligonucleotide
gaccgagcattgtatgccggaaggtactggcatgaga

SEQ ID NO: 8329 - DNA, 37 bp, Artificial Sequence
  Synthetic oligonucleotide
gctcctgtaccgccgccatcctcgatgaagtcgaaga

SEQ ID NO: 8330 - DNA, 35 bp, Artificial Sequence
  Synthetic oligonucleotide
aaccgacgggggttatatcttttatatttgggctg

SEQ ID NO: 8331 - DNA, 36 bp, Artificial Sequence
  Synthetic oligonucleotide
aagcatgcgtaggtttaacgggtcatccccggtgaa

SEQ ID NO: 8332 - DNA, 36 bp, Artificial Sequence
  Synthetic oligonucleotide
aagggtgtgctgcatatagactttgctttagggcga

SEQ ID NO: 8333 - DNA, 36 bp, Artificial Sequence
  Synthetic oligonucleotide
aatctgcgcgtgcatcttgaattggaacgggcatca

SEQ ID NO: 8334 - DNA, 36 bp, Artificial Sequence
  Synthetic oligonucleotide
acaacacgcgatcacacattgggttgggtttacaga

SEQ ID NO: 8335 - DNA, 38 bp, Artificial Sequence
  Synthetic oligonucleotide
acatggtgagtaggaaagtgcttccgagtcacgtatga

SEQ ID NO: 8336 - DNA, 36 bp, Artificial Sequence
  Synthetic oligonucleotide
accacagtccgataacgagccgttaaggtgacagta

SEQ ID NO: 8337 - DNA, 37 bp, Artificial Sequence
  Synthetic oligonucleotide
acctccggcactgttggtcactggtggtagggaccga

SEQ ID NO: 8338 - DNA, 35 bp, Artificial Sequence
  Synthetic oligonucleotide
acgaggtgcggaggaccacagtgctaagggggtat

SEQ ID NO: 8339 - DNA, 38 bp, Artificial Sequence
  Synthetic oligonucleotide
actgcgtgggccggacactttgccccttaaagtgctga

SEQ ID NO: 8340 - DNA, 35 bp, Artificial Sequence
  Synthetic oligonucleotide
agagctagggcgagctaacatatatgtacagacgc

SEQ ID NO: 8341 - DNA, 36 bp, Artificial Sequence
  Synthetic oligonucleotide
aggcaaccaaaggaccttaggtggtcatgtgggcga

SEQ ID NO: 8342 - DNA, 37 bp, Artificial Sequence
  Synthetic oligonucleotide
atcagctgctttaaagtattgagcattgccggagtga

SEQ ID NO: 8343 - DNA, 37 bp, Artificial Sequence
  Synthetic oligonucleotide
atcggtttagtcgggtactctcttgattggggtatga

SEQ ID NO: 8344 - DNA, 36 bp, Artificial Sequence
  Synthetic oligonucleotide
atttgaactggacaggcctgctctggtctatcggta

SEQ ID NO: 8345 - DNA, 37 bp, Artificial Sequence
  Synthetic oligonucleotide
catgtacgctacagataaaatcgatgttaggggagga

SEQ ID NO: 8346 - DNA, 38 bp, Artificial Sequence
  Synthetic oligonucleotide
ccgatcaggaattgagcgaatgtattacacgaaagtga

SEQ ID NO: 8347 - DNA, 37 bp, Artificial Sequence
  Synthetic oligonucleotide
ctcaacggacagtccactactgtgaatcacgagctga

SEQ ID NO: 8348 - DNA, 36 bp, Artificial Sequence
  Synthetic oligonucleotide
ctcagcgacgcggaagtactacgacagttggaacca

SEQ ID NO: 8349 - DNA, 35 bp, Artificial Sequence
  Synthetic oligonucleotide
ctgaaggccatcatagggattcagagtctaaagga

SEQ ID NO: 8350 - DNA, 38 bp, Artificial Sequence
  Synthetic oligonucleotide
gaacaggggcaggatacctggacaagagtctatgttga

SEQ ID NO: 8351 - DNA, 38 bp, Artificial Sequence
  Synthetic oligonucleotide
gaaccgctgacgtggagatcgtatccaggcggttctga

SEQ ID NO: 8352 - DNA, 35 bp, Artificial Sequence
  Synthetic oligonucleotide
gagaattatagcagggctgtaggggctgggaggac

SEQ ID NO: 8353 - DNA, 37 bp, Artificial Sequence
  Synthetic oligonucleotide
gcatcttagagttagtccgtagtatgtacgtagggga

SEQ ID NO: 8354 - DNA, 38 bp, Artificial Sequence
  Synthetic oligonucleotide
gccgaatagaggtgaatttaaggtcggggcccggttga

SEQ ID NO: 8355 - DNA, 35 bp, Artificial Sequence
  Synthetic oligonucleotide
gccgcagcaatcgtatctttagccatcttatggct

SEQ ID NO: 8356 - DNA, 35 bp, Artificial Sequence
  Synthetic oligonucleotide
gcgaactgttggcaccgtgcacgtcaagggcacac

SEQ ID NO: 8357 - DNA, 38 bp, Artificial Sequence
  Synthetic oligonucleotide
gcggtccagaaggtatttattgatgttcgacgaaatga

SEQ ID NO: 8358 - DNA, 36 bp, Artificial Sequence
  Synthetic oligonucleotide
gcgtagcatgtcatcctggcatcttaattgacagta

SEQ ID NO: 8359 - DNA, 36 bp, Artificial Sequence
  Synthetic oligonucleotide
gctggagagggttttcaccgaaagtcattctcagga

SEQ ID NO: 8360 - DNA, 37 bp, Artificial Sequence
  Synthetic oligonucleotide
ggaagcaattgagtgcttctggtactaagtttgctga

SEQ ID NO: 8361 - DNA, 37 bp, Artificial Sequence
  Synthetic oligonucleotide
ggcccagagtcactgctacaggccacactactttgga

SEQ ID NO: 8362 - DNA, 38 bp, Artificial Sequence
  Synthetic oligonucleotide
ggtggttattggcccttcttaagtggtcaccgttatga

SEQ ID NO: 8363 - DNA, 37 bp, Artificial Sequence
  Synthetic oligonucleotide
gtcggggagacacacattagtctgacatccgggttga

SEQ ID NO: 8364 - DNA, 37 bp, Artificial Sequence
  Synthetic oligonucleotide
gtgctcttaactaagtcaatcaggatagtaccacaga

SEQ ID NO: 8365 - DNA, 37 bp, Artificial Sequence
  Synthetic oligonucleotide
gtgttttgtagtgttataacttgcgaggccattgcga

SEQ ID NO: 8366 - DNA, 37 bp, Artificial Sequence
  Synthetic oligonucleotide
gttactcaacattacatgtctaaatgaattggacgga

SEQ ID NO: 8367 - DNA, 35 bp, Artificial Sequence
  Synthetic oligonucleotide
gttgacagtatgttatgaattatttgcgccgactg

SEQ ID NO: 8368 - DNA, 35 bp, Artificial Sequence
  Synthetic oligonucleotide
gtttgcgccaacccactcgtgcgctagcgtaactg

SEQ ID NO: 8369 - DNA, 35 bp, Artificial Sequence
  Synthetic oligonucleotide
taggaccattcggtggacgctctgacgggggtggt

SEQ ID NO: 8370 - DNA, 35 bp, Artificial Sequence
  Synthetic oligonucleotide
tatagggtctatcgatctttcagagtagggggctt

SEQ ID NO: 8371 - DNA, 36 bp, Artificial Sequence
  Synthetic oligonucleotide
tcatggagctaggaattcattaattggtaatggata

SEQ ID NO: 8372 - DNA, 38 bp, Artificial Sequence
  Synthetic oligonucleotide
tccatctatggttctcagtactccacgattacacgtga

SEQ ID NO: 8373 - DNA, 35 bp, Artificial Sequence
  Synthetic oligonucleotide
tcgtccgccaatgcgtcgaacaacgacctttgagt

SEQ ID NO: 8374 - DNA, 38 bp, Artificial Sequence
  Synthetic oligonucleotide
tgcccgacaattgtggcagtcacgttttactcggatga

SEQ ID NO: 8375 - DNA, 38 bp, Artificial Sequence
  Synthetic oligonucleotide
tggggttggtcggtacagttgggtatagtcgcctctga

SEQ ID NO: 8376 - DNA, 38 bp, Artificial Sequence
  Synthetic oligonucleotide
tgtacaggacgaataatatgcttgtccgctacatgtga

SEQ ID NO: 8377 - DNA, 36 bp, Artificial Sequence
  Synthetic oligonucleotide
ttacatcgtgatccaagtattgaagcacgctatgaa

SEQ ID NO: 8378 - DNA, 38 bp, Artificial Sequence
  Synthetic oligonucleotide
ttcataacgccgggtcctcgcctgatagtcctaaatga

SEQ ID NO: 8379 - DNA, 36 bp, Artificial Sequence
  Synthetic oligonucleotide
ttcctgctgcttcatgagttatacgtgagtccgtaa

SEQ ID NO: 8380 - DNA, 37 bp, Artificial Sequence
  Synthetic oligonucleotide
ttctataagtgtgtccgggtatgcccgcacctagaga

SEQ ID NO: 8381 - DNA, 36 bp, Artificial Sequence
  Synthetic oligonucleotide
ttctgatggtgacatcttggataggacctcggaaca

SEQ ID NO: 8382 - DNA, 35 bp, Artificial Sequence
  Synthetic oligonucleotide
tttgggtaaaagggttagtaacgtcttgccgccgc

SEQ ID NO: 8383 - DNA, 37 bp, Artificial Sequence
  Synthetic oligonucleotide
taacggtgcgaatatgtcgcatatcgttaccggagga

SEQ ID NO: 8384 - DNA, 36 bp, Artificial Sequence
  Synthetic oligonucleotide
cgtacacgtgagcatgctttaaggccctctcccaca

SEQ ID NO: 8385 - DNA, 37 bp, Artificial Sequence
  Synthetic oligonucleotide
aatcatgcgatgtaggcgtgtgccaacatgtttcgga

SEQ ID NO: 8386 - DNA, 35 bp, Artificial Sequence
  Synthetic oligonucleotide
acagccaggcgggcgaaagagtgatagcgagtcat

SEQ ID NO: 8387 - DNA, 35 bp, Artificial Sequence
  Synthetic oligonucleotide
acagttcctcaaatggaccggctggttggatcatg

SEQ ID NO: 8388 - DNA, 37 bp, Artificial Sequence
  Synthetic oligonucleotide
accacgagcgcttgcttgtcatgagagttaccggtga

SEQ ID NO: 8389 - DNA, 37 bp, Artificial Sequence
  Synthetic oligonucleotide
acgcgattgaccctggcgatgcgctaagttacggcga

SEQ ID NO: 8390 - DNA, 36 bp, Artificial Sequence
  Synthetic oligonucleotide
acgtgctacatgacataggcttatgcgtatactaga

SEQ ID NO: 8391 - DNA, 35 bp, Artificial Sequence
  Synthetic oligonucleotide
agacacttcgaggggaccagtgcggccgggaatcc

SEQ ID NO: 8392 - DNA, 35 bp, Artificial Sequence
  Synthetic oligonucleotide
agagactgctaaaggttggattgcgaccctggtac

SEQ ID NO: 8393 - DNA, 36 bp, Artificial Sequence
  Synthetic oligonucleotide
agcatacccccgatttcacgtattttgtgattcaca

SEQ ID NO: 8394 - DNA, 34 bp, Artificial Sequence
  Synthetic oligonucleotide
agcgcagtcgcgggcgctacgggttgcgcttatt

SEQ ID NO: 8395 - DNA, 36 bp, Artificial Sequence
  Synthetic oligonucleotide
agggtaaccaggggagttcccatgtgactacatcca

SEQ ID NO: 8396 - DNA, 37 bp, Artificial Sequence
  Synthetic oligonucleotide
agtccggtgcgtacttaaaaatcaacgtatcggacga

SEQ ID NO: 8397 - DNA, 38 bp, Artificial Sequence
  Synthetic oligonucleotide
atgtcatgtacacggatggggtgagccgccactcctga

SEQ ID NO: 8398 - DNA, 35 bp, Artificial Sequence
  Synthetic oligonucleotide
catgtgataggccggcattagcttactattatcac

SEQ ID NO: 8399 - DNA, 35 bp, Artificial Sequence
  Synthetic oligonucleotide
ccgtaactgctaattgatcggattgcgcagtaatc

SEQ ID NO: 8400 - DNA, 36 bp, Artificial Sequence
  Synthetic oligonucleotide
ctagccagacggcttttcgggggggagacgctctga

SEQ ID NO: 8401 - DNA, 35 bp, Artificial Sequence
  Synthetic oligonucleotide
ctcctgattaggacatatgtcgcagtcaccattac

SEQ ID NO: 8402 - DNA, 36 bp, Artificial Sequence
  Synthetic oligonucleotide
gaatctagtcgccctggctggggctttgattttcta

SEQ ID NO: 8403 - DNA, 35 bp, Artificial Sequence
  Synthetic oligonucleotide
gagatcaaacagcgaggattgtaatgtaaccgcat

SEQ ID NO: 8404 - DNA, 36 bp, Artificial Sequence
  Synthetic oligonucleotide
gcattaaactataaggtcgtcactgtaagagcttaa

SEQ ID NO: 8405 - DNA, 37 bp, Artificial Sequence
  Synthetic oligonucleotide
gcctgaagcaaatgcagttgtggcgggcgtagttcga

SEQ ID NO: 8406 - DNA, 37 bp, Artificial Sequence
  Synthetic oligonucleotide
gcgtagaagagctaaaggacgggatagcgagggaaga

SEQ ID NO: 8407 - DNA, 37 bp, Artificial Sequence
  Synthetic oligonucleotide
ggggtatggtcggaaggagccaggcctggtctggcga

SEQ ID NO: 8408 - DNA, 37 bp, Artificial Sequence
  Synthetic oligonucleotide
gtctgcagtggtgaatgaggtctggtatggggagaga

SEQ ID NO: 8409 - DNA, 35 bp, Artificial Sequence
  Synthetic oligonucleotide
gtggagacggtcctccaggccttagttttatgttg

SEQ ID NO: 8410 - DNA, 38 bp, Artificial Sequence
  Synthetic oligonucleotide
gttcaacacgcactgtgatgtcgcggtaatggttttga

SEQ ID NO: 8411 - DNA, 36 bp, Artificial Sequence
  Synthetic oligonucleotide
taaccgaccccaattaggtgttggaaggcgttatta

SEQ ID NO: 8412 - DNA, 36 bp, Artificial Sequence
  Synthetic oligonucleotide
taagtgttcggggaagtaccaacagcctcggaacca

SEQ ID NO: 8413 - DNA, 37 bp, Artificial Sequence
  Synthetic oligonucleotide
taggctctcccaagcgacggcgtcgcgtccttcaaga

SEQ ID NO: 8414 - DNA, 37 bp, Artificial Sequence
  Synthetic oligonucleotide
tatgcgtgctggagcattcgctgttattcccggatga

SEQ ID NO: 8415 - DNA, 33 bp, Artificial Sequence
  Synthetic oligonucleotide
tgagagcattgttgcgagaggctcccgtgagga

SEQ ID NO: 8416 - DNA, 38 bp, Artificial Sequence
  Synthetic oligonucleotide
tggtttccgacaatggtccgttgtgtcaatcgaactga

SEQ ID NO: 8417 - DNA, 35 bp, Artificial Sequence
  Synthetic oligonucleotide
tttgcgaccgagctttgatcggtagggcgaaacag

SEQ ID NO: 8418 - DNA, 37 bp, Artificial Sequence
  Synthetic oligonucleotide
tcgatacgaacggatagcacgtaatgaaatcgattga

SEQ ID NO: 8419 - DNA, 36 bp, Artificial Sequence
  Synthetic oligonucleotide
tgacaactactgcagtgttgtaaatacgcgagctta

SEQ ID NO: 8420 - DNA, 38 bp, Artificial Sequence
  Synthetic oligonucleotide
tacgtgtagctgatcacgttacgctaccagtcctgtga

SEQ ID NO: 8421 - DNA, 36 bp, Artificial Sequence
  Synthetic oligonucleotide
aaggagcgatcgatttacgctcatgggtacgacatg

SEQ ID NO: 8422 - DNA, 36 bp, Artificial Sequence
  Synthetic oligonucleotide
aatctgacacaatggggagtcagtctagctcaggca

SEQ ID NO: 8423 - DNA, 38 bp, Artificial Sequence
  Synthetic oligonucleotide
acgttacagagtgacttcatctaagatagcttggttga

SEQ ID NO: 8424 - DNA, 36 bp, Artificial Sequence
  Synthetic oligonucleotide
actgactagaaatagtcacagtcccaccgagcttaa

SEQ ID NO: 8425 - DNA, 37 bp, Artificial Sequence
  Synthetic oligonucleotide
agactggaacattatgggtatactttgcgtttacgga

SEQ ID NO: 8426 - DNA, 37 bp, Artificial Sequence
  Synthetic oligonucleotide
agtgaaaatgaccgctgtgtatgtaggtatggtaaga

SEQ ID NO: 8427 - DNA, 35 bp, Artificial Sequence
  Synthetic oligonucleotide
agtggatgggtgggtaggaaattcccgcgcctgtg

SEQ ID NO: 8428 - DNA, 35 bp, Artificial Sequence
  Synthetic oligonucleotide
atagtaaccttatttttgtgttgataaacgttggt

SEQ ID NO: 8429 - DNA, 35 bp, Artificial Sequence
  Synthetic oligonucleotide
atataggtctatggcacatcattgagctgtcgata

SEQ ID NO: 8430 - DNA, 35 bp, Artificial Sequence
  Synthetic oligonucleotide
atgtatgtccgcggtcatggaaaggacaatgttgg

SEQ ID NO: 8431 - DNA, 35 bp, Artificial Sequence
  Synthetic oligonucleotide
ggcctggccgcacaatgatatggtactgcgcccca

SEQ ID NO: 8432 - DNA, 37 bp, Artificial Sequence
  Synthetic oligonucleotide
gggaactgcgaaatgtggttgacgtctattggatgga

SEQ ID NO: 8433 - DNA, 36 bp, Artificial Sequence
  Synthetic oligonucleotide
ggtgccggtgtccggtttgggcttaggtcttggaga

SEQ ID NO: 8434 - DNA, 38 bp, Artificial Sequence
  Synthetic oligonucleotide
gtagaggcttggcaacagttgtcgcctttctgtactga

SEQ ID NO: 8435 - DNA, 35 bp, Artificial Sequence
  Synthetic oligonucleotide
tacacgacctctgtctggttgatattttcaatgtg

SEQ ID NO: 8436 - DNA, 37 bp, Artificial Sequence
  Synthetic oligonucleotide
tagggcgccccaccggctggcacgggcgtggtcggga

SEQ ID NO: 8437 - DNA, 38 bp, Artificial Sequence
  Synthetic oligonucleotide
tgagagacgcaacccctccgactccgacgcgctcatga

SEQ ID NO: 8438 - DNA, 35 bp, Artificial Sequence
  Synthetic oligonucleotide
tgagtagaactaaaagcggaacggtgagtatgagt

SEQ ID NO: 8439 - DNA, 38 bp, Artificial Sequence
  Synthetic oligonucleotide
tgttggttctattcgattggtacccaacgtggtattga

SEQ ID NO: 8440 - DNA, 36 bp, Artificial Sequence
  Synthetic oligonucleotide
ttactcccaaggcactaatgacttctgtcagcctgt

SEQ ID NO: 8441 - DNA, 38 bp, Artificial Sequence
  Synthetic oligonucleotide
tgcagtcaatggagtgtgaatattgtccagggatttga

SEQ ID NO: 8442 - DNA, 35 bp, Artificial Sequence
  Synthetic oligonucleotide
ggtcatcaggaccgtcggtactgcattggtatatg

SEQ ID NO: 8443 - DNA, 36 bp, Artificial Sequence
  Synthetic oligonucleotide
attgtgttcagaggtattttacgtgatgctgcttga

SEQ ID NO: 8444 - DNA, 38 bp, Artificial Sequence
  Synthetic oligonucleotide
acacatacttgcaagagtaacgcctagatcgggcgtga

SEQ ID NO: 8445 - DNA, 35 bp, Artificial Sequence
  Synthetic oligonucleotide
acagggcttacagcaactttccatcgggttttggt

SEQ ID NO: 8446 - DNA, 36 bp, Artificial Sequence
  Synthetic oligonucleotide
actaacgatagaggcctagcaatcgattagagagta

SEQ ID NO: 8447 - DNA, 37 bp, Artificial Sequence
  Synthetic oligonucleotide
atggcgttccgagaaagtgtctggaattcctagatga

SEQ ID NO: 8448 - DNA, 35 bp, Artificial Sequence
  Synthetic oligonucleotide
catagtccagcctttactcgggacagttaagagga

SEQ ID NO: 8449 - DNA, 35 bp, Artificial Sequence
  Synthetic oligonucleotide
gaagccctggtgaaagccagatagtggagattatg

SEQ ID NO: 8450 - DNA, 35 bp, Artificial Sequence
  Synthetic oligonucleotide
gataatcgccgctacgctcgggttcacagaatcac

SEQ ID NO: 8451 - DNA, 35 bp, Artificial Sequence
  Synthetic oligonucleotide
gcgtccatcggtgcggtttatatctcggagacctt

SEQ ID NO: 8452 - DNA, 37 bp, Artificial Sequence
  Synthetic oligonucleotide
ggtcgcaaacatggaaaatagtgatggcgggcatcga

SEQ ID NO: 8453 - DNA, 35 bp, Artificial Sequence
  Synthetic oligonucleotide
gttagtcacccattgtaactcgagtgcggatgggc

SEQ ID NO: 8454 - DNA, 38 bp, Artificial Sequence
  Synthetic oligonucleotide
tagggtcgtaacttcccgccgacttttgatcaaaatga

SEQ ID NO: 8455 - DNA, 37 bp, Artificial Sequence
  Synthetic oligonucleotide
tattaccggtgttggtggccactaggacgtcctagga

SEQ ID NO: 8456 - DNA, 37 bp, Artificial Sequence
  Synthetic oligonucleotide
tctgggaatctagattggagtgcattcgtacccagga

SEQ ID NO: 8457 - DNA, 35 bp, Artificial Sequence
  Synthetic oligonucleotide
tgcacggaacggaaaagagcgccatgtaacggacg

SEQ ID NO: 8458 - DNA, 37 bp, Artificial Sequence
  Synthetic oligonucleotide
tgtacaagagttttctgtgagaagaagaatgcgctga

SEQ ID NO: 8459 - DNA, 35 bp, Artificial Sequence
  Synthetic oligonucleotide
aacttggccacggaggggtcctcgtcgctatatgg

SEQ ID NO: 8460 - DNA, 35 bp, Artificial Sequence
  Synthetic oligonucleotide
aggagacgaagggtataggcgatacttgaacggta

SEQ ID NO: 8461 - DNA, 38 bp, Artificial Sequence
  Synthetic oligonucleotide
atacccctgtcaggggcttggaggatcattctgggtga

SEQ ID NO: 8462 - DNA, 37 bp, Artificial Sequence
  Synthetic oligonucleotide
atgttttcgaatttcaggtccgagctaaggtttcgga

SEQ ID NO: 8463 - DNA, 36 bp, Artificial Sequence
  Synthetic oligonucleotide
attgtcgattccgaagtccttgtgcgtaataccgga

SEQ ID NO: 8464 - DNA, 35 bp, Artificial Sequence
  Synthetic oligonucleotide
gaaaggaaggaattacgaggtcatgtgagggaaga

SEQ ID NO: 8465 - DNA, 37 bp, Artificial Sequence
  Synthetic oligonucleotide
gcccgggatactgcaacgggaagactgttgggttaga

SEQ ID NO: 8466 - DNA, 36 bp, Artificial Sequence
  Synthetic oligonucleotide
gtaagatggtaatcacgatacatcgcgcttgcacta

SEQ ID NO: 8467 - DNA, 36 bp, Artificial Sequence
  Synthetic oligonucleotide
gtaagtaggcgtacatggtcctgatttggggctcca

SEQ ID NO: 8468 - DNA, 38 bp, Artificial Sequence
  Synthetic oligonucleotide
gtaccctgcattgggcgtcaaagtagagcatgcaatga

SEQ ID NO: 8469 - DNA, 35 bp, Artificial Sequence
  Synthetic oligonucleotide
gtccacaacggccgtacaaagctttcgcgggtact

SEQ ID NO: 8470 - DNA, 38 bp, Artificial Sequence
  Synthetic oligonucleotide
gtggttggtgtatagaaagtagaatgactgcgtgctga

SEQ ID NO: 8471 - DNA, 36 bp, Artificial Sequence
  Synthetic oligonucleotide
taagggcgcaacgcggcacttggaggtcgacgatga

SEQ ID NO: 8472 - DNA, 36 bp, Artificial Sequence
  Synthetic oligonucleotide
tagacatcacaatcatgggcgtgggtcattggcgaa

SEQ ID NO: 8473 - DNA, 37 bp, Artificial Sequence
  Synthetic oligonucleotide
tgcgagggactctcgtcgttgtaacttttacggtgta

SEQ ID NO: 8474 - DNA, 35 bp, Artificial Sequence
  Synthetic oligonucleotide
tgctatcaactccttggttaattctaagggccctc

SEQ ID NO: 8475 - DNA, 36 bp, Artificial Sequence
  Synthetic oligonucleotide
tttcacgtgttggcccgttatccagaacgggtcgga

SEQ ID NO: 8476 - DNA, 35 bp, Artificial Sequence
  Synthetic oligonucleotide
atgggatcgacatggctacccttagtctgagctga

SEQ ID NO: 8477 - DNA, 35 bp, Artificial Sequence
  Synthetic oligonucleotide
aatggggcaaatccgagaatgtagtagttacttag

SEQ ID NO: 8478 - DNA, 37 bp, Artificial Sequence
  Synthetic oligonucleotide
actatgttcctgtgggactggtcacggatttaaatga

SEQ ID NO: 8479 - DNA, 35 bp, Artificial Sequence
  Synthetic oligonucleotide
cacgaatcagatcgtgagggtattgatgaatgagt

SEQ ID NO: 8480 - DNA, 37 bp, Artificial Sequence
  Synthetic oligonucleotide
gacaagtcatgggatcgcgggggatgccatccgccga

SEQ ID NO: 8481 - DNA, 35 bp, Artificial Sequence
  Synthetic oligonucleotide
gaccgagataggtcatcttctggaggtcatatggt

SEQ ID NO: 8482 - DNA, 37 bp, Artificial Sequence
  Synthetic oligonucleotide
ggtaaaagcattcatggggggacgggtttgtattgga

SEQ ID NO: 8483 - DNA, 38 bp, Artificial Sequence
  Synthetic oligonucleotide
ggtttgtcgagtatgtccaccaggtacttatcgcctga

SEQ ID NO: 8484 - DNA, 35 bp, Artificial Sequence
  Synthetic oligonucleotide
gtgaacgctcaggcactatagaaaggtgcgacaac

SEQ ID NO: 8485 - DNA, 37 bp, Artificial Sequence
  Synthetic oligonucleotide
gtgctcttagacgctggatttactgaagaggtgctga

SEQ ID NO: 8486 - DNA, 36 bp, Artificial Sequence
  Synthetic oligonucleotide
tggggaacgcatacacggtcacgcgggtggtacaag

SEQ ID NO: 8487 - DNA, 36 bp, Artificial Sequence
  Synthetic oligonucleotide
acaaggtacgtggcgcggcactggtctctttgacga

SEQ ID NO: 8488 - DNA, 37 bp, Artificial Sequence
  Synthetic oligonucleotide
atctacatagtgcctgctgatcggctaaaatgaagga

SEQ ID NO: 8489 - DNA, 36 bp, Artificial Sequence
  Synthetic oligonucleotide
gagccattagggttgccagacacaattgatcaggga

SEQ ID NO: 8490 - DNA, 36 bp, Artificial Sequence
  Synthetic oligonucleotide
gtcagtccgaattctgtcgattgtgcacccatcgga

SEQ ID NO: 8491 - DNA, 35 bp, Artificial Sequence
  Synthetic oligonucleotide
taattcacggtttttaaactgattgggattacgtt

SEQ ID NO: 8492 - DNA, 38 bp, Artificial Sequence
  Synthetic oligonucleotide
ggccccacgcggagggccaaatggtgcaccgtagttga

SEQ ID NO: 8493 - DNA, 36 bp, Artificial Sequence
  Synthetic oligonucleotide
aacgatagcttatccgttactttggggtagtgatga

SEQ ID NO: 8494 - DNA, 37 bp, Artificial Sequence
  Synthetic oligonucleotide
aattcaacgtatacgactgtaactacgttgatttgga

SEQ ID NO: 8495 - DNA, 35 bp, Artificial Sequence
  Synthetic oligonucleotide
agagtacgaaaggctatttctaaggcgttcgggta

SEQ ID NO: 8496 - DNA, 37 bp, Artificial Sequence
  Synthetic oligonucleotide
caatcctcgggaaagagattgcctccaaactaagtga

SEQ ID NO: 8497 - DNA, 38 bp, Artificial Sequence
  Synthetic oligonucleotide
gacaacatcctcattgaaaccacgaggttttttcctta

SEQ ID NO: 8498 - DNA, 37 bp, Artificial Sequence
  Synthetic oligonucleotide
gagaagtccaccggtaccactgtaggtacatagaaga

SEQ ID NO: 8499 - DNA, 38 bp, Artificial Sequence
  Synthetic oligonucleotide
gtgtagtgcgtatgatattttttgtgtcacgggtatga

SEQ ID NO: 8500 - DNA, 35 bp, Artificial Sequence
  Synthetic oligonucleotide
gttccaaagacacacgctgaagggaaatgtcggta

SEQ ID NO: 8501 - DNA, 38 bp, Artificial Sequence
  Synthetic oligonucleotide
tcaaactgcactcatggaaactcccatgtgcctggtga

SEQ ID NO: 8502 - DNA, 35 bp, Artificial Sequence
  Synthetic oligonucleotide
taacagtcatacggggaagggtcggttatcctgag

SEQ ID NO: 8503 - DNA, 36 bp, Artificial Sequence
  Synthetic oligonucleotide
aatcgaccggtagatcatttgaacctggacagagta

SEQ ID NO: 8504 - DNA, 36 bp, Artificial Sequence
  Synthetic oligonucleotide
gtacctgcccgcgtacggcaattcgtttacacatta

SEQ ID NO: 8505 - DNA, 37 bp, Artificial Sequence
  Synthetic oligonucleotide
gtagagctgagagttgttttgcgcagtgctactatga

SEQ ID NO: 8506 - DNA, 36 bp, Artificial Sequence
  Synthetic oligonucleotide
gtcctagggctccgtaagcgcgtttgagttaccgca

SEQ ID NO: 8507 - DNA, 38 bp, Artificial Sequence
  Synthetic oligonucleotide
tcttagtgactggacatgcatgttggtgaagttattga

SEQ ID NO: 8508 - DNA, 36 bp, Artificial Sequence
  Synthetic oligonucleotide
gatgcttcgtcaatacggtactcaggggacatttga

SEQ ID NO: 8509 - DNA, 37 bp, Artificial Sequence
  Synthetic oligonucleotide
gcgagtacgtgcccgatgagaatttcacgcatattga

SEQ ID NO: 8510 - DNA, 36 bp, Artificial Sequence
  Synthetic oligonucleotide
gttgctagtggcttgggaaacgtctctaatctgcaa

SEQ ID NO: 8511 - DNA, 35 bp, Artificial Sequence
  Synthetic oligonucleotide
tatgggagctagtcatgaaatttttttttatagcg

SEQ ID NO: 8512 - DNA, 36 bp, Artificial Sequence
  Synthetic oligonucleotide
ttcataaaagggaattgtcacctgctggaaagtaca

SEQ ID NO: 8513 - DNA, 37 bp, Artificial Sequence
  Synthetic oligonucleotide
aagaaccctgctgatttgtacgggagattgactttga

SEQ ID NO: 8514 - DNA, 36 bp, Artificial Sequence
  Synthetic oligonucleotide
taggggctgtactgaccatgattatgattttagtga

SEQ ID NO: 8515 - DNA, 38 bp, Artificial Sequence
  Synthetic oligonucleotide
agacgtgcagactgtgcaggtgttattcgacatggtga

SEQ ID NO: 8516 - DNA, 35 bp, Artificial Sequence
  Synthetic oligonucleotide
ataaagcaagttatcgcagttcactgagccgagga

SEQ ID NO: 8517 - DNA, 37 bp, Artificial Sequence
  Synthetic oligonucleotide
gttcgaagtgtcggtccaggcccgaattaggtgtcga

SEQ ID NO: 8518 - DNA, 35 bp, Artificial Sequence
  Synthetic oligonucleotide
tgtgggcctactgcaaataagaaccaatgggcgca

SEQ ID NO: 8519 - DNA, 35 bp, Artificial Sequence
  Synthetic oligonucleotide
ggtgggggcgcacctgagaaggtgtaggacacgga

SEQ ID NO: 8520 - DNA, 36 bp, Artificial Sequence
  Synthetic oligonucleotide
agtcgtgctctgtctaacacagacatacgtactata

SEQ ID NO: 8521 - DNA, 38 bp, Artificial Sequence
  Synthetic oligonucleotide
ctttggcgtaggtcgtggtcctatcgcatcaagcttga

SEQ ID NO: 8522 - DNA, 35 bp, Artificial Sequence
  Synthetic oligonucleotide
tgctaatctggattagcaatcctaggggtcagagc

SEQ ID NO: 8523 - DNA, 37 bp, Artificial Sequence
  Synthetic oligonucleotide
aaacatatgtgggagcttgaacttgtgcgtcttacga

SEQ ID NO: 8524 - DNA, 38 bp, Artificial Sequence
  Synthetic oligonucleotide
aaaccaccgatagtgatgccgagggactgtaggcatga

SEQ ID NO: 8525 - DNA, 36 bp, Artificial Sequence
  Synthetic oligonucleotide
aaatgtagagatctttacgttcagatggagtaagta

SEQ ID NO: 8526 - DNA, 37 bp, Artificial Sequence
  Synthetic oligonucleotide
aatagcgattcgttttctggtccgcaccacgtaggga

SEQ ID NO: 8527 - DNA, 38 bp, Artificial Sequence
  Synthetic oligonucleotide
aattctgtgatgttagacaattcgcaaaggacagatga

SEQ ID NO: 8528 - DNA, 37 bp, Artificial Sequence
  Synthetic oligonucleotide
acaccctttctcggagtggtttgcctgtgacgaatga

SEQ ID NO: 8529 - DNA, 36 bp, Artificial Sequence
  Synthetic oligonucleotide
acgaagtccggttcgttgcgcaaacgagaagttcta

SEQ ID NO: 8530 - DNA, 37 bp, Artificial Sequence
  Synthetic oligonucleotide
acgcaaactcggtgcaaaacgtctgcagacccatgga

SEQ ID NO: 8531 - DNA, 38 bp, Artificial Sequence
  Synthetic oligonucleotide
actaagggaactaggaggctacggggcctcgcccttga

SEQ ID NO: 8532 - DNA, 36 bp, Artificial Sequence
  Synthetic oligonucleotide
acttcaaacacgccgcgggactaagccgaaacagta

SEQ ID NO: 8533 - DNA, 38 bp, Artificial Sequence
  Synthetic oligonucleotide
agacatgcaactttgaatgtaatgcggtacgctggtga

SEQ ID NO: 8534 - DNA, 38 bp, Artificial Sequence
  Synthetic oligonucleotide
agcaaagacatcgtagtagagcagtgagctaaacgtga

SEQ ID NO: 8535 - DNA, 35 bp, Artificial Sequence
  Synthetic oligonucleotide
agcctaatcggaatgtggtcgtgtcgagggacgat

SEQ ID NO: 8536 - DNA, 36 bp, Artificial Sequence
  Synthetic oligonucleotide
agggtaatccaggaaatggttaagccaaaaatgaaa

SEQ ID NO: 8537 - DNA, 37 bp, Artificial Sequence
  Synthetic oligonucleotide
atatccgcagttcctgcaacctgaagtactcataaga

SEQ ID NO: 8538 - DNA, 35 bp, Artificial Sequence
  Synthetic oligonucleotide
atatgaagaataaggttcattctctcttggttgtt

SEQ ID NO: 8539 - DNA, 37 bp, Artificial Sequence
  Synthetic oligonucleotide
attaggggtagttggggtcccgggtttccctacggga

SEQ ID NO: 8540 - DNA, 37 bp, Artificial Sequence
  Synthetic oligonucleotide
cacgtcagcgtaagcgagacgtacgacgcgggattga

SEQ ID NO: 8541 - DNA, 35 bp, Artificial Sequence
  Synthetic oligonucleotide
catagggggggttacctattgtggacagtatccag

SEQ ID NO: 8542 - DNA, 35 bp, Artificial Sequence
  Synthetic oligonucleotide
catcatcgacctaaacttgacacgacggtaccagt

SEQ ID NO: 8543 - DNA, 38 bp, Artificial Sequence
  Synthetic oligonucleotide
catggtgggccatagggtagtccgcgaggcttgagtga

SEQ ID NO: 8544 - DNA, 35 bp, Artificial Sequence
  Synthetic oligonucleotide
cctgccaggtcaggacttacagctaggtataaata

SEQ ID NO: 8545 - DNA, 35 bp, Artificial Sequence
  Synthetic oligonucleotide
gaaaaatgacacgcgaagataggttgagtttattc

SEQ ID NO: 8546 - DNA, 37 bp, Artificial Sequence
  Synthetic oligonucleotide
gacatgtcttgggttgcgctgcgtatatggccctgga

SEQ ID NO: 8547 - DNA, 38 bp, Artificial Sequence
  Synthetic oligonucleotide
gacgttcacggaacgtacgttgccatttaacctggtga

SEQ ID NO: 8548 - DNA, 35 bp, Artificial Sequence
  Synthetic oligonucleotide
gattctgcaacacacctggggtggataccgagcct

SEQ ID NO: 8549 - DNA, 35 bp, Artificial Sequence
  Synthetic oligonucleotide
gctacgaacaaggacggaaacgcgattccttaagt

SEQ ID NO: 8550 - DNA, 36 bp, Artificial Sequence
  Synthetic oligonucleotide
gctgaccacgtatccattacgttggttcgcgccgta

SEQ ID NO: 8551 - DNA, 36 bp, Artificial Sequence
  Synthetic oligonucleotide
ggattgacgtaccgctatggggggatacctatgaga

SEQ ID NO: 8552 - DNA, 38 bp, Artificial Sequence
  Synthetic oligonucleotide
gggtggtgcaataacagttacaccggtcaaacatttga

SEQ ID NO: 8553 - DNA, 36 bp, Artificial Sequence
  Synthetic oligonucleotide
ggtaaagtggaccccccccgtaacgcttagttgtca

SEQ ID NO: 8554 - DNA, 36 bp, Artificial Sequence
  Synthetic oligonucleotide
ggtgtattacgtgtgagcctaacgagccaatgggga

SEQ ID NO: 8555 - DNA, 38 bp, Artificial Sequence
  Synthetic oligonucleotide
ggtttccaggggtgagtgaaacagctgtaattgcatga

SEQ ID NO: 8556 - DNA, 36 bp, Artificial Sequence
  Synthetic oligonucleotide
gtatcgacgataatgctggtaggcggtaaattcgca

SEQ ID NO: 8557 - DNA, 34 bp, Artificial Sequence
  Synthetic oligonucleotide
gtatgaactgtggtagaagtttgtagactgctga

SEQ ID NO: 8558 - DNA, 37 bp, Artificial Sequence
  Synthetic oligonucleotide
gtccgcccaagacatgtcgcgttagcttaagagcgga

SEQ ID NO: 8559 - DNA, 36 bp, Artificial Sequence
  Synthetic oligonucleotide
gtctgcccttcccgaaggtccgagttacagccatta

SEQ ID NO: 8560 - DNA, 38 bp, Artificial Sequence
  Synthetic oligonucleotide
gtggcaatgtacacggtgttaaatcctatgcgtcttga

SEQ ID NO: 8561 - DNA, 35 bp, Artificial Sequence
  Synthetic oligonucleotide
taaaaactaccacaccgtttcagggtgcaatgcta

SEQ ID NO: 8562 - DNA, 36 bp, Artificial Sequence
  Synthetic oligonucleotide
taatagttaagagcaggagcatccgtacaacggcga

SEQ ID NO: 8563 - DNA, 38 bp, Artificial Sequence
  Synthetic oligonucleotide
tcacttaggtgggcttcaaaagtggaatcgttgtatga

SEQ ID NO: 8564 - DNA, 37 bp, Artificial Sequence
  Synthetic oligonucleotide
tccgagaaagagctagggtgtttgaatagccagctga

SEQ ID NO: 8565 - DNA, 36 bp, Artificial Sequence
  Synthetic oligonucleotide
tcgccttgagaccagcgaagtgcggtatgcacggca

SEQ ID NO: 8566 - DNA, 37 bp, Artificial Sequence
  Synthetic oligonucleotide
tctgacaaacgagagtttcgcgtgtgatgcttatgga

SEQ ID NO: 8567 - DNA, 36 bp, Artificial Sequence
  Synthetic oligonucleotide
tgagaactcacgtaaggtgcgcggggggggtttgca

SEQ ID NO: 8568 - DNA, 35 bp, Artificial Sequence
  Synthetic oligonucleotide
tgagaagaggggtgtctcttcccgctcctgaaatt

SEQ ID NO: 8569 - DNA, 36 bp, Artificial Sequence
  Synthetic oligonucleotide
tgcgctgcacagccgtacgacgtgcacggcctccga

SEQ ID NO: 8570 - DNA, 37 bp, Artificial Sequence
  Synthetic oligonucleotide
tgcttctgagcgtaaagaagcgaacgcctaagcggga

SEQ ID NO: 8571 - DNA, 38 bp, Artificial Sequence
  Synthetic oligonucleotide
tgtccgctacgatggtgtgaggtatctcacagtcatga

SEQ ID NO: 8572 - DNA, 35 bp, Artificial Sequence
  Synthetic oligonucleotide
ttaagaaacgcgatcagccttgattagagtggggc

SEQ ID NO: 8573 - DNA, 35 bp, Artificial Sequence
  Synthetic oligonucleotide
ttcgggtgcagtgaaaaggcgattatcctttgtgg

SEQ ID NO: 8574 - DNA, 35 bp, Artificial Sequence
  Synthetic oligonucleotide
ttgcgacccgcgaaacggatttactcactagtaac

SEQ ID NO: 8575 - DNA, 36 bp, Artificial Sequence
  Synthetic oligonucleotide
ttgcgggctcgccacggggggaggaagatgctggga

SEQ ID NO: 8576 - DNA, 37 bp, Artificial Sequence
  Synthetic oligonucleotide
tttgggcgcacgaaagggcggtacaggctactccgga

SEQ ID NO: 8577 - DNA, 36 bp, Artificial Sequence
  Synthetic oligonucleotide
tttgtctatgcaaaggaggcgactgctcggcttgca

SEQ ID NO: 8578 - DNA, 35 bp, Artificial Sequence
  Synthetic oligonucleotide
aacacagtagtctgttcacgttacgtttcaactgc

SEQ ID NO: 8579 - DNA, 38 bp, Artificial Sequence
  Synthetic oligonucleotide
aacgggttcgtacgcaatgttcttgcccaatcagatga

SEQ ID NO: 8580 - DNA, 36 bp, Artificial Sequence
  Synthetic oligonucleotide
aacgtgtggcgcgcgctcatagtcagcacgctagga

SEQ ID NO: 8581 - DNA, 38 bp, Artificial Sequence
  Synthetic oligonucleotide
aacttcgatggacttgatatgtgcaatgacaccactga

SEQ ID NO: 8582 - DNA, 36 bp, Artificial Sequence
  Synthetic oligonucleotide
accaaggtgcagactccgtaatagcaatgggcatga

SEQ ID NO: 8583 - DNA, 35 bp, Artificial Sequence
  Synthetic oligonucleotide
acggccgtttcggacctgagcggattgcggggaaa

SEQ ID NO: 8584 - DNA, 37 bp, Artificial Sequence
  Synthetic oligonucleotide
acgtagagcgtgttcgaattgaccgtttaggcgccga

SEQ ID NO: 8585 - DNA, 37 bp, Artificial Sequence
  Synthetic oligonucleotide
actgctaaactccggacaccgtcgtgagtaccttaga

SEQ ID NO: 8586 - DNA, 35 bp, Artificial Sequence
  Synthetic oligonucleotide
actgtacctgggctggacacaggttcgaagacctg

SEQ ID NO: 8587 - DNA, 35 bp, Artificial Sequence
  Synthetic oligonucleotide
agtaccacgttcgagtctccccccgatgaaacctt

SEQ ID NO: 8588 - DNA, 36 bp, Artificial Sequence
  Synthetic oligonucleotide
ataaaacaagagcggtataccagcccattgcaaaga

SEQ ID NO: 8589 - DNA, 35 bp, Artificial Sequence
  Synthetic oligonucleotide
attcggttggagctctgtgtattggtccagaattg

SEQ ID NO: 8590 - DNA, 35 bp, Artificial Sequence
  Synthetic oligonucleotide
caacacgggggtcgacgtagttggactgattcggg

SEQ ID NO: 8591 - DNA, 37 bp, Artificial Sequence
  Synthetic oligonucleotide
cactgagatgctgttttaacgctagtgcgtggatgga

SEQ ID NO: 8592 - DNA, 36 bp, Artificial Sequence
  Synthetic oligonucleotide
ctcaccgacgcatgtcttgcgtgtttgagatttcga

SEQ ID NO: 8593 - DNA, 36 bp, Artificial Sequence
  Synthetic oligonucleotide
ctctgcactggggaaaggttaccctgccgatacgga

SEQ ID NO: 8594 - DNA, 36 bp, Artificial Sequence
  Synthetic oligonucleotide
gaaaaaggattcaccgtctggatttcttatatgaaa

SEQ ID NO: 8595 - DNA, 38 bp, Artificial Sequence
  Synthetic oligonucleotide
gaacaggtttccgcactagggtcttatgggaaagctga

SEQ ID NO: 8596 - DNA, 37 bp, Artificial Sequence
  Synthetic oligonucleotide
gaggtcatggagcaacgaagggcacgcctccgagtga

SEQ ID NO: 8597 - DNA, 36 bp, Artificial Sequence
  Synthetic oligonucleotide
gatggggggtcgactaccacatttgcggcctatgca

SEQ ID NO: 8598 - DNA, 38 bp, Artificial Sequence
  Synthetic oligonucleotide
gattcacctggtctatgaccactgacgtacactcttga

SEQ ID NO: 8599 - DNA, 37 bp, Artificial Sequence
  Synthetic oligonucleotide
gcatttctaacgacttcacatcggggcagtcatgaga

SEQ ID NO: 8600 - DNA, 38 bp, Artificial Sequence
  Synthetic oligonucleotide
gcgtacgatatagttttcaatcgtacttccgaaactga

SEQ ID NO: 8601 - DNA, 38 bp, Artificial Sequence
  Synthetic oligonucleotide
ggacttctcacgtatggtaaaatacgctagaccgatga

SEQ ID NO: 8602 - DNA, 37 bp, Artificial Sequence
  Synthetic oligonucleotide
ggctttaagatacattcaatttgtaggactgtacaga

SEQ ID NO: 8603 - DNA, 38 bp, Artificial Sequence
  Synthetic oligonucleotide
gggacctactaggggtgcggttttattaacgcaggtga

SEQ ID NO: 8604 - DNA, 35 bp, Artificial Sequence
  Synthetic oligonucleotide
gggataccgcgtagagggaagatcaggggatgcaa

SEQ ID NO: 8605 - DNA, 35 bp, Artificial Sequence
  Synthetic oligonucleotide
gggatattcatcggcccgggaactgcatcagcgac

SEQ ID NO: 8606 - DNA, 37 bp, Artificial Sequence
  Synthetic oligonucleotide
ggggcaacatctgagtctgaggctcgtcatcttgtga

SEQ ID NO: 8607 - DNA, 37 bp, Artificial Sequence
  Synthetic oligonucleotide
ggtgaaccgtactggcatcacggttatattatttgga

SEQ ID NO: 8608 - DNA, 38 bp, Artificial Sequence
  Synthetic oligonucleotide
ggtgtcattctgggtacaccacggattgctggcggtga

SEQ ID NO: 8609 - DNA, 36 bp, Artificial Sequence
  Synthetic oligonucleotide
gtaagctgaagcattacagcttagaaagtttctgga

SEQ ID NO: 8610 - DNA, 35 bp, Artificial Sequence
  Synthetic oligonucleotide
gtacttgcatgtattcaaacgccggtgttgacggc

SEQ ID NO: 8611 - DNA, 35 bp, Artificial Sequence
  Synthetic oligonucleotide
gtaggtcagaccaccttgatagctatgagatgggc

SEQ ID NO: 8612 - DNA, 36 bp, Artificial Sequence
  Synthetic oligonucleotide
gtattcaccccagcgcgcgcatgatcatgtcacgta

SEQ ID NO: 8613 - DNA, 36 bp, Artificial Sequence
  Synthetic oligonucleotide
gtcttgctcccttggagggctggagcgtggcggtta

SEQ ID NO: 8614 - DNA, 36 bp, Artificial Sequence
  Synthetic oligonucleotide
gtgggacgtgagtgggctgcacgggaacgaccgcga

SEQ ID NO: 8615 - DNA, 36 bp, Artificial Sequence
  Synthetic oligonucleotide
gtgggttattctacaagggtttgagcgcagtgcgca

SEQ ID NO: 8616 - DNA, 35 bp, Artificial Sequence
  Synthetic oligonucleotide
gttaaagtggcgctgaggtacagtttattccacgt

SEQ ID NO: 8617 - DNA, 35 bp, Artificial Sequence
  Synthetic oligonucleotide
gttaaatgaaggggccgcaatcgctgaccgctaca

SEQ ID NO: 8618 - DNA, 35 bp, Artificial Sequence
  Synthetic oligonucleotide
gtttaggcttttaaaggaggctttacatcctcaac

SEQ ID NO: 8619 - DNA, 36 bp, Artificial Sequence
  Synthetic oligonucleotide
tagaacgcggaatgtttatagaatgtggcagttata

SEQ ID NO: 8620 - DNA, 37 bp, Artificial Sequence
  Synthetic oligonucleotide
tagtcaacgctgttgtaccgcaatcctttattcggga

SEQ ID NO: 8621 - DNA, 38 bp, Artificial Sequence
  Synthetic oligonucleotide
tatgggtgggattaaccggtctttcaattgtggtttga

SEQ ID NO: 8622 - DNA, 36 bp, Artificial Sequence
  Synthetic oligonucleotide
tcagtactcctgatagcgtccagcgaataacgtcga

SEQ ID NO: 8623 - DNA, 36 bp, Artificial Sequence
  Synthetic oligonucleotide
tctacacaagttagggctttctgctctccggccaga

SEQ ID NO: 8624 - DNA, 35 bp, Artificial Sequence
  Synthetic oligonucleotide
tgcaaactagagcatggttcttgtcacagtgcttt

SEQ ID NO: 8625 - DNA, 38 bp, Artificial Sequence
  Synthetic oligonucleotide
tggtccaaatcgtcatagttggattcccgtgtcgttga

SEQ ID NO: 8626 - DNA, 37 bp, Artificial Sequence
  Synthetic oligonucleotide
tgtaacgtagtcctcgttcgtatcggataagccttga

SEQ ID NO: 8627 - DNA, 36 bp, Artificial Sequence
  Synthetic oligonucleotide
tgtaagggatggacccttcccccagagtatgaatca

SEQ ID NO: 8628 - DNA, 36 bp, Artificial Sequence
  Synthetic oligonucleotide
tgtagggcgtatggaggtgtctttgtcggtgtttga

SEQ ID NO: 8629 - DNA, 37 bp, Artificial Sequence
  Synthetic oligonucleotide
ttaccgatgctcagggaaactagtgcatgcccgggga

SEQ ID NO: 8630 - DNA, 35 bp, Artificial Sequence
  Synthetic oligonucleotide
ttccccatcggctgtgcatgtgctagatcgcaaat

SEQ ID NO: 8631 - DNA, 37 bp, Artificial Sequence
  Synthetic oligonucleotide
ttgacgtgtgcgtacgttaatgtcttgttaatagcga

SEQ ID NO: 8632 - DNA, 35 bp, Artificial Sequence
  Synthetic oligonucleotide
tttgatggactggtctcaggcccttcggccctatc

SEQ ID NO: 8633 - DNA, 36 bp, Artificial Sequence
  Synthetic oligonucleotide
tttggctgggtgatagcgtacgtatctcccccgata

SEQ ID NO: 8634 - DNA, 36 bp, Artificial Sequence
  Synthetic oligonucleotide
ttttggagcagtagatctttgtcagtcatgaattta

SEQ ID NO: 8635 - DNA, 35 bp, Artificial Sequence
  Synthetic oligonucleotide
aagaactgcgcgcatgccctacggtataagcaata

SEQ ID NO: 8636 - DNA, 38 bp, Artificial Sequence
  Synthetic oligonucleotide
acaattgattctgcgtggattgtcatagacgtatttga

SEQ ID NO: 8637 - DNA, 36 bp, Artificial Sequence
  Synthetic oligonucleotide
acacggggaggcgtagccaggtcaagcctaagggaa

SEQ ID NO: 8638 - DNA, 38 bp, Artificial Sequence
  Synthetic oligonucleotide
acccgttggcgtaatagcgggtggatagctactggtga

SEQ ID NO: 8639 - DNA, 35 bp, Artificial Sequence
  Synthetic oligonucleotide
accctatgcgcacgttggtttgagaatttcttgtt

SEQ ID NO: 8640 - DNA, 37 bp, Artificial Sequence
  Synthetic oligonucleotide
accgaacggcttagaactttgcatcatggcgttacga

SEQ ID NO: 8641 - DNA, 37 bp, Artificial Sequence
  Synthetic oligonucleotide
accgctcaactcggataaccagacgccggatgaatga

SEQ ID NO: 8642 - DNA, 36 bp, Artificial Sequence
  Synthetic oligonucleotide
acgctatacttctgcgtaagtcacgcgatacgataa

SEQ ID NO: 8643 - DNA, 37 bp, Artificial Sequence
  Synthetic oligonucleotide
actagtcctgttttggtactctagaggttagggatga

SEQ ID NO: 8644 - DNA, 36 bp, Artificial Sequence
  Synthetic oligonucleotide
actgagagcacgaagcctgcggtagttaatgtgata

SEQ ID NO: 8645 - DNA, 36 bp, Artificial Sequence
  Synthetic oligonucleotide
agcacttcaggatcagcctaagtgttaccagtctta

SEQ ID NO: 8646 - DNA, 37 bp, Artificial Sequence
  Synthetic oligonucleotide
cacgtggatcgtatagttgtaggtggggggctataga

SEQ ID NO: 8647 - DNA, 37 bp, Artificial Sequence
  Synthetic oligonucleotide
catgagcctcgggtcctaagctcaaaacgaatagcga

SEQ ID NO: 8648 - DNA, 36 bp, Artificial Sequence
  Synthetic oligonucleotide
ctatggagaggccgcaggcgtgctggcgcttaacta

SEQ ID NO: 8649 - DNA, 36 bp, Artificial Sequence
  Synthetic oligonucleotide
ctcacacgggcggtcgggccggcgagggaatgagta

SEQ ID NO: 8650 - DNA, 35 bp, Artificial Sequence
  Synthetic oligonucleotide
gaaacatttaaacctttttcagcgttttgagctgg

SEQ ID NO: 8651 - DNA, 38 bp, Artificial Sequence
  Synthetic oligonucleotide
gagacgctatcgttagcagtatacgtggtatcgactga

SEQ ID NO: 8652 - DNA, 37 bp, Artificial Sequence
  Synthetic oligonucleotide
gagcatggcccgcaaatcactggcatttgggtaaaga

SEQ ID NO: 8653 - DNA, 35 bp, Artificial Sequence
  Synthetic oligonucleotide
gcaacgagggcacatggacaaacaacaaagatgaa

SEQ ID NO: 8654 - DNA, 35 bp, Artificial Sequence
  Synthetic oligonucleotide
gcacacaacgacgttttgtcctcttgtattgtgtc

SEQ ID NO: 8655 - DNA, 37 bp, Artificial Sequence
  Synthetic oligonucleotide
gcacattcaacggaaggactatcattatgggtaatga

SEQ ID NO: 8656 - DNA, 37 bp, Artificial Sequence
  Synthetic oligonucleotide
gccgtgatttctgcccagcaaacactgctggttacga

SEQ ID NO: 8657 - DNA, 38 bp, Artificial Sequence
  Synthetic oligonucleotide
gcgagtgagaacttcgcaggtgtattggcgtattttga

SEQ ID NO: 8658 - DNA, 38 bp, Artificial Sequence
  Synthetic oligonucleotide
gctctcgaggttacctaactggcaggtggtaaacctga

SEQ ID NO: 8659 - DNA, 38 bp, Artificial Sequence
  Synthetic oligonucleotide
gcttatgtgaccgacgttagagatccccttgtcgctga

SEQ ID NO: 8660 - DNA, 36 bp, Artificial Sequence
  Synthetic oligonucleotide
gcttcacgagcttcttggcgtacgatacagaaacta

SEQ ID NO: 8661 - DNA, 35 bp, Artificial Sequence
  Synthetic oligonucleotide
ggtgacgtgcgttacaggtcattcgactcctacaa

SEQ ID NO: 8662 - DNA, 37 bp, Artificial Sequence
  Synthetic oligonucleotide
gtaaatccccttggtggatccgtcgccatgtggctga

SEQ ID NO: 8663 - DNA, 35 bp, Artificial Sequence
  Synthetic oligonucleotide
gtcctgaacaggtccattactccagttggccggta

SEQ ID NO: 8664 - DNA, 36 bp, Artificial Sequence
  Synthetic oligonucleotide
gtcgaaggtagtcttgcgtcgccgaatacgactaga

SEQ ID NO: 8665 - DNA, 35 bp, Artificial Sequence
  Synthetic oligonucleotide
gtggtgtaaccagtagggtagttcgttcaggacca

SEQ ID NO: 8666 - DNA, 37 bp, Artificial Sequence
  Synthetic oligonucleotide
gttggacgcgcctacgtcaagtccacctgggtaaaga

SEQ ID NO: 8667 - DNA, 38 bp, Artificial Sequence
  Synthetic oligonucleotide
gtttataagtcggaaattaacgccagtttacattctga

SEQ ID NO: 8668 - DNA, 36 bp, Artificial Sequence
  Synthetic oligonucleotide
taactgctggactacggtctgtgtgattcgttgaca

SEQ ID NO: 8669 - DNA, 38 bp, Artificial Sequence
  Synthetic oligonucleotide
tgacgctcagaatattgcgagtatccagtgcgtattga

SEQ ID NO: 8670 - DNA, 38 bp, Artificial Sequence
  Synthetic oligonucleotide
tggtacttggggtccataggcgaacatcagagatctga

SEQ ID NO: 8671 - DNA, 38 bp, Artificial Sequence
  Synthetic oligonucleotide
tggtccaacgtgtacgttttagttcatgcaatggttga

SEQ ID NO: 8672 - DNA, 35 bp, Artificial Sequence
  Synthetic oligonucleotide
tgtactgtgggatagactaatgtataatccggatg

SEQ ID NO: 8673 - DNA, 37 bp, Artificial Sequence
  Synthetic oligonucleotide
tttagggcgaccccaggtgcgttttggcgcaacgtga

SEQ ID NO: 8674 - DNA, 37 bp, Artificial Sequence
  Synthetic oligonucleotide
tagcgggctagccggtatcacaaatatactcctggga

SEQ ID NO: 8675 - DNA, 31 bp, Artificial Sequence
  Synthetic oligonucleotide
aacaggcttcctagctggcgactactgcagt

SEQ ID NO: 8676 - DNA, 37 bp, Artificial Sequence
  Synthetic oligonucleotide
aacgaaccacatgctatccatgcacgggcaatcatga

SEQ ID NO: 8677 - DNA, 36 bp, Artificial Sequence
  Synthetic oligonucleotide
actatagcgaacgagtggccaccaagtcgagcatca

SEQ ID NO: 8678 - DNA, 35 bp, Artificial Sequence
  Synthetic oligonucleotide
agactggcaaaccagaatgtcagtctccgataggt

SEQ ID NO: 8679 - DNA, 38 bp, Artificial Sequence
  Synthetic oligonucleotide
agtcattggtagacgcgaaagctgcggttttatcatga

SEQ ID NO: 8680 - DNA, 38 bp, Artificial Sequence
  Synthetic oligonucleotide
atatttcgggctgcagggccatggtactactcaaatga

SEQ ID NO: 8681 - DNA, 37 bp, Artificial Sequence
  Synthetic oligonucleotide
attgaggcccacaatgtcgtgggactagttagggtga

SEQ ID NO: 8682 - DNA, 37 bp, Artificial Sequence
  Synthetic oligonucleotide
gactgtagatgcctgtcatgcacagggatccaggcga

SEQ ID NO: 8683 - DNA, 37 bp, Artificial Sequence
  Synthetic oligonucleotide
gcagacatgagattagctgagtccgaggcccatacga

SEQ ID NO: 8684 - DNA, 36 bp, Artificial Sequence
  Synthetic oligonucleotide
gcggggaaggcccacgtacgcaaattgggctccata

SEQ ID NO: 8685 - DNA, 37 bp, Artificial Sequence
  Synthetic oligonucleotide
gctgctgattgagatgggagggccgtaagacattcga

SEQ ID NO: 8686 - DNA, 37 bp, Artificial Sequence
  Synthetic oligonucleotide
gtcctttataataggaacagcggagtgcgtgtactga

SEQ ID NO: 8687 - DNA, 35 bp, Artificial Sequence
  Synthetic oligonucleotide
gtgtactctgatcaatccgtgtacgctcaactctt

SEQ ID NO: 8688 - DNA, 36 bp, Artificial Sequence
  Synthetic oligonucleotide
taacgatcgtgctacgaaatgcaaccacgcgtccga

SEQ ID NO: 8689 - DNA, 37 bp, Artificial Sequence
  Synthetic oligonucleotide
tacgggaattccgccagtgtgggccgcggactacctg

SEQ ID NO: 8690 - DNA, 35 bp, Artificial Sequence
  Synthetic oligonucleotide
tagtcaaggcatggagctgggccccccgaggctcg

SEQ ID NO: 8691 - DNA, 38 bp, Artificial Sequence
  Synthetic oligonucleotide
tcaaattgatcgaatcctcgtaggagtaggagatctga

SEQ ID NO: 8692 - DNA, 35 bp, Artificial Sequence
  Synthetic oligonucleotide
ttacaatggcgatggcggagtaaaagtgagcgcag

SEQ ID NO: 8693 - DNA, 37 bp, Artificial Sequence
  Synthetic oligonucleotide
ttgagcacttgaaactgagcaacagtcccagtatgga

SEQ ID NO: 8694 - DNA, 35 bp, Artificial Sequence
  Synthetic oligonucleotide
ttatctacgatgaccgcctgaacgttctgtatgcc

SEQ ID NO: 8695 - DNA, 36 bp, Artificial Sequence
  Synthetic oligonucleotide
aactatcgtaaggagactcggtgtgcatttgtaata

SEQ ID NO: 8696 - DNA, 36 bp, Artificial Sequence
  Synthetic oligonucleotide
aagagcgactggggtcttaggtcatgagacacacca

SEQ ID NO: 8697 - DNA, 36 bp, Artificial Sequence
  Synthetic oligonucleotide
aataatgccgaaggcggagtatcagggctcatggca

SEQ ID NO: 8698 - DNA, 35 bp, Artificial Sequence
  Synthetic oligonucleotide
acccacatgtccaggagtcatagagtgcgtccggt

SEQ ID NO: 8699 - DNA, 35 bp, Artificial Sequence
  Synthetic oligonucleotide
acgggagtcgttccacttttcgtttgtgaatcctg

SEQ ID NO: 8700 - DNA, 38 bp, Artificial Sequence
  Synthetic oligonucleotide
actcttagcgtgatgcaaacgcggttaggaatcgctga

SEQ ID NO: 8701 - DNA, 38 bp, Artificial Sequence
  Synthetic oligonucleotide
atagtagtttacagtttggtgtcgactagcatacgtga

SEQ ID NO: 8702 - DNA, 36 bp, Artificial Sequence
  Synthetic oligonucleotide
atgcacaatgagagtcagaatgggtcgtaagggata

SEQ ID NO: 8703 - DNA, 38 bp, Artificial Sequence
  Synthetic oligonucleotide
ctgcccaatgcgctagcttcattcatgtgccagactga

SEQ ID NO: 8704 - DNA, 35 bp, Artificial Sequence
  Synthetic oligonucleotide
gaagctcaagatgttttgctctccgtcgcccctac

SEQ ID NO: 8705 - DNA, 37 bp, Artificial Sequence
  Synthetic oligonucleotide
gattaacaggggtacttccggctccgcgcaaactaga

SEQ ID NO: 8706 - DNA, 36 bp, Artificial Sequence
  Synthetic oligonucleotide
gcactctcatacaggttccataactcgcgtcttgga

SEQ ID NO: 8707 - DNA, 34 bp, Artificial Sequence
  Synthetic oligonucleotide
gcagaacttttggaagactcttgttagatttcga

SEQ ID NO: 8708 - DNA, 38 bp, Artificial Sequence
  Synthetic oligonucleotide
gcattgcgaaaaagtaccggtccgctcagacactatga

SEQ ID NO: 8709 - DNA, 37 bp, Artificial Sequence
  Synthetic oligonucleotide
gctaagcattggctcatagtaacatgttcatgcagga

SEQ ID NO: 8710 - DNA, 38 bp, Artificial Sequence
  Synthetic oligonucleotide
gggtccttcatggggtcagtcacaatgattatcactga

SEQ ID NO: 8711 - DNA, 37 bp, Artificial Sequence
  Synthetic oligonucleotide
gtcttggagccacatcgggcaaggggtataagtgaga

SEQ ID NO: 8712 - DNA, 36 bp, Artificial Sequence
  Synthetic oligonucleotide
taaccggtgggttggtcgcacaactagcgaacgcga

SEQ ID NO: 8713 - DNA, 35 bp, Artificial Sequence
  Synthetic oligonucleotide
tatggtgaccgaaacctggggcggttcccagtgcg

SEQ ID NO: 8714 - DNA, 37 bp, Artificial Sequence
  Synthetic oligonucleotide
tccgtggctgctgggcgacctcgggcctaggcctaga

SEQ ID NO: 8715 - DNA, 36 bp, Artificial Sequence
  Synthetic oligonucleotide
tctatcatgggcccctagacgagatcagtctgtgtc

SEQ ID NO: 8716 - DNA, 35 bp, Artificial Sequence
  Synthetic oligonucleotide
tctggtctacgccaggtaatccgtatggactaagg

SEQ ID NO: 8717 - DNA, 36 bp, Artificial Sequence
  Synthetic oligonucleotide
tgatggttgaaccgaatgtcctctggagaccctaca

SEQ ID NO: 8718 - DNA, 35 bp, Artificial Sequence
  Synthetic oligonucleotide
tgtactcagtaaggaattgctttagatttgaatta

SEQ ID NO: 8719 - DNA, 35 bp, Artificial Sequence
  Synthetic oligonucleotide
aaagcttctaaggataacgataggctaatatcagg

SEQ ID NO: 8720 - DNA, 37 bp, Artificial Sequence
  Synthetic oligonucleotide
agggatatgatatagattgtttggttcccgggttcga

SEQ ID NO: 8721 - DNA, 36 bp, Artificial Sequence
  Synthetic oligonucleotide
gaagggacctgacagctgaggcgtttcaatgggcga

SEQ ID NO: 8722 - DNA, 35 bp, Artificial Sequence
  Synthetic oligonucleotide
gagggttaggacgggttcgataactttcagtagag

SEQ ID NO: 8723 - DNA, 38 bp, Artificial Sequence
  Synthetic oligonucleotide
gagtacccctttgtgtaaggggcgggcctttataatga

SEQ ID NO: 8724 - DNA, 37 bp, Artificial Sequence
  Synthetic oligonucleotide
gcaaagattcaccggcacatctcactagaggtgatga

SEQ ID NO: 8725 - DNA, 38 bp, Artificial Sequence
  Synthetic oligonucleotide
gcatcatgggccagtagtatcgatgtcagtgaaattga

SEQ ID NO: 8726 - DNA, 38 bp, Artificial Sequence
  Synthetic oligonucleotide
gcgattaacatattcgtcctgttcgatcgccctccgga

SEQ ID NO: 8727 - DNA, 38 bp, Artificial Sequence
  Synthetic oligonucleotide
tgacaagttggtaggtttgattagacaggtcccgctga

SEQ ID NO: 8728 - DNA, 34 bp, Artificial Sequence
  Synthetic oligonucleotide
tagggattagtcctgcgcaaaatgtcaacatttc

SEQ ID NO: 8729 - DNA, 35 bp, Artificial Sequence
  Synthetic oligonucleotide
aaaatacggggccctgtcttttgacactatctgcc

SEQ ID NO: 8730 - DNA, 37 bp, Artificial Sequence
  Synthetic oligonucleotide
accccctgtcggtcgcccggtcctttccactgtatga

SEQ ID NO: 8731 - DNA, 36 bp, Artificial Sequence
  Synthetic oligonucleotide
acttggtaatgttgtttccgcgttcgagctttacta

SEQ ID NO: 8732 - DNA, 36 bp, Artificial Sequence
  Synthetic oligonucleotide
agtattatgtggcaacactttaaagtcgatctttaa

SEQ ID NO: 8733 - DNA, 36 bp, Artificial Sequence
  Synthetic oligonucleotide
atacttagcgtagttgccaactacgtggggtgcgca

SEQ ID NO: 8734 - DNA, 37 bp, Artificial Sequence
  Synthetic oligonucleotide
gaatcgaataaggagggtgctaatatgcatataccga

SEQ ID NO: 8735 - DNA, 37 bp, Artificial Sequence
  Synthetic oligonucleotide
ggggggtgggtttaacggatccctagaatcaacagga

SEQ ID NO: 8736 - DNA, 36 bp, Artificial Sequence
  Synthetic oligonucleotide
gtgttagatttggcattagtgtgttgaccatttaga

SEQ ID NO: 8737 - DNA, 37 bp, Artificial Sequence
  Synthetic oligonucleotide
tagttcgcgaggtaagtacgggagttggtcttctcga

SEQ ID NO: 8738 - DNA, 37 bp, Artificial Sequence
  Synthetic oligonucleotide
tgaagcgccccaaacatatctctttcgttgctgccga

SEQ ID NO: 8739 - DNA, 37 bp, Artificial Sequence
  Synthetic oligonucleotide
tgttactgccggttttggtgtttagtgttaggttcga

SEQ ID NO: 8740 - DNA, 37 bp, Artificial Sequence
  Synthetic oligonucleotide
acatgtaagcttcttatcgaagcgttttaaggtaaga

SEQ ID NO: 8741 - DNA, 38 bp, Artificial Sequence
  Synthetic oligonucleotide
agtgcatagtactaggaccaatgcagaatgttatgtga

SEQ ID NO: 8742 - DNA, 38 bp, Artificial Sequence
  Synthetic oligonucleotide
ccgtaccacgaaagtagccgtcaccatgttaggagtga

SEQ ID NO: 8743 - DNA, 36 bp, Artificial Sequence
  Synthetic oligonucleotide
gcatgaaacgataccgctaggcgatctctttgtaca

SEQ ID NO: 8744 - DNA, 35 bp, Artificial Sequence
  Synthetic oligonucleotide
gcctgagttcatggccggaactgtagatgacagtg

SEQ ID NO: 8745 - DNA, 35 bp, Artificial Sequence
  Synthetic oligonucleotide
ggctagaggctatgtttacaggttgaatacggtgt

SEQ ID NO: 8746 - DNA, 38 bp, Artificial Sequence
  Synthetic oligonucleotide
tattcggacaatgacgaagtcgtcgtaggagcgtatga

SEQ ID NO: 8747 - DNA, 36 bp, Artificial Sequence
  Synthetic oligonucleotide
tcatagctagacctgtctgttctaagagtccgtgca

SEQ ID NO: 8748 - DNA, 38 bp, Artificial Sequence
  Synthetic oligonucleotide
tccgtactgggtgcggaattgagacgtgagtatattga

SEQ ID NO: 8749 - DNA, 36 bp, Artificial Sequence
  Synthetic oligonucleotide
tgatcaatcgacatcgtttaatgaggtacgtactta

SEQ ID NO: 8750 - DNA, 37 bp, Artificial Sequence
  Synthetic oligonucleotide
gccccgcgaaagcctggatcacgaggtaacacgcgga

SEQ ID NO: 8751 - DNA, 37 bp, Artificial Sequence
  Synthetic oligonucleotide
aacagttaccgcattcggatgggggtcatgactacga

SEQ ID NO: 8752 - DNA, 37 bp, Artificial Sequence
  Synthetic oligonucleotide
acagtcagattgatttaactatgttagcccggatgga

SEQ ID NO: 8753 - DNA, 35 bp, Artificial Sequence
  Synthetic oligonucleotide
acatatgacccgtagagttgtgtgccttgtgtgtt

SEQ ID NO: 8754 - DNA, 36 bp, Artificial Sequence
  Synthetic oligonucleotide
agtgccaacttgaatgggaaaatgcgtcactaacga

SEQ ID NO: 8755 - DNA, 36 bp, Artificial Sequence
  Synthetic oligonucleotide
atgagtcgtccataagggcacatcgattgggaaaga

SEQ ID NO: 8756 - DNA, 35 bp, Artificial Sequence
  Synthetic oligonucleotide
gcccgagtggaaacggaagaagagtgggttaaacg

SEQ ID NO: 8757 - DNA, 36 bp, Artificial Sequence
  Synthetic oligonucleotide
gcgtgcaaaccagctttcttgggcgccgttggtcaa

SEQ ID NO: 8758 - DNA, 35 bp, Artificial Sequence
  Synthetic oligonucleotide
gtaacaatgtacaacgatagggcgtgtagcacttt

SEQ ID NO: 8759 - DNA, 37 bp, Artificial Sequence
  Synthetic oligonucleotide
gtggaccgtacatgcgggtgtaacgcaactaagtgga

SEQ ID NO: 8760 - DNA, 37 bp, Artificial Sequence
  Synthetic oligonucleotide
ttgactgctgatcgtggaacacattttaatggtccga

SEQ ID NO: 8761 - DNA, 36 bp, Artificial Sequence
  Synthetic oligonucleotide
gggtgttgcacgtgggagccattacccagtattaga

SEQ ID NO: 8762 - DNA, 36 bp, Artificial Sequence
  Synthetic oligonucleotide
tccaagtacctgtggtgactcaggacatcgtaacca

SEQ ID NO: 8763 - DNA, 36 bp, Artificial Sequence
  Synthetic oligonucleotide
agtcaaggaaatgttcaagtccaagtggctagatta

SEQ ID NO: 8764 - DNA, 36 bp, Artificial Sequence
  Synthetic oligonucleotide
gacctccctacaggactgggtccggtggggagcata

SEQ ID NO: 8765 - DNA, 36 bp, Artificial Sequence
  Synthetic oligonucleotide
gcattaaacgcgcctgtacagataatgcgggttgca

SEQ ID NO: 8766 - DNA, 36 bp, Artificial Sequence
  Synthetic oligonucleotide
gcgaacgggtccaaggtaggtctgtcgctgtctgca

SEQ ID NO: 8767 - DNA, 38 bp, Artificial Sequence
  Synthetic oligonucleotide
gtagcaggacaggtagtaagacttacccggttgaatga

SEQ ID NO: 8768 - DNA, 37 bp, Artificial Sequence
  Synthetic oligonucleotide
tgtagcccttagggaaacggtcctgttctagatccga

SEQ ID NO: 8769 - DNA, 36 bp, Artificial Sequence
  Synthetic oligonucleotide
ttaataacgacgcctgcaatccctcagtggcgaaca

SEQ ID NO: 8770 - DNA, 37 bp, Artificial Sequence
  Synthetic oligonucleotide
cacttacgtactgatcatctcaacggctcttacgtga

SEQ ID NO: 8771 - DNA, 37 bp, Artificial Sequence
  Synthetic oligonucleotide
gactttatcacaaggttccagcttaagggtatgtgga

SEQ ID NO: 8772 - DNA, 35 bp, Artificial Sequence
  Synthetic oligonucleotide
gtatccgaaccggtaaattgctcccgctcccccgt

SEQ ID NO: 8773 - DNA, 37 bp, Artificial Sequence
  Synthetic oligonucleotide
tggtccgcagccgaactgcgcctcttacgtacaacga

SEQ ID NO: 8774 - DNA, 38 bp, Artificial Sequence
  Synthetic oligonucleotide
aagcgccccttcgtcgtttgaagggtatttcacactga

SEQ ID NO: 8775 - DNA, 35 bp, Artificial Sequence
  Synthetic oligonucleotide
cggtactgcgatcacgaagtccacgcaggaacaag

SEQ ID NO: 8776 - DNA, 36 bp, Artificial Sequence
  Synthetic oligonucleotide
accaggacagggtacttgaactgcgacgaacgaaaa

SEQ ID NO: 8777 - DNA, 37 bp, Artificial Sequence
  Synthetic oligonucleotide
tgtagaattaagtggcgagcgagcacgctaatgtaga

SEQ ID NO: 8778 - DNA, 36 bp, Artificial Sequence
  Synthetic oligonucleotide
gaactggaacgtttaacgctcttttcgttgttacca

SEQ ID NO: 8779 - DNA, 38 bp, Artificial Sequence
  Synthetic oligonucleotide
gccactgagtcttggggatgagggtgtaagttgtctga

SEQ ID NO: 8780 - DNA, 36 bp, Artificial Sequence
  Synthetic oligonucleotide
ttcagggtaccgtacacaatgttaggttgatcatta

SEQ ID NO: 8781 - DNA, 36 bp, Artificial Sequence
  Synthetic oligonucleotide
gtggaaaagggctttactgttatcgcacatgtacca

SEQ ID NO: 8782 - DNA, 37 bp, Artificial Sequence
  Synthetic oligonucleotide
ttgcattgagtgttgcccggaaaggtcggagagctga

SEQ ID NO: 8783 - DNA, 38 bp, Artificial Sequence
  Synthetic oligonucleotide
ttcgtgatggtagtttatggttaaacgacttggcgtga

SEQ ID NO: 8784 - DNA, 36 bp, Artificial Sequence
  Synthetic oligonucleotide
atgccacgggattccgcactcactgcactggtttta

SEQ ID NO: 8785 - DNA, 36 bp, Artificial Sequence
  Synthetic oligonucleotide
aacgatggtagaaatgcagctctcgaaagtgaacaa

SEQ ID NO: 8786 - DNA, 37 bp, Artificial Sequence
  Synthetic oligonucleotide
agcgttcattccgagggataatagtgcgttttgcaga

SEQ ID NO: 8787 - DNA, 35 bp, Artificial Sequence
  Synthetic oligonucleotide
atactagggggggattaattgcgatgtgctctaaa

SEQ ID NO: 8788 - DNA, 35 bp, Artificial Sequence
  Synthetic oligonucleotide
atgcacgacaccgtgtggaccgttgacagtacgtt

SEQ ID NO: 8789 - DNA, 37 bp, Artificial Sequence
  Synthetic oligonucleotide
gaaacgacgttgcaccatgtaagaagggcaatctgga

SEQ ID NO: 8790 - DNA, 37 bp, Artificial Sequence
  Synthetic oligonucleotide
gcgatcatacgcttcgcacggtgctatgtagctaaga

SEQ ID NO: 8791 - DNA, 36 bp, Artificial Sequence
  Synthetic oligonucleotide
ggtaggaggaagtgcgacacattaatgcgatgttaa

SEQ ID NO: 8792 - DNA, 36 bp, Artificial Sequence
  Synthetic oligonucleotide
tattctgtgctgctccctgtgcatcgaaatgctgta

SEQ ID NO: 8793 - DNA, 36 bp, Artificial Sequence
  Synthetic oligonucleotide
tcaaactgggtccgtacgaagaaggtcttggcgaca

SEQ ID NO: 8794 - DNA, 35 bp, Artificial Sequence
  Synthetic oligonucleotide
aaaacgctaacgcacggcgtgcctatggtagcttt

SEQ ID NO: 8795 - DNA, 35 bp, Artificial Sequence
  Synthetic oligonucleotide
aaaagcagtacactgcttgacgccgcaccatgata

SEQ ID NO: 8796 - DNA, 36 bp, Artificial Sequence
  Synthetic oligonucleotide
aaatgagttccgcataggacctgggtatgtttctga

SEQ ID NO: 8797 - DNA, 38 bp, Artificial Sequence
  Synthetic oligonucleotide
aaatggctcgagcaggccacgttcgagagttaatgtga

SEQ ID NO: 8798 - DNA, 35 bp, Artificial Sequence
  Synthetic oligonucleotide
aacacttcgataatccacgatgcaggtagacacat

SEQ ID NO: 8799 - DNA, 36 bp, Artificial Sequence
  Synthetic oligonucleotide
aacaggcgaagcggattccacctcggctgtcatgga

SEQ ID NO: 8800 - DNA, 36 bp, Artificial Sequence
  Synthetic oligonucleotide
aaccacctgattaagtgagaaaaatcacgtccgcaa

SEQ ID NO: 8801 - DNA, 35 bp, Artificial Sequence
  Synthetic oligonucleotide
aacgatacagtgcgggtatatgtagtagtcgccca

SEQ ID NO: 8802 - DNA, 36 bp, Artificial Sequence
  Synthetic oligonucleotide
aacgcggggggacgacactagggaaattaagtggta

SEQ ID NO: 8803 - DNA, 36 bp, Artificial Sequence
  Synthetic oligonucleotide
aacggtggggtcaatcatacggatagggcctaaaga

SEQ ID NO: 8804 - DNA, 38 bp, Artificial Sequence
  Synthetic oligonucleotide
aacgttggtgatttcgtacgaaagggtctgccagttga

SEQ ID NO: 8805 - DNA, 36 bp, Artificial Sequence
  Synthetic oligonucleotide
aactactgcctcggagggattcggtgtgtacctgaa

SEQ ID NO: 8806 - DNA, 38 bp, Artificial Sequence
  Synthetic oligonucleotide
aactatacacagtttgctggcaaagcaatcatctgtga

SEQ ID NO: 8807 - DNA, 35 bp, Artificial Sequence
  Synthetic oligonucleotide
aactcttggcgagtatctcaaatgctagtcaaatc

SEQ ID NO: 8808 - DNA, 37 bp, Artificial Sequence
  Synthetic oligonucleotide
aagacgggagacgtttaagtacgtggtccgccaagga

SEQ ID NO: 8809 - DNA, 36 bp, Artificial Sequence
  Synthetic oligonucleotide
aagaggttttgtccggctccaacgggcctgtaaggc

SEQ ID NO: 8810 - DNA, 35 bp, Artificial Sequence
  Synthetic oligonucleotide
aagctcaagtattgctccgctggggaggagggggc

SEQ ID NO: 8811 - DNA, 38 bp, Artificial Sequence
  Synthetic oligonucleotide
aagtgaagacgtcttcctcgtgcctttcatgcgagtga

SEQ ID NO: 8812 - DNA, 36 bp, Artificial Sequence
  Synthetic oligonucleotide
aataacttcatgtgcgatccagaataagctattaca

SEQ ID NO: 8813 - DNA, 36 bp, Artificial Sequence
  Synthetic oligonucleotide
aatcgtagcttgtcgggtctaattgtcagcacacaa

SEQ ID NO: 8814 - DNA, 37 bp, Artificial Sequence
  Synthetic oligonucleotide
aatggatcacagatgggaaagtgattagggggatcga

SEQ ID NO: 8815 - DNA, 38 bp, Artificial Sequence
  Synthetic oligonucleotide
aatggtgccgtcacagggtggaatggtcatctccctga

SEQ ID NO: 8816 - DNA, 37 bp, Artificial Sequence
  Synthetic oligonucleotide
aattgcggatacttccagtccagacggttggttttga

SEQ ID NO: 8817 - DNA, 38 bp, Artificial Sequence
  Synthetic oligonucleotide
acaaccaccgctctatctttaaaggtgttccgttatga

SEQ ID NO: 8818 - DNA, 38 bp, Artificial Sequence
  Synthetic oligonucleotide
acaccttggtgctgcaatcacggaggggattaaagcga

SEQ ID NO: 8819 - DNA, 38 bp, Artificial Sequence
  Synthetic oligonucleotide
acactgctacctgggtctgccagggcgggaaatcgtga

SEQ ID NO: 8820 - DNA, 36 bp, Artificial Sequence
  Synthetic oligonucleotide
acaggtaacgggatgagccaggtgaggttcagttga

SEQ ID NO: 8821 - DNA, 35 bp, Artificial Sequence
  Synthetic oligonucleotide
acatactacgtaccggggttttgggaggcttaact

SEQ ID NO: 8822 - DNA, 36 bp, Artificial Sequence
  Synthetic oligonucleotide
accgactgtaggttgtagtattcggtgggggacata

SEQ ID NO: 8823 - DNA, 32 bp, Artificial Sequence
  Synthetic oligonucleotide
accgcgatcaaagtagggctagataataggga

SEQ ID NO: 8824 - DNA, 38 bp, Artificial Sequence
  Synthetic oligonucleotide
accgcgcgagggcaactgtactgaaaagcgacggttga

SEQ ID NO: 8825 - DNA, 37 bp, Artificial Sequence
  Synthetic oligonucleotide
accttgtgcacgacgtatcgggactcgaaaagctaga

SEQ ID NO: 8826 - DNA, 36 bp, Artificial Sequence
  Synthetic oligonucleotide
acgaactgtgctacagtttccgtttagctggtgcaa

SEQ ID NO: 8827 - DNA, 38 bp, Artificial Sequence
  Synthetic oligonucleotide
acgcgcatggggatggctactgcggacgccacgaatga

SEQ ID NO: 8828 - DNA, 36 bp, Artificial Sequence
  Synthetic oligonucleotide
acgggtcatggggtttctaaacatagtatggaggtt

SEQ ID NO: 8829 - DNA, 37 bp, Artificial Sequence
  Synthetic oligonucleotide
acgtaaggccttgcccgacgagaattcaggtgtagga

SEQ ID NO: 8830 - DNA, 36 bp, Artificial Sequence
  Synthetic oligonucleotide
acgtcgggctcggtctattcgcaacgactacgaata

SEQ ID NO: 8831 - DNA, 35 bp, Artificial Sequence
  Synthetic oligonucleotide
acgtgtgagggggtatcgcacgtcgttcttagccg

SEQ ID NO: 8832 - DNA, 36 bp, Artificial Sequence
  Synthetic oligonucleotide
actacaatcggatgtttgtctcaatcagtggattaa

SEQ ID NO: 8833 - DNA, 38 bp, Artificial Sequence
  Synthetic oligonucleotide
actagatgtagttagtctgctagggatatttattttga

SEQ ID NO: 8834 - DNA, 37 bp, Artificial Sequence
  Synthetic oligonucleotide
actagttaattagtacctatactgcatacctaagaga

SEQ ID NO: 8835 - DNA, 35 bp, Artificial Sequence
  Synthetic oligonucleotide
actcacctgcaggggtctgtgaaatattaaacgac

SEQ ID NO: 8836 - DNA, 36 bp, Artificial Sequence
  Synthetic oligonucleotide
actcagggtctgcactgtctcaaggtaaatatccga

SEQ ID NO: 8837 - DNA, 35 bp, Artificial Sequence
  Synthetic oligonucleotide
acttagtctgggccctggggttttgtactgatgtt

SEQ ID NO: 8838 - DNA, 36 bp, Artificial Sequence
  Synthetic oligonucleotide
agacctaacggacgagatcatgtttacactgctcca

SEQ ID NO: 8839 - DNA, 36 bp, Artificial Sequence
  Synthetic oligonucleotide
agaggcggtagcaacgataccgctaattgtgcgaca

SEQ ID NO: 8840 - DNA, 35 bp, Artificial Sequence
  Synthetic oligonucleotide
agatggattagtttagctaagcaccatccttacta

SEQ ID NO: 8841 - DNA, 35 bp, Artificial Sequence
  Synthetic oligonucleotide
agcatgcgggctatttgcgtagacctaaaacctcg

SEQ ID NO: 8842 - DNA, 36 bp, Artificial Sequence
  Synthetic oligonucleotide
agccacgcatacaatagtccggatcgtttgattaca

SEQ ID NO: 8843 - DNA, 37 bp, Artificial Sequence
  Synthetic oligonucleotide
agcgactgcgattggtagaacactgggctcgtgttga

SEQ ID NO: 8844 - DNA, 38 bp, Artificial Sequence
  Synthetic oligonucleotide
agctggtgtaacaattttagtaaccgtcgtgtagctga

SEQ ID NO: 8845 - DNA, 33 bp, Artificial Sequence
  Synthetic oligonucleotide
agggcctacgtggtggaaaattgtgtaatgata

SEQ ID NO: 8846 - DNA, 38 bp, Artificial Sequence
  Synthetic oligonucleotide
aggggggccataaggcactagattagaatcaagattga

SEQ ID NO: 8847 - DNA, 35 bp, Artificial Sequence
  Synthetic oligonucleotide
aggtacgcctgatcaaaacctgccgaggtggggga

SEQ ID NO: 8848 - DNA, 37 bp, Artificial Sequence
  Synthetic oligonucleotide
agtaacgaacgaacggttgtagtgtgcagtggggcga

SEQ ID NO: 8849 - DNA, 38 bp, Artificial Sequence
  Synthetic oligonucleotide
agtactgagttcgcagtatataaatggaattgttgtga

SEQ ID NO: 8850 - DNA, 38 bp, Artificial Sequence
  Synthetic oligonucleotide
agtcaatgcattatataaacaggctcagggatgactga

SEQ ID NO: 8851 - DNA, 36 bp, Artificial Sequence
  Synthetic oligonucleotide
agtctgcagggatcaagacgacgagtggatggccaa

SEQ ID NO: 8852 - DNA, 38 bp, Artificial Sequence
  Synthetic oligonucleotide
agtgatgcagctgactatggatactttgatgtaagtga

SEQ ID NO: 8853 - DNA, 37 bp, Artificial Sequence
  Synthetic oligonucleotide
agtgcagtaaccacgagtcagaatccacggccgttga

SEQ ID NO: 8854 - DNA, 35 bp, Artificial Sequence
  Synthetic oligonucleotide
agtgcggatgcacgtgagggtcccgtttgagtgac

SEQ ID NO: 8855 - DNA, 35 bp, Artificial Sequence
  Synthetic oligonucleotide
agtgggttactatgcattatacaacaggcaacatc

SEQ ID NO: 8856 - DNA, 35 bp, Artificial Sequence
  Synthetic oligonucleotide
agttcaggggcaccctctctgtctaaaactgagag

SEQ ID NO: 8857 - DNA, 37 bp, Artificial Sequence
  Synthetic oligonucleotide
ataacatcagtgcgagagggagggttaacccttgaga

SEQ ID NO: 8858 - DNA, 35 bp, Artificial Sequence
  Synthetic oligonucleotide
atacgatatggctgaaccgttggtttagacgcacg

SEQ ID NO: 8859 - DNA, 35 bp, Artificial Sequence
  Synthetic oligonucleotide
atatgctatgttggtgagagacatagttaaaatca

SEQ ID NO: 8860 - DNA, 37 bp, Artificial Sequence
  Synthetic oligonucleotide
atcaaattcctcgccgacgtcctagctgtgatgctga

SEQ ID NO: 8861 - DNA, 38 bp, Artificial Sequence
  Synthetic oligonucleotide
atcaaggaacagagcgacatcagtttttctgtgattga

SEQ ID NO: 8862 - DNA, 35 bp, Artificial Sequence
  Synthetic oligonucleotide
atcagtagctggtcatcataaaagtatgtgctagt

SEQ ID NO: 8863 - DNA, 35 bp, Artificial Sequence
  Synthetic oligonucleotide
atcccacctatttacgtctagtactctgggatgtc

SEQ ID NO: 8864 - DNA, 37 bp, Artificial Sequence
  Synthetic oligonucleotide
atccgtacaggataattctgatgttacgaggggacga

SEQ ID NO: 8865 - DNA, 35 bp, Artificial Sequence
  Synthetic oligonucleotide
atgactgggtgcaatctcatacttggttcttggaa

SEQ ID NO: 8866 - DNA, 36 bp, Artificial Sequence
  Synthetic oligonucleotide
atgctcggagacatgtatacattagctcagtgacca

SEQ ID NO: 8867 - DNA, 36 bp, Artificial Sequence
  Synthetic oligonucleotide
atggactattcggacctttgtcacgccaatatgaga

SEQ ID NO: 8868 - DNA, 35 bp, Artificial Sequence
  Synthetic oligonucleotide
atggatgggacgatgatcctttaggttaaataccg

SEQ ID NO: 8869 - DNA, 37 bp, Artificial Sequence
  Synthetic oligonucleotide
atggtaacgagtccgggtaaaagtgtcgacatgcgga

SEQ ID NO: 8870 - DNA, 38 bp, Artificial Sequence
  Synthetic oligonucleotide
atggtaccgcaatcgtgattgctgcatactggggatga

SEQ ID NO: 8871 - DNA, 37 bp, Artificial Sequence
  Synthetic oligonucleotide
atgtcaatccgccgaatatctcgaatcgcggggctga

SEQ ID NO: 8872 - DNA, 36 bp, Artificial Sequence
  Synthetic oligonucleotide
atgtttggggctgggtctagtactaaatgataggta

SEQ ID NO: 8873 - DNA, 35 bp, Artificial Sequence
  Synthetic oligonucleotide
attacgtgacgcgtcgttctcattggtatagctgg

SEQ ID NO: 8874 - DNA, 37 bp, Artificial Sequence
  Synthetic oligonucleotide
attagcgggcggggccgcaacatggcctgtgggaaga

SEQ ID NO: 8875 - DNA, 38 bp, Artificial Sequence
  Synthetic oligonucleotide
attccacacgggctgcgagctatgggcgtacctattga

SEQ ID NO: 8876 - DNA, 35 bp, Artificial Sequence
  Synthetic oligonucleotide
attccacgacctggccgcctttgagggggatacaa

SEQ ID NO: 8877 - DNA, 35 bp, Artificial Sequence
  Synthetic oligonucleotide
attgtaggctaagtcctgatgaatggcgcgtgcgc

SEQ ID NO: 8878 - DNA, 35 bp, Artificial Sequence
  Synthetic oligonucleotide
cacgacattagcgataatggattttcacgtacgga

SEQ ID NO: 8879 - DNA, 35 bp, Artificial Sequence
  Synthetic oligonucleotide
catactcaagggctctaccgattatcccctgtctg

SEQ ID NO: 8880 - DNA, 35 bp, Artificial Sequence
  Synthetic oligonucleotide
ccaaagtacgttaagcggaacggtgctggtaatgt

SEQ ID NO: 8881 - DNA, 36 bp, Artificial Sequence
  Synthetic oligonucleotide
ccacgttgttctgtgatgttcgatgtacttgctaga

SEQ ID NO: 8882 - DNA, 35 bp, Artificial Sequence
  Synthetic oligonucleotide
cctgacactgtgaaaataggtgttgggtcaggtat

SEQ ID NO: 8883 - DNA, 37 bp, Artificial Sequence
  Synthetic oligonucleotide
cctggatccaccagtggtatgctgctgacgtgctgga

SEQ ID NO: 8884 - DNA, 36 bp, Artificial Sequence
  Synthetic oligonucleotide
cctgtggtaattggactcactattgaaaagattcta

SEQ ID NO: 8885 - DNA, 36 bp, Artificial Sequence
  Synthetic oligonucleotide
ccttcgtcccgagttctctggtgggacagggactaa

SEQ ID NO: 8886 - DNA, 36 bp, Artificial Sequence
  Synthetic oligonucleotide
cgggcaaaaagaaagccgtgttgcaactcatggtta

SEQ ID NO: 8887 - DNA, 35 bp, Artificial Sequence
  Synthetic oligonucleotide
cgggtgtgatatctgtttctatcttccccccgtcc

SEQ ID NO: 8888 - DNA, 38 bp, Artificial Sequence
  Synthetic oligonucleotide
cgtacaagtagttatgcaaggccaatttgacggactga

SEQ ID NO: 8889 - DNA, 35 bp, Artificial Sequence
  Synthetic oligonucleotide
cgtcaccacgacgatcgccgttggcctgtggtaaa

SEQ ID NO: 8890 - DNA, 37 bp, Artificial Sequence
  Synthetic oligonucleotide
cgtccactaggttgaacgttctcagccatgtggtaga

SEQ ID NO: 8891 - DNA, 36 bp, Artificial Sequence
  Synthetic oligonucleotide
ctaggtgggctgtggtacaacaggtgcaccttacta

SEQ ID NO: 8892 - DNA, 35 bp, Artificial Sequence
  Synthetic oligonucleotide
ctccccccgaaacgctggcaaggtaggaatcatcc

SEQ ID NO: 8893 - DNA, 37 bp, Artificial Sequence
  Synthetic oligonucleotide
ctgtccacccaggagtgtcccatcgggctggtcgtga

SEQ ID NO: 8894 - DNA, 35 bp, Artificial Sequence
  Synthetic oligonucleotide
gaacacgagagccagattggtaagaaaactgggtt

SEQ ID NO: 8895 - DNA, 36 bp, Artificial Sequence
  Synthetic oligonucleotide
gaacgcagtcgggttgtttagggttggatcggtcaa

SEQ ID NO: 8896 - DNA, 36 bp, Artificial Sequence
  Synthetic oligonucleotide
gaactggggttgttccaggggtctacctgggggtaa

SEQ ID NO: 8897 - DNA, 37 bp, Artificial Sequence
  Synthetic oligonucleotide
gaactgtagacctgcaggtgccgcaatgaagcttaga

SEQ ID NO: 8898 - DNA, 37 bp, Artificial Sequence
  Synthetic oligonucleotide
gaaggaactctcacgattgacttgacgaacatgagga

SEQ ID NO: 8899 - DNA, 37 bp, Artificial Sequence
  Synthetic oligonucleotide
gaagggacaggacgatattgtccatttatagtaggga

SEQ ID NO: 8900 - DNA, 35 bp, Artificial Sequence
  Synthetic oligonucleotide
gaaggtgttcaagcactatataatgtacggcaact

SEQ ID NO: 8901 - DNA, 38 bp, Artificial Sequence
  Synthetic oligonucleotide
gaagtacatgttgccacttgacgtgctagagtttttga

SEQ ID NO: 8902 - DNA, 36 bp, Artificial Sequence
  Synthetic oligonucleotide
gaatcggatggatcgtgcgtaggggcccggatgtga

SEQ ID NO: 8903 - DNA, 38 bp, Artificial Sequence
  Synthetic oligonucleotide
gacaattcgcccgggggtgaagtaaattgcggtcatga

SEQ ID NO: 8904 - DNA, 35 bp, Artificial Sequence
  Synthetic oligonucleotide
gacacctagtgagcggacgccgtgagtaccccact

SEQ ID NO: 8905 - DNA, 38 bp, Artificial Sequence
  Synthetic oligonucleotide
gacacgtgggaaagacggcgtgtgtaaatgttctatga

SEQ ID NO: 8906 - DNA, 35 bp, Artificial Sequence
  Synthetic oligonucleotide
gaccactctacttggcttattgagtcctgcctggg

SEQ ID NO: 8907 - DNA, 36 bp, Artificial Sequence
  Synthetic oligonucleotide
gacgactgccaagaatgaatggtaggcaagatggta

SEQ ID NO: 8908 - DNA, 38 bp, Artificial Sequence
  Synthetic oligonucleotide
gacgcgacgcgacacgaggctatggccccttttactga

SEQ ID NO: 8909 - DNA, 36 bp, Artificial Sequence
  Synthetic oligonucleotide
gacggtagttgatagctgatgagctcacgaattaaa

SEQ ID NO: 8910 - DNA, 35 bp, Artificial Sequence
  Synthetic oligonucleotide
gactccaatctgcacgccgaaggggtattcatgta

SEQ ID NO: 8911 - DNA, 36 bp, Artificial Sequence
  Synthetic oligonucleotide
gactgtatcaagctgggatttcgcgtattgtgcgta

SEQ ID NO: 8912 - DNA, 37 bp, Artificial Sequence
  Synthetic oligonucleotide
gagactcaccgtataaaattgtccatagaaccacgga

SEQ ID NO: 8913 - DNA, 37 bp, Artificial Sequence
  Synthetic oligonucleotide
gagagtacagaaattacaaatgaagacggactccgga

SEQ ID NO: 8914 - DNA, 35 bp, Artificial Sequence
  Synthetic oligonucleotide
gagcatcagacccattttgcgcaactatgtcttac

SEQ ID NO: 8915 - DNA, 38 bp, Artificial Sequence
  Synthetic oligonucleotide
gaggtcccacaaagtctggcctgtatatctactggtga

SEQ ID NO: 8916 - DNA, 37 bp, Artificial Sequence
  Synthetic oligonucleotide
gagtcaacgatctgatccttatggggctcatcttaga

SEQ ID NO: 8917 - DNA, 37 bp, Artificial Sequence
  Synthetic oligonucleotide
gagtgacataaggcactgtgaggggttggtactcaga

SEQ ID NO: 8918 - DNA, 36 bp, Artificial Sequence
  Synthetic oligonucleotide
gatacggtgccccctaaacgttgcgtactgaggcca

SEQ ID NO: 8919 - DNA, 34 bp, Artificial Sequence
  Synthetic oligonucleotide
gatatatgcgttgtctatttaagacgactgtaaa

SEQ ID NO: 8920 - DNA, 37 bp, Artificial Sequence
  Synthetic oligonucleotide
gatccaagcccccacaattctgagttgtattggcgga

SEQ ID NO: 8921 - DNA, 38 bp, Artificial Sequence
  Synthetic oligonucleotide
gatcctgccgacatatccgatcggtgggagagcgctga

SEQ ID NO: 8922 - DNA, 36 bp, Artificial Sequence
  Synthetic oligonucleotide
gatgtcaggcttgcgggagaaggcacgatctaccga

SEQ ID NO: 8923 - DNA, 37 bp, Artificial Sequence
  Synthetic oligonucleotide
gattcacgtagccacagaagtggtcaccggggacgga

SEQ ID NO: 8924 - DNA, 35 bp, Artificial Sequence
  Synthetic oligonucleotide
gattgcgacctactggccgctctggggcgcaagac

SEQ ID NO: 8925 - DNA, 36 bp, Artificial Sequence
  Synthetic oligonucleotide
gatttgtaaataagggatcactaacatgggttggta

SEQ ID NO: 8926 - DNA, 35 bp, Artificial Sequence
  Synthetic oligonucleotide
gcaacgaggttcggttgtgggatcgttctgcggag

SEQ ID NO: 8927 - DNA, 37 bp, Artificial Sequence
  Synthetic oligonucleotide
gcaaggtcaggcaactcgaatgcctggggtgggatga

SEQ ID NO: 8928 - DNA, 36 bp, Artificial Sequence
  Synthetic oligonucleotide
gcaatcatacttgatcatacggcgagaaggttcaaa

SEQ ID NO: 8929 - DNA, 35 bp, Artificial Sequence
  Synthetic oligonucleotide
gcacaggtagaatctatcagtcttcgacactgcca

SEQ ID NO: 8930 - DNA, 37 bp, Artificial Sequence
  Synthetic oligonucleotide
gcatggctgctggttggtaatcctttaaaccgacaga

SEQ ID NO: 8931 - DNA, 38 bp, Artificial Sequence
  Synthetic oligonucleotide
gcatttgggatatcagttgtaaagtccccagtgactga

SEQ ID NO: 8932 - DNA, 35 bp, Artificial Sequence
  Synthetic oligonucleotide
gccacctattctatccaggtaattagactgcgggg

SEQ ID NO: 8933 - DNA, 37 bp, Artificial Sequence
  Synthetic oligonucleotide
gccatcatatggctagaggccccgccacttcatgcga

SEQ ID NO: 8934 - DNA, 37 bp, Artificial Sequence
  Synthetic oligonucleotide
gcccagccactgggtagtaaaggtgtttggttggaga

SEQ ID NO: 8935 - DNA, 27 bp, Artificial Sequence
  Synthetic oligonucleotide
gccccgataccggctcctttcggggac

SEQ ID NO: 8936 - DNA, 36 bp, Artificial Sequence
  Synthetic oligonucleotide
gccgctatcttgaaacggatcgcaaatggccagtca

SEQ ID NO: 8937 - DNA, 36 bp, Artificial Sequence
  Synthetic oligonucleotide
gccggactggagagcaccgttcgggtcttattcgga

SEQ ID NO: 8938 - DNA, 38 bp, Artificial Sequence
  Synthetic oligonucleotide
gccggttggggggaacagtgagatgtttgggctaatga

SEQ ID NO: 8939 - DNA, 38 bp, Artificial Sequence
  Synthetic oligonucleotide
gcctcttgctctcgaacagtgcctgaccagacacgtga

SEQ ID NO: 8940 - DNA, 35 bp, Artificial Sequence
  Synthetic oligonucleotide
gcgaattagaggcgttttatataggattgagtagt

SEQ ID NO: 8941 - DNA, 38 bp, Artificial Sequence
  Synthetic oligonucleotide
gcgacttgtcgccattatggggtcgcggtactgtgtga

SEQ ID NO: 8942 - DNA, 35 bp, Artificial Sequence
  Synthetic oligonucleotide
gcgtacgtgttctttgatggttcccggtgcagaac

SEQ ID NO: 8943 - DNA, 37 bp, Artificial Sequence
  Synthetic oligonucleotide
gctacgttacgctaggcgggatacaactatggcggga

SEQ ID NO: 8944 - DNA, 36 bp, Artificial Sequence
  Synthetic oligonucleotide
gctcgggggacggcacatgtagcttttaatcccaaa

SEQ ID NO: 8945 - DNA, 37 bp, Artificial Sequence
  Synthetic oligonucleotide
gctctattaggctccaaagcgctgaaggggattagga

SEQ ID NO: 8946 - DNA, 37 bp, Artificial Sequence
  Synthetic oligonucleotide
gctgagcgagatcttcgaggctttcgcacatccacga

SEQ ID NO: 8947 - DNA, 38 bp, Artificial Sequence
  Synthetic oligonucleotide
gctgtgccattctgctggttcaaacatcatgggagtga

SEQ ID NO: 8948 - DNA, 35 bp, Artificial Sequence
  Synthetic oligonucleotide
ggaaactatcaagaattaatacttttgcgcgctag

SEQ ID NO: 8949 - DNA, 35 bp, Artificial Sequence
  Synthetic oligonucleotide
ggaaagtactcggagtggacggccgatgctcggaa

SEQ ID NO: 8950 - DNA, 35 bp, Artificial Sequence
  Synthetic oligonucleotide
ggaacaggcccggggaaccgtaagtatgatggacg

SEQ ID NO: 8951 - DNA, 37 bp, Artificial Sequence
  Synthetic oligonucleotide
ggaacgactgcagatcctgatgttgagcattttgaga

SEQ ID NO: 8952 - DNA, 37 bp, Artificial Sequence
  Synthetic oligonucleotide
ggacactggagaccggaagtatgcaccacggagtgga

SEQ ID NO: 8953 - DNA, 38 bp, Artificial Sequence
  Synthetic oligonucleotide
ggacgagggcctattcattcgccattatcttgtcatga

SEQ ID NO: 8954 - DNA, 38 bp, Artificial Sequence
  Synthetic oligonucleotide
ggacttccgtcaggaagtagaggtttcctccggattga

SEQ ID NO: 8955 - DNA, 37 bp, Artificial Sequence
  Synthetic oligonucleotide
ggagcacagcaagtcacaatagttgaagtctcatgga

SEQ ID NO: 8956 - DNA, 35 bp, Artificial Sequence
  Synthetic oligonucleotide
ggatacgacttgcagcaactgtgatacttaaagcg

SEQ ID NO: 8957 - DNA, 35 bp, Artificial Sequence
  Synthetic oligonucleotide
ggatagtataacaacgggaggagatctaggtttag

SEQ ID NO: 8958 - DNA, 35 bp, Artificial Sequence
  Synthetic oligonucleotide
ggattacagagtcttgggctggtccatctgtagta

SEQ ID NO: 8959 - DNA, 38 bp, Artificial Sequence
  Synthetic oligonucleotide
ggcgcgtgcaaaacgttggctctttcacgtcgagttga

SEQ ID NO: 8960 - DNA, 38 bp, Artificial Sequence
  Synthetic oligonucleotide
gggagacctcccgatgtacgcctcacgcttaactttga

SEQ ID NO: 8961 - DNA, 35 bp, Artificial Sequence
  Synthetic oligonucleotide
gggggactgagcacgggccctggaaatcaaacata

SEQ ID NO: 8962 - DNA, 37 bp, Artificial Sequence
  Synthetic oligonucleotide
gggggcgaccggcttttaccgacgcatgagggtacga

SEQ ID NO: 8963 - DNA, 38 bp, Artificial Sequence
  Synthetic oligonucleotide
gggtaccgaaggtgcgagctggctcctcttgttcatga

SEQ ID NO: 8964 - DNA, 36 bp, Artificial Sequence
  Synthetic oligonucleotide
gggtgtcctccatggtgatgtggtgttcgtgcaata

SEQ ID NO: 8965 - DNA, 35 bp, Artificial Sequence
  Synthetic oligonucleotide
gggttatcggagtatcctgcatcatgcggtggaaa

SEQ ID NO: 8966 - DNA, 36 bp, Artificial Sequence
  Synthetic oligonucleotide
ggtaagccaaaggtggcgtagaggcttcccgactta

SEQ ID NO: 8967 - DNA, 38 bp, Artificial Sequence
  Synthetic oligonucleotide
ggtcactttggtttggactgcatcacatattgcaatga

SEQ ID NO: 8968 - DNA, 37 bp, Artificial Sequence
  Synthetic oligonucleotide
ggtctcattgacgtcaacgccaatgttaccttcgtga

SEQ ID NO: 8969 - DNA, 36 bp, Artificial Sequence
  Synthetic oligonucleotide
ggtgaatgccaaatccataaacagtccgggagggta

SEQ ID NO: 8970 - DNA, 38 bp, Artificial Sequence
  Synthetic oligonucleotide
ggtgtcggcgtactacgtctgcgaaatgggtatgatga

SEQ ID NO: 8971 - DNA, 35 bp, Artificial Sequence
  Synthetic oligonucleotide
ggttaggtaacactcggacgtgataatgtgagagg

SEQ ID NO: 8972 - DNA, 35 bp, Artificial Sequence
  Synthetic oligonucleotide
ggttccccacgagggtccgtggttgtaagcggtta

SEQ ID NO: 8973 - DNA, 35 bp, Artificial Sequence
  Synthetic oligonucleotide
ggttcgctgtcacagtgatacgtgggatgacgccc

SEQ ID NO: 8974 - DNA, 35 bp, Artificial Sequence
  Synthetic oligonucleotide
gtaaaggcatgtggcaatctcacgtgcacaattcg

SEQ ID NO: 8975 - DNA, 35 bp, Artificial Sequence
  Synthetic oligonucleotide
gtacaggcgtaatgacaaatccccaatgttaggag

SEQ ID NO: 8976 - DNA, 37 bp, Artificial Sequence
  Synthetic oligonucleotide
gtacgggcgtttattacaggaacgtactgagggttga

SEQ ID NO: 8977 - DNA, 35 bp, Artificial Sequence
  Synthetic oligonucleotide
gtatcagcttacagccggataaggggggaagccaa

SEQ ID NO: 8978 - DNA, 37 bp, Artificial Sequence
  Synthetic oligonucleotide
gtcaaaggacgtgaccatttgactgtggacgacagga

SEQ ID NO: 8979 - DNA, 35 bp, Artificial Sequence
  Synthetic oligonucleotide
gtcacaatcgggtgtgtaaataatctcttggactg

SEQ ID NO: 8980 - DNA, 37 bp, Artificial Sequence
  Synthetic oligonucleotide
gtcacggaccacagattgattcatgaggtcgccaaga

SEQ ID NO: 8981 - DNA, 38 bp, Artificial Sequence
  Synthetic oligonucleotide
gtcagtctcacgaagtcgcccccgagagttgatgctga

SEQ ID NO: 8982 - DNA, 37 bp, Artificial Sequence
  Synthetic oligonucleotide
gtcccctcatgacatcgttagcgcggataggccgaga

SEQ ID NO: 8983 - DNA, 35 bp, Artificial Sequence
  Synthetic oligonucleotide
gtccgaatccgttcgaaagtagatttagattctag

SEQ ID NO: 8984 - DNA, 38 bp, Artificial Sequence
  Synthetic oligonucleotide
gtcctcccacgttcgtagtcaagactgagtttaaatga

SEQ ID NO: 8985 - DNA, 35 bp, Artificial Sequence
  Synthetic oligonucleotide
gtcgccttactcatagggcacagacaacgcgctgc

SEQ ID NO: 8986 - DNA, 35 bp, Artificial Sequence
  Synthetic oligonucleotide
gtctagaggacctccttcctcctttaagtcaggtg

SEQ ID NO: 8987 - DNA, 36 bp, Artificial Sequence
  Synthetic oligonucleotide
gtgacaggggcgaatgaaattgctaagggcaaggga

SEQ ID NO: 8988 - DNA, 35 bp, Artificial Sequence
  Synthetic oligonucleotide
gtggcacaaacgacattaatgttgtgaaacacgtt

SEQ ID NO: 8989 - DNA, 35 bp, Artificial Sequence
  Synthetic oligonucleotide
gtgtttttcggttagcatatatagaactagtgtcg

SEQ ID NO: 8990 - DNA, 35 bp, Artificial Sequence
  Synthetic oligonucleotide
gttacaactctccatcccccgagtcggtcaaaatg

SEQ ID NO: 8991 - DNA, 37 bp, Artificial Sequence
  Synthetic oligonucleotide
gttacggagtagcgattaattctttgcaaggtttaga

SEQ ID NO: 8992 - DNA, 36 bp, Artificial Sequence
  Synthetic oligonucleotide
gttctcctaggtggatctcgatgttcctgcaggatg

SEQ ID NO: 8993 - DNA, 38 bp, Artificial Sequence
  Synthetic oligonucleotide
gttgacctaatgccgtatgtatcgcagtcgttgcttga

SEQ ID NO: 8994 - DNA, 38 bp, Artificial Sequence
  Synthetic oligonucleotide
gttgagttgactgttataagtgaaatcgtcagagatga

SEQ ID NO: 8995 - DNA, 35 bp, Artificial Sequence
  Synthetic oligonucleotide
gttgatcctaggatagtcatcatcaactcgtttta

SEQ ID NO: 8996 - DNA, 38 bp, Artificial Sequence
  Synthetic oligonucleotide
gttggtatctgtactgtggatgccatacggtaccatga

SEQ ID NO: 8997 - DNA, 35 bp, Artificial Sequence
  Synthetic oligonucleotide
gttgtgcgcggtgtcatggcccatgcgactccgtt

SEQ ID NO: 8998 - DNA, 35 bp, Artificial Sequence
  Synthetic oligonucleotide
gtttcccataaggggaaatatacgttcttgtctgg

SEQ ID NO: 8999 - DNA, 37 bp, Artificial Sequence
  Synthetic oligonucleotide
gtttgccaaccgttctgaatggtgatgaaggctatga

SEQ ID NO: 9000 - DNA, 37 bp, Artificial Sequence
  Synthetic oligonucleotide
taaagctcacggacatgtgtagggatgcgagagtaga

SEQ ID NO: 9001 - DNA, 38 bp, Artificial Sequence
  Synthetic oligonucleotide
taacaaaacagcaattctgagccagagtacgtagttga

SEQ ID NO: 9002 - DNA, 34 bp, Artificial Sequence
  Synthetic oligonucleotide
taacaacagctgtccactaacgaaaatacgtcgt

SEQ ID NO: 9003 - DNA, 35 bp, Artificial Sequence
  Synthetic oligonucleotide
taacatgcactggcctaatcagcctcctatagagg

SEQ ID NO: 9004 - DNA, 36 bp, Artificial Sequence
  Synthetic oligonucleotide
taaccgtgacggtttcttgagggtaacggctgggaa

SEQ ID NO: 9005 - DNA, 38 bp, Artificial Sequence
  Synthetic oligonucleotide
taacgctgttatgcggttaagctttagtgatcaactga

SEQ ID NO: 9006 - DNA, 37 bp, Artificial Sequence
  Synthetic oligonucleotide
taagacgggctgccgttgtgatcgagtcagggcttga

SEQ ID NO: 9007 - DNA, 37 bp, Artificial Sequence
  Synthetic oligonucleotide
taattggggaccggacggacccaatgctggttcctga

SEQ ID NO: 9008 - DNA, 38 bp, Artificial Sequence
  Synthetic oligonucleotide
tacacaactgccagagctgatggcgaccttgtgtatga

SEQ ID NO: 9009 - DNA, 35 bp, Artificial Sequence
  Synthetic oligonucleotide
tacccccctgctgtcaaagcgggatttaaccgccc

SEQ ID NO: 9010 - DNA, 36 bp, Artificial Sequence
  Synthetic oligonucleotide
tacccgcgatctctgtaagcaaagggtcgcgtttta

SEQ ID NO: 9011 - DNA, 36 bp, Artificial Sequence
  Synthetic oligonucleotide
tacgcgctaatgctgtctaggccggattcccaccaa

SEQ ID NO: 9012 - DNA, 37 bp, Artificial Sequence
  Synthetic oligonucleotide
tacggacatgactagttacctaattatcatccaccga

SEQ ID NO: 9013 - DNA, 36 bp, Artificial Sequence
  Synthetic oligonucleotide
tacgtgacttcggtgttttggtagtcgccagggtaa

SEQ ID NO: 9014 - DNA, 37 bp, Artificial Sequence
  Synthetic oligonucleotide
tactaatgggcaggatagtctggggctctacagacga

SEQ ID NO: 9015 - DNA, 35 bp, Artificial Sequence
  Synthetic oligonucleotide
taggaatctgaacaaaggacaaggcgagctctcgg

SEQ ID NO: 9016 - DNA, 36 bp, Artificial Sequence
  Synthetic oligonucleotide
taggcctacataaggtccgtcgcttctcggggttca

SEQ ID NO: 9017 - DNA, 37 bp, Artificial Sequence
  Synthetic oligonucleotide
tagtaagctcattaaaggtgtgtattttaaaaccaga

SEQ ID NO: 9018 - DNA, 36 bp, Artificial Sequence
  Synthetic oligonucleotide
tagtatgcgaacatagcaattgcaggccatgcctaa

SEQ ID NO: 9019 - DNA, 35 bp, Artificial Sequence
  Synthetic oligonucleotide
tagttactgacggctggaccctttaagatgcgata

SEQ ID NO: 9020 - DNA, 35 bp, Artificial Sequence
  Synthetic oligonucleotide
tataaccgatcttttccatcggttctgtggttaag

SEQ ID NO: 9021 - DNA, 34 bp, Artificial Sequence
  Synthetic oligonucleotide
tataatgcagatcaacttacaatgtgcaaggcga

SEQ ID NO: 9022 - DNA, 35 bp, Artificial Sequence
  Synthetic oligonucleotide
tatcaagggcaccagtttatgtgtttcaaccgaca

SEQ ID NO: 9023 - DNA, 35 bp, Artificial Sequence
  Synthetic oligonucleotide
tatctaactgcaattaccagcggtacttttagggg

SEQ ID NO: 9024 - DNA, 35 bp, Artificial Sequence
  Synthetic oligonucleotide
tatctacaggaaacacggctctcatcaggtcatcg

SEQ ID NO: 9025 - DNA, 36 bp, Artificial Sequence
  Synthetic oligonucleotide
tatgccgcaggtcattaaggtttgtttgcagtctaa

SEQ ID NO: 9026 - DNA, 35 bp, Artificial Sequence
  Synthetic oligonucleotide
tatttcgggtgtaggccgccctcaaatattatcca

SEQ ID NO: 9027 - DNA, 38 bp, Artificial Sequence
  Synthetic oligonucleotide
tcaacagtagtgtctttgtaaaatcggaacatcgctga

SEQ ID NO: 9028 - DNA, 37 bp, Artificial Sequence
  Synthetic oligonucleotide
tcacattcaaagtctgtgagtggatatcggacgggga

SEQ ID NO: 9029 - DNA, 36 bp, Artificial Sequence
  Synthetic oligonucleotide
tcacgaaggctgtactctctgacttttaaatcaaca

SEQ ID NO: 9030 - DNA, 36 bp, Artificial Sequence
  Synthetic oligonucleotide
tcagagaagacagggatacttagaacactgcgagta

SEQ ID NO: 9031 - DNA, 37 bp, Artificial Sequence
  Synthetic oligonucleotide
tcatggcacggccatgccgcacttgggtcatgggtga

SEQ ID NO: 9032 - DNA, 38 bp, Artificial Sequence
  Synthetic oligonucleotide
tccacgttagagcggagggtaatggccctagagggtga

SEQ ID NO: 9033 - DNA, 35 bp, Artificial Sequence
  Synthetic oligonucleotide
tccccataacccgtctcacatggggtggaaaggcg

SEQ ID NO: 9034 - DNA, 31 bp, Artificial Sequence
  Synthetic oligonucleotide
tcccctcagaccgtatcagtcagtgtttgca

SEQ ID NO: 9035 - DNA, 37 bp, Artificial Sequence
  Synthetic oligonucleotide
tccgcccttggatgaacagtccgcaaatgtctttgga

SEQ ID NO: 9036 - DNA, 36 bp, Artificial Sequence
  Synthetic oligonucleotide
tccgtaggctgcagatccaaagtgtcttaaggagta

SEQ ID NO: 9037 - DNA, 38 bp, Artificial Sequence
  Synthetic oligonucleotide
tcctcgaccacttttgggtgtgtacgtcggtcatctga

SEQ ID NO: 9038 - DNA, 36 bp, Artificial Sequence
  Synthetic oligonucleotide
tccttctcgcgttaactaggagggctcagataaacg

SEQ ID NO: 9039 - DNA, 35 bp, Artificial Sequence
  Synthetic oligonucleotide
tcgaagggctcggagctcgcgccaatcgggacgag

SEQ ID NO: 9040 - DNA, 36 bp, Artificial Sequence
  Synthetic oligonucleotide
tcgacaaggttcggtcgggcggaaggttgcgagtta

SEQ ID NO: 9041 - DNA, 35 bp, Artificial Sequence
  Synthetic oligonucleotide
tcgccttgaagcaggagtttccaccaagtcgcttt

SEQ ID NO: 9042 - DNA, 35 bp, Artificial Sequence
  Synthetic oligonucleotide
tcgcgcaatgcaagagcactcacgaatgctattga

SEQ ID NO: 9043 - DNA, 36 bp, Artificial Sequence
  Synthetic oligonucleotide
tcgtgtaggtgagggaactactgctaaatgtgcgta

SEQ ID NO: 9044 - DNA, 38 bp, Artificial Sequence
  Synthetic oligonucleotide
tcgtgtccgaaggtacctgtgtcaaactcatgacatga

SEQ ID NO: 9045 - DNA, 37 bp, Artificial Sequence
  Synthetic oligonucleotide
tctccaacgccgcattagaaagagaaccagctgttga

SEQ ID NO: 9046 - DNA, 35 bp, Artificial Sequence
  Synthetic oligonucleotide
tctctgacatcagtcctgggttgggtttctgggtc

SEQ ID NO: 9047 - DNA, 36 bp, Artificial Sequence
  Synthetic oligonucleotide
tctgacctcaaaggaatgccgtactgccaagttgaa

SEQ ID NO: 9048 - DNA, 38 bp, Artificial Sequence
  Synthetic oligonucleotide
tctgaggactctgtagcgcggtaagtttctgcaggtga

SEQ ID NO: 9049 - DNA, 38 bp, Artificial Sequence
  Synthetic oligonucleotide
tctgctcccccgcgcggactttccacgtcagatactga

SEQ ID NO: 9050 - DNA, 38 bp, Artificial Sequence
  Synthetic oligonucleotide
tctttatccggggggcccaaaccccgtcatcatcgtga

SEQ ID NO: 9051 - DNA, 36 bp, Artificial Sequence
  Synthetic oligonucleotide
tgaagcaaaatgactatgttcgatgtaagacagaaa

SEQ ID NO: 9052 - DNA, 37 bp, Artificial Sequence
  Synthetic oligonucleotide
tgaatgttggaagctggtcgcacctgttcttctacga

SEQ ID NO: 9053 - DNA, 36 bp, Artificial Sequence
  Synthetic oligonucleotide
tgaggttgagcaagcggggagccatgttacgactta

SEQ ID NO: 9054 - DNA, 35 bp, Artificial Sequence
  Synthetic oligonucleotide
tgcactgctcggtattgatgtgagaaacgagcaca

SEQ ID NO: 9055 - DNA, 38 bp, Artificial Sequence
  Synthetic oligonucleotide
tgcactgtcctgagggtgacggtgattagtgatgttga

SEQ ID NO: 9056 - DNA, 38 bp, Artificial Sequence
  Synthetic oligonucleotide
tgccagcaagtcaattcagttttgtccctcgtgactga

SEQ ID NO: 9057 - DNA, 37 bp, Artificial Sequence
  Synthetic oligonucleotide
tgcccggtacatactaacgggttttggtattgtctga

SEQ ID NO: 9058 - DNA, 38 bp, Artificial Sequence
  Synthetic oligonucleotide
tgcttaagctagtccggggttagctggacacttagtga

SEQ ID NO: 9059 - DNA, 35 bp, Artificial Sequence
  Synthetic oligonucleotide
tggaactgggttaccatgggtccaaatgcgaatgt

SEQ ID NO: 9060 - DNA, 38 bp, Artificial Sequence
  Synthetic oligonucleotide
tggactggaacgaaatgcccctatatatcttgggctga

SEQ ID NO: 9061 - DNA, 37 bp, Artificial Sequence
  Synthetic oligonucleotide
tgggtccggggtgttacgaggtttccagatgtgaaga

SEQ ID NO: 9062 - DNA, 35 bp, Artificial Sequence
  Synthetic oligonucleotide
tgggtcgaagggactctgcgtatccggttggcaac

SEQ ID NO: 9063 - DNA, 36 bp, Artificial Sequence
  Synthetic oligonucleotide
tgtacggcagaagatatgatccagaggatgagtcga

SEQ ID NO: 9064 - DNA, 37 bp, Artificial Sequence
  Synthetic oligonucleotide
tgtactgcaagataccgttaaatcattggtctcacga

SEQ ID NO: 9065 - DNA, 37 bp, Artificial Sequence
  Synthetic oligonucleotide
tgtactgcggccctgacgtggacaggattgtgaatga

SEQ ID NO: 9066 - DNA, 37 bp, Artificial Sequence
  Synthetic oligonucleotide
tgtcatggcacatgtgcatggatttccgacagtacga

SEQ ID NO: 9067 - DNA, 35 bp, Artificial Sequence
  Synthetic oligonucleotide
tgttgaaattcatttaaagggtatatctccaacga

SEQ ID NO: 9068 - DNA, 35 bp, Artificial Sequence
  Synthetic oligonucleotide
ttaaacaagactgcagttggcaatagatatgtgag

SEQ ID NO: 9069 - DNA, 35 bp, Artificial Sequence
  Synthetic oligonucleotide
ttaagcacctgcgcagccgacttagaagtcacgtg

SEQ ID NO: 9070 - DNA, 37 bp, Artificial Sequence
  Synthetic oligonucleotide
ttacatgaaagaaacgtatggtcaacggacctactga

SEQ ID NO: 9071 - DNA, 35 bp, Artificial Sequence
  Synthetic oligonucleotide
ttacccatggcggctattgccatgaggtggtaggc

SEQ ID NO: 9072 - DNA, 36 bp, Artificial Sequence
  Synthetic oligonucleotide
ttaccgctcagcggggtcctgggcatcctggtaata

SEQ ID NO: 9073 - DNA, 38 bp, Artificial Sequence
  Synthetic oligonucleotide
ttaccgtacgtaagctgatccgacttatcaatttgtga

SEQ ID NO: 9074 - DNA, 36 bp, Artificial Sequence
  Synthetic oligonucleotide
ttaccttaggcgtctgcagggcatgcacaaccgcac

SEQ ID NO: 9075 - DNA, 36 bp, Artificial Sequence
  Synthetic oligonucleotide
ttacgaacggtagcttcgatctaaggtaacagcata

SEQ ID NO: 9076 - DNA, 36 bp, Artificial Sequence
  Synthetic oligonucleotide
ttagtattacgtctggggtgcgtacaaaagggcgta

SEQ ID NO: 9077 - DNA, 37 bp, Artificial Sequence
  Synthetic oligonucleotide
ttagtcggagtagtaattaggtcagcatgggcccaga

SEQ ID NO: 9078 - DNA, 36 bp, Artificial Sequence
  Synthetic oligonucleotide
ttcaccgtgagggtggtaagttagtggaaggaagaa

SEQ ID NO: 9079 - DNA, 36 bp, Artificial Sequence
  Synthetic oligonucleotide
ttcacgacgaatgtaagctccgtggggctttggcga

SEQ ID NO: 9080 - DNA, 34 bp, Artificial Sequence
  Synthetic oligonucleotide
ttcatagatttagccacgtatgaagggtacgagg

SEQ ID NO: 9081 - DNA, 38 bp, Artificial Sequence
  Synthetic oligonucleotide
ttcatccgtaaacgtagtaattatgggtgagagggtga

SEQ ID NO: 9082 - DNA, 36 bp, Artificial Sequence
  Synthetic oligonucleotide
ttccgtaggggctgtcctactattgtactgtaacga

SEQ ID NO: 9083 - DNA, 35 bp, Artificial Sequence
  Synthetic oligonucleotide
ttcgaaaaattcgaacgactttaagtcaccccatg

SEQ ID NO: 9084 - DNA, 35 bp, Artificial Sequence
  Synthetic oligonucleotide
ttcgagaggctggcaagagggggtagtgcttattt

SEQ ID NO: 9085 - DNA, 38 bp, Artificial Sequence
  Synthetic oligonucleotide
ttcgtgaatggaaggaaccacgtagtgttgtacggtga

SEQ ID NO: 9086 - DNA, 35 bp, Artificial Sequence
  Synthetic oligonucleotide
ttgccggtaggcctcgcgggtaaccacgcccccaa

SEQ ID NO: 9087 - DNA, 37 bp, Artificial Sequence
  Synthetic oligonucleotide
ttgggtctggggctggttgtcttcgggtcaccctgga

SEQ ID NO: 9088 - DNA, 37 bp, Artificial Sequence
  Synthetic oligonucleotide
ttgtagcaatggctttgcaattgtcgaacatgagcga

SEQ ID NO: 9089 - DNA, 36 bp, Artificial Sequence
  Synthetic oligonucleotide
ttgtctgaacggaccttgtatctgtggtccagataa

SEQ ID NO: 9090 - DNA, 35 bp, Artificial Sequence
  Synthetic oligonucleotide
ttgttctgcaataatagggttaccgacttgataga

SEQ ID NO: 9091 - DNA, 36 bp, Artificial Sequence
  Synthetic oligonucleotide
ttgtttcatcaaacataagagtaaccgtgggtggga

SEQ ID NO: 9092 - DNA, 36 bp, Artificial Sequence
  Synthetic oligonucleotide
tttcagacgcaggagcttttcgcaggttgtagtaga

SEQ ID NO: 9093 - DNA, 35 bp, Artificial Sequence
  Synthetic oligonucleotide
tttccggaagttgttagttctacgtggtcagtcat

SEQ ID NO: 9094 - DNA, 36 bp, Artificial Sequence
  Synthetic oligonucleotide
tttgcgggcattgggaactgcatagaagtggcggta

SEQ ID NO: 9095 - DNA, 37 bp, Artificial Sequence
  Synthetic oligonucleotide
actcggtcgagcacgaaggtacgtatttttggaccga

SEQ ID NO: 9096 - DNA, 37 bp, Artificial Sequence
  Synthetic oligonucleotide
gcattcacagtctggtgtatattgaataacttgcata

SEQ ID NO: 9097 - DNA, 35 bp, Artificial Sequence
  Synthetic oligonucleotide
aacaattacttgtgcaccggcgtacagtccagcca

SEQ ID NO: 9098 - DNA, 36 bp, Artificial Sequence
  Synthetic oligonucleotide
ggtaccaagaacaaaggtgatggtggacgaaccgga

SEQ ID NO: 9099 - DNA, 36 bp, Artificial Sequence
  Synthetic oligonucleotide
aaggtactgggaggtatcgaccagtatcatgaagta

SEQ ID NO: 9100 - DNA, 37 bp, Artificial Sequence
  Synthetic oligonucleotide
cctatacagtccgacgggtcatggaaagggtttacga

SEQ ID NO: 9101 - DNA, 36 bp, Artificial Sequence
  Synthetic oligonucleotide
tagaccagcccgtttgatgaccgtggcggggacgta

SEQ ID NO: 9102 - DNA, 35 bp, Artificial Sequence
  Synthetic oligonucleotide
tgaggtctcggtgaacgtacctggttctcaacggg

SEQ ID NO: 9103 - DNA, 37 bp, Artificial Sequence
  Synthetic oligonucleotide
gcaattgaagatgaggccttggaatgcgtgtatccga

SEQ ID NO: 9104 - DNA, 37 bp, Artificial Sequence
  Synthetic oligonucleotide
gtagtgtccaccgtgtgataggcgctagggttgcgga

SEQ ID NO: 9105 - DNA, 38 bp, Artificial Sequence
  Synthetic oligonucleotide
acacattccgcgaggtataggattaccatgacagttga

SEQ ID NO: 9106 - DNA, 36 bp, Artificial Sequence
  Synthetic oligonucleotide
acgagtacggactacgtcgaggatgtgggttaggta

SEQ ID NO: 9107 - DNA, 36 bp, Artificial Sequence
  Synthetic oligonucleotide
gtctgcggaggcgcactgcatcaagtagatacgata

SEQ ID NO: 9108 - DNA, 38 bp, Artificial Sequence
  Synthetic oligonucleotide
gatggcgtaacatcaagccggtattgtaagggatctga

SEQ ID NO: 9109 - DNA, 37 bp, Artificial Sequence
  Synthetic oligonucleotide
ggatgcaatttaggcaatgcttatattgtgatagtga

SEQ ID NO: 9110 - DNA, 38 bp, Artificial Sequence
  Synthetic oligonucleotide
tctgtagctagaacgtgagcatgcgtacgaactagtga

SEQ ID NO: 9111 - DNA, 35 bp, Artificial Sequence
  Synthetic oligonucleotide
tgcccaccataacctggtgagagagctagtacctt

SEQ ID NO: 9112 - DNA, 37 bp, Artificial Sequence
  Synthetic oligonucleotide
aacatggcactgaagtgctggcagaatcttcgcggga

SEQ ID NO: 9113 - DNA, 38 bp, Artificial Sequence
  Synthetic oligonucleotide
ctatcgacagatcatcgactcgacgccaaatattgtga

SEQ ID NO: 9114 - DNA, 38 bp, Artificial Sequence
  Synthetic oligonucleotide
taggcttcttgcagaacaagaggctctagcgtgcttga

SEQ ID NO: 9115 - DNA, 37 bp, Artificial Sequence
  Synthetic oligonucleotide
tagggaaacctgcagacacctatcggtctttttggga

SEQ ID NO: 9116 - DNA, 36 bp, Artificial Sequence
  Synthetic oligonucleotide
tctatgctgtgcatccgtgcgttagggtagaacgta

SEQ ID NO: 9117 - DNA, 37 bp, Artificial Sequence
  Synthetic oligonucleotide
tggttgatatcgtttcgattattaaccaatcggacga

SEQ ID NO: 9118 - DNA, 37 bp, Artificial Sequence
  Synthetic oligonucleotide
ttgagcacagtggccaggatatcgcaagtaaaacaga

SEQ ID NO: 9119 - DNA, 36 bp, Artificial Sequence
  Synthetic oligonucleotide
gatcgcccgttaaacagggcgagcaaacgtacctta

SEQ ID NO: 9120 - DNA, 36 bp, Artificial Sequence
  Synthetic oligonucleotide
taccgtcacataaaggtaatggaggtacaccataga

SEQ ID NO: 9121 - DNA, 35 bp, Artificial Sequence
  Synthetic oligonucleotide
tcaccgatcctgttgccacttttgtcaccttcacc

SEQ ID NO: 9122 - DNA, 35 bp, Artificial Sequence
  Synthetic oligonucleotide
tcgaatgttgaaataacctagcagacgtgatattt

SEQ ID NO: 9123 - DNA, 35 bp, Artificial Sequence
  Synthetic oligonucleotide
tgtgaccagtcctaaggtatcaaaccttcttagcg

SEQ ID NO: 9124 - DNA, 35 bp, Artificial Sequence
  Synthetic oligonucleotide
agtccttacccaccgtgtacagatgacttgcgagt

SEQ ID NO: 9125 - DNA, 35 bp, Artificial Sequence
  Synthetic oligonucleotide
atgagggggaccagggccaacgcgaatccgtagaa

SEQ ID NO: 9126 - DNA, 38 bp, Artificial Sequence
  Synthetic oligonucleotide
gaagtacggtgcctatacggctgtagtaggtctggtga

SEQ ID NO: 9127 - DNA, 35 bp, Artificial Sequence
  Synthetic oligonucleotide
gagaaagcagtaagtagttattaagttactacccg

SEQ ID NO: 9128 - DNA, 33 bp, Artificial Sequence
  Synthetic oligonucleotide
gatatacagcaactaggtcgggttggaattgga

SEQ ID NO: 9129 - DNA, 37 bp, Artificial Sequence
  Synthetic oligonucleotide
gatgacagtaataaagtcgacatgtactccacagcga

SEQ ID NO: 9130 - DNA, 35 bp, Artificial Sequence
  Synthetic oligonucleotide
gcaggaattgagaattaggggcaccaagaggcttg

SEQ ID NO: 9131 - DNA, 37 bp, Artificial Sequence
  Synthetic oligonucleotide
gtcatagagtgctcagtgaatggaggacatgtaacga

SEQ ID NO: 9132 - DNA, 35 bp, Artificial Sequence
  Synthetic oligonucleotide
tcacgtttgagaatttcgggaacgctcaacaggcc

SEQ ID NO: 9133 - DNA, 37 bp, Artificial Sequence
  Synthetic oligonucleotide
tcttggagagttcgcgtttacgaagggcaaagacgga

SEQ ID NO: 9134 - DNA, 38 bp, Artificial Sequence
  Synthetic oligonucleotide
acgaggtaactggagtaggttgtcagctctttaattga

SEQ ID NO: 9135 - DNA, 35 bp, Artificial Sequence
  Synthetic oligonucleotide
gagtcagtcatggagtggggtaaagtacgcgattt

SEQ ID NO: 9136 - DNA, 36 bp, Artificial Sequence
  Synthetic oligonucleotide
gatacacgcttgctagcgcgttcggtgctacgacta

SEQ ID NO: 9137 - DNA, 35 bp, Artificial Sequence
  Synthetic oligonucleotide
gcaaacgggaatcgaatggccaagtcctgcgcttt

SEQ ID NO: 9138 - DNA, 35 bp, Artificial Sequence
  Synthetic oligonucleotide
gccactgagcgataaaaatagtggcgatcctgggg

SEQ ID NO: 9139 - DNA, 38 bp, Artificial Sequence
  Synthetic oligonucleotide
ggtgtccacgtgcgaacccaacctttagacttccgtga

SEQ ID NO: 9140 - DNA, 35 bp, Artificial Sequence
  Synthetic oligonucleotide
gtgggacccgtgaactcttcccatcggtgggcatg

SEQ ID NO: 9141 - DNA, 36 bp, Artificial Sequence
  Synthetic oligonucleotide
tcagagccactcgagctatagctgtctagtggagta

SEQ ID NO: 9142 - DNA, 38 bp, Artificial Sequence
  Synthetic oligonucleotide
tgctatcggctacgagttctgtttggaaattgggatga

SEQ ID NO: 9143 - DNA, 37 bp, Artificial Sequence
  Synthetic oligonucleotide
aagaccacttggtgagattacacagtaagcgtttgga

SEQ ID NO: 9144 - DNA, 37 bp, Artificial Sequence
  Synthetic oligonucleotide
aagcctgcatggatcgtttagttcgggaattaggtga

SEQ ID NO: 9145 - DNA, 35 bp, Artificial Sequence
  Synthetic oligonucleotide
acgaaaggttccgagaacgatgaatatggtcgtga

SEQ ID NO: 9146 - DNA, 36 bp, Artificial Sequence
  Synthetic oligonucleotide
atgagaatggcgtccggccacttggaatggggagaa

SEQ ID NO: 9147 - DNA, 35 bp, Artificial Sequence
  Synthetic oligonucleotide
cctacaccaagatgcgagtgttggcgtggacgctt

SEQ ID NO: 9148 - DNA, 35 bp, Artificial Sequence
  Synthetic oligonucleotide
gaaggagtgggtgtaacgtatatggcctgagggtt

SEQ ID NO: 9149 - DNA, 36 bp, Artificial Sequence
  Synthetic oligonucleotide
gcctcgcatatctattctggcctaatgtatgactga

SEQ ID NO: 9150 - DNA, 35 bp, Artificial Sequence
  Synthetic oligonucleotide
gctacagccaggacgggtgggggtaatactgaaat

SEQ ID NO: 9151 - DNA, 38 bp, Artificial Sequence
  Synthetic oligonucleotide
ggaccggtccggtcctctagttttagcctatgccatga

SEQ ID NO: 9152 - DNA, 37 bp, Artificial Sequence
  Synthetic oligonucleotide
gtcccgtagtgacacaatatgtagccacccatgaaga

SEQ ID NO: 9153 - DNA, 37 bp, Artificial Sequence
  Synthetic oligonucleotide
gtcttatgggggttcagtgaacgtgagggcacctcga

SEQ ID NO: 9154 - DNA, 37 bp, Artificial Sequence
  Synthetic oligonucleotide
gtgcattcatcgatttataactcaacccggtgtagga

SEQ ID NO: 9155 - DNA, 36 bp, Artificial Sequence
  Synthetic oligonucleotide
gttttacgtccgcaatggaatgtacttccgattgga

SEQ ID NO: 9156 - DNA, 38 bp, Artificial Sequence
  Synthetic oligonucleotide
tcgagcggactgacggacctcaagaacttgtaaagtga

SEQ ID NO: 9157 - DNA, 36 bp, Artificial Sequence
  Synthetic oligonucleotide
ttatgtacgcagcaacccgaccggttgcttattcaa

SEQ ID NO: 9158 - DNA, 36 bp, Artificial Sequence
  Synthetic oligonucleotide
ttgcgaacaaactggtggtcgagttgcttccattca

SEQ ID NO: 9159 - DNA, 35 bp, Artificial Sequence
  Synthetic oligonucleotide
aaggttctgctgatgttgtataacgagttgtgtgt

SEQ ID NO: 9160 - DNA, 35 bp, Artificial Sequence
  Synthetic oligonucleotide
acgcatgaggaaagggcgtactcacagttagattt

SEQ ID NO: 9161 - DNA, 35 bp, Artificial Sequence
  Synthetic oligonucleotide
agactgtggctatgactctaatgtaaatgcccgaa

SEQ ID NO: 9162 - DNA, 37 bp, Artificial Sequence
  Synthetic oligonucleotide
agcctcagcgccatggacgtcgattgtccagttgtga

SEQ ID NO: 9163 - DNA, 35 bp, Artificial Sequence
  Synthetic oligonucleotide
attggtatgtgaagctttccgagtcattaggatac

SEQ ID NO: 9164 - DNA, 36 bp, Artificial Sequence
  Synthetic oligonucleotide
atttaggtcactgcagatagaatatatggataaaaa

SEQ ID NO: 9165 - DNA, 36 bp, Artificial Sequence
  Synthetic oligonucleotide
ctaaggtaagggaatgattaaccatatcattaggga

SEQ ID NO: 9166 - DNA, 38 bp, Artificial Sequence
  Synthetic oligonucleotide
gcaaaacgtttctcaacgaggtgatttgtagaagatga

SEQ ID NO: 9167 - DNA, 36 bp, Artificial Sequence
  Synthetic oligonucleotide
gcaatcaaaagctgttattcttatcgagtgtatgga

SEQ ID NO: 9168 - DNA, 38 bp, Artificial Sequence
  Synthetic oligonucleotide
gcatacaatgtgggaatcaggacttttaaatttcctga

SEQ ID NO: 9169 - DNA, 38 bp, Artificial Sequence
  Synthetic oligonucleotide
ggtacttttgagggcgagtaggtttgcgagctcattga

SEQ ID NO: 9170 - DNA, 37 bp, Artificial Sequence
  Synthetic oligonucleotide
gtctgtctggacattctgaagtgatgagtcaccttga

SEQ ID NO: 9171 - DNA, 33 bp, Artificial Sequence
  Synthetic oligonucleotide
gtgtcagtgggaagaatcacagcttactctttg

SEQ ID NO: 9172 - DNA, 35 bp, Artificial Sequence
  Synthetic oligonucleotide
gttctagctgacaagtcatggggattggtatcatc

SEQ ID NO: 9173 - DNA, 36 bp, Artificial Sequence
  Synthetic oligonucleotide
gtttgctacggcgaagctcagtgttgcaaatttgaa

SEQ ID NO: 9174 - DNA, 36 bp, Artificial Sequence
  Synthetic oligonucleotide
tcaaggggaacggactgtatcgcgacttgcgcacta

SEQ ID NO: 9175 - DNA, 36 bp, Artificial Sequence
  Synthetic oligonucleotide
tgacaatgttgctcggggtgtaagttatgataccga

SEQ ID NO: 9176 - DNA, 38 bp, Artificial Sequence
  Synthetic oligonucleotide
tgctaggggccggattacgttcattaaccaatttatga

SEQ ID NO: 9177 - DNA, 38 bp, Artificial Sequence
  Synthetic oligonucleotide
ttagaggcacataaggaccttacacatgaaattagtga

SEQ ID NO: 9178 - DNA, 36 bp, Artificial Sequence
  Synthetic oligonucleotide
ttggtaaaactgccttgacagcactggagtttagca

SEQ ID NO: 9179 - DNA, 37 bp, Artificial Sequence
  Synthetic oligonucleotide
aacacgtaattaggcgtgcgctttctctgcgatttga

SEQ ID NO: 9180 - DNA, 37 bp, Artificial Sequence
  Synthetic oligonucleotide
acggtccgagtgttgcgagaaattatgttggtccgga

SEQ ID NO: 9181 - DNA, 35 bp, Artificial Sequence
  Synthetic oligonucleotide
acgtcaaggtaatgtatttaggcatgttaggcccc

SEQ ID NO: 9182 - DNA, 35 bp, Artificial Sequence
  Synthetic oligonucleotide
acgttctgaacttttcgtccggtaatgaaggcctg

SEQ ID NO: 9183 - DNA, 35 bp, Artificial Sequence
  Synthetic oligonucleotide
agctacttagtacattacggaacgctccgtggtca

SEQ ID NO: 9184 - DNA, 37 bp, Artificial Sequence
  Synthetic oligonucleotide
aggaatgcaaagttcttgcacttgacagtcgtttgga

SEQ ID NO: 9185 - DNA, 37 bp, Artificial Sequence
  Synthetic oligonucleotide
agggaacgtccagctctcgcaaattgcccccccgtga

SEQ ID NO: 9186 - DNA, 38 bp, Artificial Sequence
  Synthetic oligonucleotide
agttagcattctggatcgataccaggggcagttattga

SEQ ID NO: 9187 - DNA, 35 bp, Artificial Sequence
  Synthetic oligonucleotide
atagggaggcaatcgcgataggtagaaggttgtta

SEQ ID NO: 9188 - DNA, 37 bp, Artificial Sequence
  Synthetic oligonucleotide
gggaggacgatgggagctgccaagtgcgatccaggga

SEQ ID NO: 9189 - DNA, 37 bp, Artificial Sequence
  Synthetic oligonucleotide
gggtcatagtaacgagaacaaaggaagggtaagggga

SEQ ID NO: 9190 - DNA, 35 bp, Artificial Sequence
  Synthetic oligonucleotide
ggtagtgtgacgtacgcatggtatggaaaaatagt

SEQ ID NO: 9191 - DNA, 36 bp, Artificial Sequence
  Synthetic oligonucleotide
gttacacggtagctgcacaggccaggttagcgatta

SEQ ID NO: 9192 - DNA, 38 bp, Artificial Sequence
  Synthetic oligonucleotide
tatgtggacgtcctgtttagttctactgcaggtcttga

SEQ ID NO: 9193 - DNA, 38 bp, Artificial Sequence
  Synthetic oligonucleotide
tctagagcgagaagaaatggtcccgcatcttacgctga

SEQ ID NO: 9194 - DNA, 37 bp, Artificial Sequence
  Synthetic oligonucleotide
tgacttcatcgagtaattgataattcaatgattttga

SEQ ID NO: 9195 - DNA, 36 bp, Artificial Sequence
  Synthetic oligonucleotide
tgttacaagcataggacagcttgcgcagtcgttgta

SEQ ID NO: 9196 - DNA, 35 bp, Artificial Sequence
  Synthetic oligonucleotide
ttgatcgtcaatcatggtcgtttagtgaagagggc

SEQ ID NO: 9197 - DNA, 35 bp, Artificial Sequence
  Synthetic oligonucleotide
tttgagtaagaaatatctgttcggtacaagttttt

SEQ ID NO: 9198 - DNA, 36 bp, Artificial Sequence
  Synthetic oligonucleotide
gcagttgatctattgactgatcgacggtgaccttta

SEQ ID NO: 9199 - DNA, 37 bp, Artificial Sequence
  Synthetic oligonucleotide
aaccattagaccgaaacgggtacgtagcactttgcga

SEQ ID NO: 9200 - DNA, 38 bp, Artificial Sequence
  Synthetic oligonucleotide
acccccctgtccggaaacttagagctgtggatcgttga

SEQ ID NO: 9201 - DNA, 36 bp, Artificial Sequence
  Synthetic oligonucleotide
accggggggacattggctccttcgcgtaaatgctca

SEQ ID NO: 9202 - DNA, 38 bp, Artificial Sequence
  Synthetic oligonucleotide
agagcaaggtctagtgtacagattccttttggcgatga

SEQ ID NO: 9203 - DNA, 35 bp, Artificial Sequence
  Synthetic oligonucleotide
agcgtgaagttgtcgtgacaaattagtattgatgt

SEQ ID NO: 9204 - DNA, 35 bp, Artificial Sequence
  Synthetic oligonucleotide
agtacaccacgcgctactgacttcgtggcttggtg

SEQ ID NO: 9205 - DNA, 36 bp, Artificial Sequence
  Synthetic oligonucleotide
atggggcccgccttaacaagccgattaaagtcgata

SEQ ID NO: 9206 - DNA, 35 bp, Artificial Sequence
  Synthetic oligonucleotide
cccctgaggtacagagaccctttgctcatggtact

SEQ ID NO: 9207 - DNA, 38 bp, Artificial Sequence
  Synthetic oligonucleotide
ctagtctactgaagtatgtcgcataactcgtcaaatga

SEQ ID NO: 9208 - DNA, 35 bp, Artificial Sequence
  Synthetic oligonucleotide
gaaaaatctaagtctgcttcggtcattattagttc

SEQ ID NO: 9209 - DNA, 35 bp, Artificial Sequence
  Synthetic oligonucleotide
gaacagagttcaaggggtgaactggaaagatatga

SEQ ID NO: 9210 - DNA, 37 bp, Artificial Sequence
  Synthetic oligonucleotide
gaacgagatatactacagtgtcctctgaagtagagga

SEQ ID NO: 9211 - DNA, 38 bp, Artificial Sequence
  Synthetic oligonucleotide
gagcgcacatggagttggcgtatgtacctaagttttga

SEQ ID NO: 9212 - DNA, 35 bp, Artificial Sequence
  Synthetic oligonucleotide
gatgtacatgtgatgggagtgcgacactcacggac

SEQ ID NO: 9213 - DNA, 37 bp, Artificial Sequence
  Synthetic oligonucleotide
gccttcatgaaagaatgaaatagcgcctgataatgga

SEQ ID NO: 9214 - DNA, 37 bp, Artificial Sequence
  Synthetic oligonucleotide
gggggcatttcgccacataacggtttcttgagacaga

SEQ ID NO: 9215 - DNA, 38 bp, Artificial Sequence
  Synthetic oligonucleotide
gggtgcacgttgcactgcttttgagtaagtacttatga

SEQ ID NO: 9216 - DNA, 36 bp, Artificial Sequence
  Synthetic oligonucleotide
ggtacgcctattcgggttgttggactcgaggacgta

SEQ ID NO: 9217 - DNA, 37 bp, Artificial Sequence
  Synthetic oligonucleotide
gtgacaagggggagacgccaacaggatatggagttga

SEQ ID NO: 9218 - DNA, 35 bp, Artificial Sequence
  Synthetic oligonucleotide
gtgcccatcgacgtcttgggtgctacatcattgtt

SEQ ID NO: 9219 - DNA, 36 bp, Artificial Sequence
  Synthetic oligonucleotide
taggttgatgctcgagttgcagatgttgacaaggga

SEQ ID NO: 9220 - DNA, 37 bp, Artificial Sequence
  Synthetic oligonucleotide
tagtcggtaagggttaatgtttggtttgtcaagcgga

SEQ ID NO: 9221 - DNA, 35 bp, Artificial Sequence
  Synthetic oligonucleotide
tataagtgcccccccgtcgtcgaatagcctaaaag

SEQ ID NO: 9222 - DNA, 38 bp, Artificial Sequence
  Synthetic oligonucleotide
tcaagctacctgcgacgcggcccaccagtccgcactga

SEQ ID NO: 9223 - DNA, 35 bp, Artificial Sequence
  Synthetic oligonucleotide
tcacgccctgcggagtgactcgttaagtggagggg

SEQ ID NO: 9224 - DNA, 35 bp, Artificial Sequence
  Synthetic oligonucleotide
tcagcatatgactgactgtccttcgtgtgaacgtc

SEQ ID NO: 9225 - DNA, 38 bp, Artificial Sequence
  Synthetic oligonucleotide
tcagctcattccacccgattggcttagacgtgggctga

SEQ ID NO: 9226 - DNA, 35 bp, Artificial Sequence
  Synthetic oligonucleotide
tcattggcgaatatcggggtgtcttgcagtaatgt

SEQ ID NO: 9227 - DNA, 36 bp, Artificial Sequence
  Synthetic oligonucleotide
tccgttttaatggggaacgccgaaggacggacggta

SEQ ID NO: 9228 - DNA, 38 bp, Artificial Sequence
  Synthetic oligonucleotide
tcttacacggatactggaagagttgtaaatgggcatga

SEQ ID NO: 9229 - DNA, 37 bp, Artificial Sequence
  Synthetic oligonucleotide
tgcctaccgccatcagtcccaactgcctagcgtttga

SEQ ID NO: 9230 - DNA, 35 bp, Artificial Sequence
  Synthetic oligonucleotide
tgcgagcgacgcaccgtgcttgtatacgggcctga

SEQ ID NO: 9231 - DNA, 38 bp, Artificial Sequence
  Synthetic oligonucleotide
tgctgcaaggacctgagccacatcgtcataaggagtga

SEQ ID NO: 9232 - DNA, 37 bp, Artificial Sequence
  Synthetic oligonucleotide
ggtcccgtccacagtactgaaaggagagagttctgga

SEQ ID NO: 9233 - DNA, 36 bp, Artificial Sequence
  Synthetic oligonucleotide
tactcgcgaagaacaggggtccaagaatgactcaga

SEQ ID NO: 9234 - DNA, 35 bp, Artificial Sequence
  Synthetic oligonucleotide
tcaccacaggctttgaccgcgagttgtaaactatg

SEQ ID NO: 9235 - DNA, 35 bp, Artificial Sequence
  Synthetic oligonucleotide
aagacgacatgacaccgattttcatgaacgccggg

SEQ ID NO: 9236 - DNA, 36 bp, Artificial Sequence
  Synthetic oligonucleotide
aagtacagcctagatgatactgtaccggtggactaa

SEQ ID NO: 9237 - DNA, 37 bp, Artificial Sequence
  Synthetic oligonucleotide
acacccgagaactgagggtcaactttgggcttattga

SEQ ID NO: 9238 - DNA, 35 bp, Artificial Sequence
  Synthetic oligonucleotide
acacgtaaatgtgaccaagcgagggtagtcgggtt

SEQ ID NO: 9239 - DNA, 38 bp, Artificial Sequence
  Synthetic oligonucleotide
acactaggtctcgagttcagtccaatgataggttctga

SEQ ID NO: 9240 - DNA, 37 bp, Artificial Sequence
  Synthetic oligonucleotide
acatacgtactgattgaggactgggcattcctcggga

SEQ ID NO: 9241 - DNA, 35 bp, Artificial Sequence
  Synthetic oligonucleotide
accggtgcggattctacgcacaggtccatcacgcg

SEQ ID NO: 9242 - DNA, 36 bp, Artificial Sequence
  Synthetic oligonucleotide
agaaagtctgtcaagatcgttgggttacacgtgaga

SEQ ID NO: 9243 - DNA, 35 bp, Artificial Sequence
  Synthetic oligonucleotide
agcgtaaaaacgcgtaccatgtggaatgtgggggg

SEQ ID NO: 9244 - DNA, 36 bp, Artificial Sequence
  Synthetic oligonucleotide
agctgtagtgacgatgtgcgagtacgcctttactaa

SEQ ID NO: 9245 - DNA, 35 bp, Artificial Sequence
  Synthetic oligonucleotide
aggtatgtctgacgcatcaaaggcactccgtgggt

SEQ ID NO: 9246 - DNA, 35 bp, Artificial Sequence
  Synthetic oligonucleotide
agtcaatggttcagcatcaagtgtatgtcacaacg

SEQ ID NO: 9247 - DNA, 35 bp, Artificial Sequence
  Synthetic oligonucleotide
atacactgagtccgggaacattggctactttgata

SEQ ID NO: 9248 - DNA, 38 bp, Artificial Sequence
  Synthetic oligonucleotide
atatatggaggtcaaacaagatattagcaaccagttga

SEQ ID NO: 9249 - DNA, 36 bp, Artificial Sequence
  Synthetic oligonucleotide
atgaactgtttaacgcgctttcacgtgcatactaga

SEQ ID NO: 9250 - DNA, 36 bp, Artificial Sequence
  Synthetic oligonucleotide
atggtgccatcttgattagaccacgtatctttggaa

SEQ ID NO: 9251 - DNA, 37 bp, Artificial Sequence
  Synthetic oligonucleotide
cgaaatgtttctgcgtactacaggcatataggacaga

SEQ ID NO: 9252 - DNA, 38 bp, Artificial Sequence
  Synthetic oligonucleotide
cgatacgacggttgcaggcactacgtgattgtagatga

SEQ ID NO: 9253 - DNA, 36 bp, Artificial Sequence
  Synthetic oligonucleotide
gaatccaagcagaaggaagctgtttgtgttagggca

SEQ ID NO: 9254 - DNA, 38 bp, Artificial Sequence
  Synthetic oligonucleotide
gacagaatggttcgggttcggtgcaactaataaagtga

SEQ ID NO: 9255 - DNA, 38 bp, Artificial Sequence
  Synthetic oligonucleotide
gagtacgggtgtttggccgtgactgcctttggcggtga

SEQ ID NO: 9256 - DNA, 37 bp, Artificial Sequence
  Synthetic oligonucleotide
gcaactcatggtttaaagtactcgatgtgtgtgacga

SEQ ID NO: 9257 - DNA, 36 bp, Artificial Sequence
  Synthetic oligonucleotide
gcaatacctgcattagaatttgtgacaaccttgcga

SEQ ID NO: 9258 - DNA, 36 bp, Artificial Sequence
  Synthetic oligonucleotide
gccaggttcgcctctgtaagtgtctcaccccggtta

SEQ ID NO: 9259 - DNA, 37 bp, Artificial Sequence
  Synthetic oligonucleotide
gcgcgctgtggtaacaggtggggtatctctctgtaga

SEQ ID NO: 9260 - DNA, 38 bp, Artificial Sequence
  Synthetic oligonucleotide
gctgaatacagtgtaggagctcctctagtttccgatga

SEQ ID NO: 9261 - DNA, 38 bp, Artificial Sequence
  Synthetic oligonucleotide
ggactgcggccacatgtcaaactgcctcgtgcaattga

SEQ ID NO: 9262 - DNA, 37 bp, Artificial Sequence
  Synthetic oligonucleotide
ggagactggatcaccttaaggtggagatacccgctga

SEQ ID NO: 9263 - DNA, 37 bp, Artificial Sequence
  Synthetic oligonucleotide
ggagtatgcgaagacgggtatagtgggcgatgcccga

SEQ ID NO: 9264 - DNA, 36 bp, Artificial Sequence
  Synthetic oligonucleotide
gggagttccatgggttggatacaatgacttgagtga

SEQ ID NO: 9265 - DNA, 35 bp, Artificial Sequence
  Synthetic oligonucleotide
gtatcattgtatgtctcacggcttcgtaactggag

SEQ ID NO: 9266 - DNA, 38 bp, Artificial Sequence
  Synthetic oligonucleotide
gtcgtacaatcggctttacgatatggactacgagttga

SEQ ID NO: 9267 - DNA, 35 bp, Artificial Sequence
  Synthetic oligonucleotide
gtctagaagctaccaaccggctccgccaacacttg

SEQ ID NO: 9268 - DNA, 36 bp, Artificial Sequence
  Synthetic oligonucleotide
gtgagaggataaccgtgttctgaggtcctatttgta

SEQ ID NO: 9269 - DNA, 35 bp, Artificial Sequence
  Synthetic oligonucleotide
gtgcgctcaagcagggatgttattcagggcgatgg

SEQ ID NO: 9270 - DNA, 35 bp, Artificial Sequence
  Synthetic oligonucleotide
gtggttaatgggggggccgtgggacatgcacttta

SEQ ID NO: 9271 - DNA, 36 bp, Artificial Sequence
  Synthetic oligonucleotide
gttccggggtactacatgtgcgagaacgcctgccga

SEQ ID NO: 9272 - DNA, 37 bp, Artificial Sequence
  Synthetic oligonucleotide
gttccgttttcgtggatgccgctgggtcgtgcactga

SEQ ID NO: 9273 - DNA, 38 bp, Artificial Sequence
  Synthetic oligonucleotide
gttcggagcaagagtactgagtgtaacgggcgacgaga

SEQ ID NO: 9274 - DNA, 37 bp, Artificial Sequence
  Synthetic oligonucleotide
gttggaccatcagagagccggaaggtttctgctatga

SEQ ID NO: 9275 - DNA, 34 bp, Artificial Sequence
  Synthetic oligonucleotide
taactgtagaacatcccacccttcatggggggtg

SEQ ID NO: 9276 - DNA, 36 bp, Artificial Sequence
  Synthetic oligonucleotide
tagtaagagacgtttggatttcattgacgtaattaa

SEQ ID NO: 9277 - DNA, 36 bp, Artificial Sequence
  Synthetic oligonucleotide
tagtagagcccaggtttagggatcgggtctgcagga

SEQ ID NO: 9278 - DNA, 38 bp, Artificial Sequence
  Synthetic oligonucleotide
tagtccgagtaacatcaccgagacgggcgaaggtatga

SEQ ID NO: 9279 - DNA, 36 bp, Artificial Sequence
  Synthetic oligonucleotide
tagtcgcacgagctgtgcaccagtcgtttggattaa

SEQ ID NO: 9280 - DNA, 35 bp, Artificial Sequence
  Synthetic oligonucleotide
tcatatgctcccacatgcggccttagcatccagta

SEQ ID NO: 9281 - DNA, 38 bp, Artificial Sequence
  Synthetic oligonucleotide
tcgcgggggtgctcattggaggtagctgataatactga

SEQ ID NO: 9282 - DNA, 36 bp, Artificial Sequence
  Synthetic oligonucleotide
tggtcccgtacagaaggatatctaaacggtaggtta

SEQ ID NO: 9283 - DNA, 35 bp, Artificial Sequence
  Synthetic oligonucleotide
tgtcctgcagcaacgtcaaagggttataggcaata

SEQ ID NO: 9284 - DNA, 38 bp, Artificial Sequence
  Synthetic oligonucleotide
tgtgtcgcgtaaacttttcatgacagatgttgcgttga

SEQ ID NO: 9285 - DNA, 36 bp, Artificial Sequence
  Synthetic oligonucleotide
ttactgcacaggaatgaaagccttttctccctacta

SEQ ID NO: 9286 - DNA, 35 bp, Artificial Sequence
  Synthetic oligonucleotide
ttccggccttccggtacgaggcgtactgtgtgcga

SEQ ID NO: 9287 - DNA, 35 bp, Artificial Sequence
  Synthetic oligonucleotide
ttttcgcagtaccccgcagttgagtgagtgtgagt

SEQ ID NO: 9288 - DNA, 36 bp, Artificial Sequence
  Synthetic oligonucleotide
agaaggtgcagtcattgtgtgtgtgtgagcgttcaa

SEQ ID NO: 9289 - DNA, 35 bp, Artificial Sequence
  Synthetic oligonucleotide
aacctgtttttctaccaggttccattcttcagcat

SEQ ID NO: 9290 - DNA, 36 bp, Artificial Sequence
  Synthetic oligonucleotide
aacgtcaactggcttcgagccactggccgataccga

SEQ ID NO: 9291 - DNA, 36 bp, Artificial Sequence
  Synthetic oligonucleotide
aagctcaagcgttagccacgttaacgcgcttaggga

SEQ ID NO: 9292 - DNA, 38 bp, Artificial Sequence
  Synthetic oligonucleotide
aagggtggtagatcaattttggtataactcaccgctga

SEQ ID NO: 9293 - DNA, 37 bp, Artificial Sequence
  Synthetic oligonucleotide
accccatcgagagtctcaagcaaacgtgtatctctga

SEQ ID NO: 9294 - DNA, 37 bp, Artificial Sequence
  Synthetic oligonucleotide
acgccgatacatgaagaccaaacatggactcattgga

SEQ ID NO: 9295 - DNA, 36 bp, Artificial Sequence
  Synthetic oligonucleotide
actgggatcattaaaaattagttaagaactgctaca

SEQ ID NO: 9296 - DNA, 35 bp, Artificial Sequence
  Synthetic oligonucleotide
acttgagcaggtctcgcgagaggggctgtagcctt

SEQ ID NO: 9297 - DNA, 35 bp, Artificial Sequence
  Synthetic oligonucleotide
agactcgtttacggtattgttagcgagtttaacgt

SEQ ID NO: 9298 - DNA, 35 bp, Artificial Sequence
  Synthetic oligonucleotide
agagacgctacagtccatcatcaatgaaaatcacg

SEQ ID NO: 9299 - DNA, 36 bp, Artificial Sequence
  Synthetic oligonucleotide
agcctccacaggtaatatctcttgcacagatacgta

SEQ ID NO: 9300 - DNA, 36 bp, Artificial Sequence
  Synthetic oligonucleotide
atccaacgagctgtacgcttttatggttgtttgtta

SEQ ID NO: 9301 - DNA, 37 bp, Artificial Sequence
  Synthetic oligonucleotide
atccatacgtaacaggcacgagggcactcgccaatga

SEQ ID NO: 9302 - DNA, 36 bp, Artificial Sequence
  Synthetic oligonucleotide
atcgtactgtgaatgggggtgcgggattttcaccga

SEQ ID NO: 9303 - DNA, 37 bp, Artificial Sequence
  Synthetic oligonucleotide
atgaccgtatatcaagcaaaggtcgttagcgaactga

SEQ ID NO: 9304 - DNA, 38 bp, Artificial Sequence
  Synthetic oligonucleotide
atgaggtgcccttcgtcgtgaaaggggcaataacgtga

SEQ ID NO: 9305 - DNA, 38 bp, Artificial Sequence
  Synthetic oligonucleotide
cacgcgttattcgtattagaatacgggaacgcatctga

SEQ ID NO: 9306 - DNA, 35 bp, Artificial Sequence
  Synthetic oligonucleotide
ccgaagtattatgtctggggacgtattgctacagt

SEQ ID NO: 9307 - DNA, 38 bp, Artificial Sequence
  Synthetic oligonucleotide
ccggtactgtggggcgtggttcctacgtataataatga

SEQ ID NO: 9308 - DNA, 35 bp, Artificial Sequence
  Synthetic oligonucleotide
gacgaaatactaaattggaaagcgaaagcgtttgg

SEQ ID NO: 9309 - DNA, 36 bp, Artificial Sequence
  Synthetic oligonucleotide
gagccgctaatcgacacacatctacagcatagggga

SEQ ID NO: 9310 - DNA, 38 bp, Artificial Sequence
  Synthetic oligonucleotide
gatcgataggggttcgaatgttacatgctggggattga

SEQ ID NO: 9311 - DNA, 36 bp, Artificial Sequence
  Synthetic oligonucleotide
gccctccctctagttacggtggtacactgcaagtga

SEQ ID NO: 9312 - DNA, 36 bp, Artificial Sequence
  Synthetic oligonucleotide
gccgccctcagtaggtgcgcttatggtcaccatgta

SEQ ID NO: 9313 - DNA, 35 bp, Artificial Sequence
  Synthetic oligonucleotide
gctcagtcttatcaggacagggggccatataggaa

SEQ ID NO: 9314 - DNA, 36 bp, Artificial Sequence
  Synthetic oligonucleotide
gctcgagccccacgttcccgattgattatgacccta

SEQ ID NO: 9315 - DNA, 37 bp, Artificial Sequence
  Synthetic oligonucleotide
ggaacacgaacccattagctcagtgggaatatactga

SEQ ID NO: 9316 - DNA, 35 bp, Artificial Sequence
  Synthetic oligonucleotide
ggaacgcgatacgttcaaatgtgacgaacggtact

SEQ ID NO: 9317 - DNA, 37 bp, Artificial Sequence
  Synthetic oligonucleotide
ggagaccgaacaaacgtaaccaagtcgctagggtaga

SEQ ID NO: 9318 - DNA, 36 bp, Artificial Sequence
  Synthetic oligonucleotide
ggagtacgtgcttgttatgaggacccttgcttcgaa

SEQ ID NO: 9319 - DNA, 36 bp, Artificial Sequence
  Synthetic oligonucleotide
gggatcactaacaagggtagtagtgcgcacgtaaga

SEQ ID NO: 9320 - DNA, 36 bp, Artificial Sequence
  Synthetic oligonucleotide
gggccaaatgaaatggcaaaccctgttggggcatta

SEQ ID NO: 9321 - DNA, 38 bp, Artificial Sequence
  Synthetic oligonucleotide
ggtcacagtcgctatccttggagttatgtccgctgtga

SEQ ID NO: 9322 - DNA, 35 bp, Artificial Sequence
  Synthetic oligonucleotide
ggtgacggcgagaagacacggaatactgggttttt

SEQ ID NO: 9323 - DNA, 36 bp, Artificial Sequence
  Synthetic oligonucleotide
gtccatcgagtacgatgtattgtactcatgctggca

SEQ ID NO: 9324 - DNA, 36 bp, Artificial Sequence
  Synthetic oligonucleotide
gtccgttttgaacatgacgtgaaggatctaacggga

SEQ ID NO: 9325 - DNA, 35 bp, Artificial Sequence
  Synthetic oligonucleotide
gtgtcctggtgtagaatttcttcgatgctatgagt

SEQ ID NO: 9326 - DNA, 37 bp, Artificial Sequence
  Synthetic oligonucleotide
gttaactgcctacagtggtttatttcttcttacatga

SEQ ID NO: 9327 - DNA, 36 bp, Artificial Sequence
  Synthetic oligonucleotide
gttttcctggtatgcatttgattagatgcgtggcaa

SEQ ID NO: 9328 - DNA, 36 bp, Artificial Sequence
  Synthetic oligonucleotide
taaattgcataagacccacaagacagtgaaaagtta

SEQ ID NO: 9329 - DNA, 35 bp, Artificial Sequence
  Synthetic oligonucleotide
tacaaaacggtctgttcttggtacaggcaagttgt

SEQ ID NO: 9330 - DNA, 37 bp, Artificial Sequence
  Synthetic oligonucleotide
tacgtctaatacggaatgttttggattcacgtgttga

SEQ ID NO: 9331 - DNA, 36 bp, Artificial Sequence
  Synthetic oligonucleotide
tagatctaacgacttattcttgatagtatggcgtaa

SEQ ID NO: 9332 - DNA, 36 bp, Artificial Sequence
  Synthetic oligonucleotide
tcactgtgaaccatgaaatgaatgtgtctatttgga

SEQ ID NO: 9333 - DNA, 35 bp, Artificial Sequence
  Synthetic oligonucleotide
tcataagggtacagagttagtgcaatagaaccgtt

SEQ ID NO: 9334 - DNA, 37 bp, Artificial Sequence
  Synthetic oligonucleotide
tcccggtttcaaagtgggtcatcgccattagaagtga

SEQ ID NO: 9335 - DNA, 36 bp, Artificial Sequence
  Synthetic oligonucleotide
tccgcctgcggaaatagtactcggcgtaaaagttaa

SEQ ID NO: 9336 - DNA, 37 bp, Artificial Sequence
  Synthetic oligonucleotide
tccgctccaaggggcttgggtattgtcagttagaaga

SEQ ID NO: 9337 - DNA, 36 bp, Artificial Sequence
  Synthetic oligonucleotide
tcggagggttcctcgctgtacaacaatggctgtaga

SEQ ID NO: 9338 - DNA, 36 bp, Artificial Sequence
  Synthetic oligonucleotide
tgaaactgcagccgcttttgtgggaagtgtaagtga

SEQ ID NO: 9339 - DNA, 35 bp, Artificial Sequence
  Synthetic oligonucleotide
tgctacctacaggtatcaaagcactggagatacga

SEQ ID NO: 9340 - DNA, 38 bp, Artificial Sequence
  Synthetic oligonucleotide
tgtcccgcgcggtgtcgtggtgggccgtcaccgcctga

SEQ ID NO: 9341 - DNA, 35 bp, Artificial Sequence
  Synthetic oligonucleotide
tgtccgggaactctcgtctagcggtagtgccattc

SEQ ID NO: 9342 - DNA, 36 bp, Artificial Sequence
  Synthetic oligonucleotide
tgttcacactaaaaatgacgtgtcgcggacacgcaa

SEQ ID NO: 9343 - DNA, 35 bp, Artificial Sequence
  Synthetic oligonucleotide
ttaacttcatcgttgggtacttcagggtctctgtc

SEQ ID NO: 9344 - DNA, 35 bp, Artificial Sequence
  Synthetic oligonucleotide
ttggcatgtcctgatatgaagttttgaacatatca

SEQ ID NO: 9345 - DNA, 36 bp, Artificial Sequence
  Synthetic oligonucleotide
ttgttgtggggttgtacaaaactaggaccaatgata

SEQ ID NO: 9346 - DNA, 36 bp, Artificial Sequence
  Synthetic oligonucleotide
aattgtaagttagcagtaggcttaaggcatttttga

SEQ ID NO: 9347 - DNA, 35 bp, Artificial Sequence
  Synthetic oligonucleotide
aattgtgacgcggtcaaaggctttcaacatacttt

SEQ ID NO: 9348 - DNA, 36 bp, Artificial Sequence
  Synthetic oligonucleotide
acacaagtaaaatactttccatgccaaggtcacaga

SEQ ID NO: 9349 - DNA, 35 bp, Artificial Sequence
  Synthetic oligonucleotide
acaccgtagattgaaggcccaggtttcagatgata

SEQ ID NO: 9350 - DNA, 37 bp, Artificial Sequence
  Synthetic oligonucleotide
acacgccgagcgcgcgaactgtaaagctttgtcacga

SEQ ID NO: 9351 - DNA, 37 bp, Artificial Sequence
  Synthetic oligonucleotide
actagaccggtcacctaagaaggtcagtactttgcga

SEQ ID NO: 9352 - DNA, 35 bp, Artificial Sequence
  Synthetic oligonucleotide
agaaagttggctcccccgcgctgtctttatccgga

SEQ ID NO: 9353 - DNA, 36 bp, Artificial Sequence
  Synthetic oligonucleotide
agcaaaactggtgtcgagttgcccacgttcgacaga

SEQ ID NO: 9354 - DNA, 35 bp, Artificial Sequence
  Synthetic oligonucleotide
agccccccgcaagaagtgctcaaaggcgtagaaag

SEQ ID NO: 9355 - DNA, 38 bp, Artificial Sequence
  Synthetic oligonucleotide
aggtcgtacgcgagagggactcgatagcaagtccctga

SEQ ID NO: 9356 - DNA, 35 bp, Artificial Sequence
  Synthetic oligonucleotide
aggtgtggacatacggctgacgtcccaatgctggc

SEQ ID NO: 9357 - DNA, 37 bp, Artificial Sequence
  Synthetic oligonucleotide
agtccgaaacgcaatgctcaaagggctacgtgtgcga

SEQ ID NO: 9358 - DNA, 36 bp, Artificial Sequence
  Synthetic oligonucleotide
agtcgcgccagggaattatccttaccacgttgggga

SEQ ID NO: 9359 - DNA, 38 bp, Artificial Sequence
  Synthetic oligonucleotide
agtcggagcgttgtacaatctgcatacttgtaaaatga

SEQ ID NO: 9360 - DNA, 35 bp, Artificial Sequence
  Synthetic oligonucleotide
agtcgtggcccaattgtatgggagttgggtccgtt

SEQ ID NO: 9361 - DNA, 37 bp, Artificial Sequence
  Synthetic oligonucleotide
atcatctttaggggtggactgtagcgttttgtcagga

SEQ ID NO: 9362 - DNA, 37 bp, Artificial Sequence
  Synthetic oligonucleotide
atcgcttgggcacacgtatacacctcgtaggaaagga

SEQ ID NO: 9363 - DNA, 37 bp, Artificial Sequence
  Synthetic oligonucleotide
atggtgcgacgggcggaggcctgctaagtaggctgga

SEQ ID NO: 9364 - DNA, 36 bp, Artificial Sequence
  Synthetic oligonucleotide
attctcgctggtcgtttttgagggatgaataacgta

SEQ ID NO: 9365 - DNA, 35 bp, Artificial Sequence
  Synthetic oligonucleotide
cccaggatatttggatagctgcggaattgccgtcc

SEQ ID NO: 9366 - DNA, 36 bp, Artificial Sequence
  Synthetic oligonucleotide
cctaccggatgcgatgcactgtactggacgtaccta

SEQ ID NO: 9367 - DNA, 36 bp, Artificial Sequence
  Synthetic oligonucleotide
cgctggccatcctctaactcaagcgtttgttagaaa

SEQ ID NO: 9368 - DNA, 38 bp, Artificial Sequence
  Synthetic oligonucleotide
cgtcacatgcgacggtttgtaagaatcccaaccgttga

SEQ ID NO: 9369 - DNA, 36 bp, Artificial Sequence
  Synthetic oligonucleotide
cgtccagacgggatgtccgatggatcctttatgtta

SEQ ID NO: 9370 - DNA, 35 bp, Artificial Sequence
  Synthetic oligonucleotide
ctacgggagcaggcattagagtattgttgtaacct

SEQ ID NO: 9371 - DNA, 34 bp, Artificial Sequence
  Synthetic oligonucleotide
ctcaatccgatcgttgttttaaatcatagggaag

SEQ ID NO: 9372 - DNA, 35 bp, Artificial Sequence
  Synthetic oligonucleotide
gaagcaacgaagcagtcgcactctgttaacagcta

SEQ ID NO: 9373 - DNA, 35 bp, Artificial Sequence
  Synthetic oligonucleotide
gacagttctaccgttgtgatgatacgctctcccga

SEQ ID NO: 9374 - DNA, 37 bp, Artificial Sequence
  Synthetic oligonucleotide
gaccttcttgcgggcccaccctaaaacaggctcctga

SEQ ID NO: 9375 - DNA, 37 bp, Artificial Sequence
  Synthetic oligonucleotide
gacggctccaatataattcgtcaagtcctttagtgga

SEQ ID NO: 9376 - DNA, 38 bp, Artificial Sequence
  Synthetic oligonucleotide
gacgtaccgggcggtatatactagccttgcttataaga

SEQ ID NO: 9377 - DNA, 35 bp, Artificial Sequence
  Synthetic oligonucleotide
gacgttctgtgtgataccgcctaggcgcctggggg

SEQ ID NO: 9378 - DNA, 35 bp, Artificial Sequence
  Synthetic oligonucleotide
gagccaacaagttcgggtgcgtaataggcggtccc

SEQ ID NO: 9379 - DNA, 35 bp, Artificial Sequence
  Synthetic oligonucleotide
gaggtactgtcggagacatgtgatacactacaaaa

SEQ ID NO: 9380 - DNA, 36 bp, Artificial Sequence
  Synthetic oligonucleotide
gagttcgttctgcaggcctaggcggatcacaggtaa

SEQ ID NO: 9381 - DNA, 37 bp, Artificial Sequence
  Synthetic oligonucleotide
gcatcgatccgtggggtgatgaatgggttcgtataga

SEQ ID NO: 9382 - DNA, 35 bp, Artificial Sequence
  Synthetic oligonucleotide
gccgaggtgcatacactggctaccatagtgtgagg

SEQ ID NO: 9383 - DNA, 36 bp, Artificial Sequence
  Synthetic oligonucleotide
gctagatttgcaggcggtcacggtctcttacggtaa

SEQ ID NO: 9384 - DNA, 36 bp, Artificial Sequence
  Synthetic oligonucleotide
gctgcacacgcagtgctgccttgcttcgtctccgta

SEQ ID NO: 9385 - DNA, 36 bp, Artificial Sequence
  Synthetic oligonucleotide
gcttaggcctcatgttaggggttacttggtacgcca

SEQ ID NO: 9386 - DNA, 38 bp, Artificial Sequence
  Synthetic oligonucleotide
ggactcagtcagtttcgcgtagcacggacgtattctga

SEQ ID NO: 9387 - DNA, 35 bp, Artificial Sequence
  Synthetic oligonucleotide
gggagcagagtgcctcgtagggcccacggacagca

SEQ ID NO: 9388 - DNA, 36 bp, Artificial Sequence
  Synthetic oligonucleotide
ggggagagacgagcgcagttaaggggcgaccacgca

SEQ ID NO: 9389 - DNA, 36 bp, Artificial Sequence
  Synthetic oligonucleotide
ggtctttccgtcaagaggatcacagttcattttgga

SEQ ID NO: 9390 - DNA, 35 bp, Artificial Sequence
  Synthetic oligonucleotide
ggtggtgcgaatcctaggtctagtctacacttact

SEQ ID NO: 9391 - DNA, 37 bp, Artificial Sequence
  Synthetic oligonucleotide
ggtgtcaggtccgtctaggtatgtcatcacagaacga

SEQ ID NO: 9392 - DNA, 36 bp, Artificial Sequence
  Synthetic oligonucleotide
ggttggacgtggggaactgaaccaagtcatcgcgta

SEQ ID NO: 9393 - DNA, 36 bp, Artificial Sequence
  Synthetic oligonucleotide
gtagggcgaaggcctctcgaattgattgtggtgcaa

SEQ ID NO: 9394 - DNA, 36 bp, Artificial Sequence
  Synthetic oligonucleotide
gtcccggccccattgggatgagtgaggttggaatta

SEQ ID NO: 9395 - DNA, 35 bp, Artificial Sequence
  Synthetic oligonucleotide
gtcgtgaagacagattacagcgacttcacgggggt

SEQ ID NO: 9396 - DNA, 35 bp, Artificial Sequence
  Synthetic oligonucleotide
gtttaccgaagtgtagcactccaccagaaatggtg

SEQ ID NO: 9397 - DNA, 38 bp, Artificial Sequence
  Synthetic oligonucleotide
taccgcttagcacgctgcccgatagatgttattggtga

SEQ ID NO: 9398 - DNA, 37 bp, Artificial Sequence
  Synthetic oligonucleotide
tagcaattcgctgtggagcacattttaatcttgtcga

SEQ ID NO: 9399 - DNA, 35 bp, Artificial Sequence
  Synthetic oligonucleotide
taggtatttagaaaggtcaagtgtaggtttccggg

SEQ ID NO: 9400 - DNA, 35 bp, Artificial Sequence
  Synthetic oligonucleotide
tataagccggcgacatgccggaatggcgtacgaca

SEQ ID NO: 9401 - DNA, 38 bp, Artificial Sequence
  Synthetic oligonucleotide
tatatgtagggaacctgactatccttagtagtatctga

SEQ ID NO: 9402 - DNA, 37 bp, Artificial Sequence
  Synthetic oligonucleotide
tatcgtacgtgataagtcagtgtctaacaaactggga

SEQ ID NO: 9403 - DNA, 37 bp, Artificial Sequence
  Synthetic oligonucleotide
tccaactcaacacaatcatgctaatggtctatgcaga

SEQ ID NO: 9404 - DNA, 38 bp, Artificial Sequence
  Synthetic oligonucleotide
tccaggatcaagcattcgatacccggaaccttctatga

SEQ ID NO: 9405 - DNA, 35 bp, Artificial Sequence
  Synthetic oligonucleotide
tcgctatttgtactggaacaatatcgtcgcccttg

SEQ ID NO: 9406 - DNA, 38 bp, Artificial Sequence
  Synthetic oligonucleotide
tctccaggagccgggttcgtgatcgttgatctacatga

SEQ ID NO: 9407 - DNA, 36 bp, Artificial Sequence
  Synthetic oligonucleotide
tgactaccatcagagcgccaaaatatttgtgttgca

SEQ ID NO: 9408 - DNA, 38 bp, Artificial Sequence
  Synthetic oligonucleotide
tgagtgtggcaattccgaagtgccaagcgttccggtga

SEQ ID NO: 9409 - DNA, 38 bp, Artificial Sequence
  Synthetic oligonucleotide
tgcaggtagcctctggacaaggttgcaatccaggctga

SEQ ID NO: 9410 - DNA, 37 bp, Artificial Sequence
  Synthetic oligonucleotide
tgcgggccttcgggaccgaaagtctccttgcgctcga

SEQ ID NO: 9411 - DNA, 38 bp, Artificial Sequence
  Synthetic oligonucleotide
tggaaacaagaagatgcggacccaaagtctcctgatga

SEQ ID NO: 9412 - DNA, 35 bp, Artificial Sequence
  Synthetic oligonucleotide
tggtgttgcaatcacgaatgaatgtaaattagaga

SEQ ID NO: 9413 - DNA, 38 bp, Artificial Sequence
  Synthetic oligonucleotide
tgtcctttcttcgaatgggtagttctggttaaacttga

SEQ ID NO: 9414 - DNA, 35 bp, Artificial Sequence
  Synthetic oligonucleotide
tgtttgcattccgggggtagtgtgttggtggtctg

SEQ ID NO: 9415 - DNA, 36 bp, Artificial Sequence
  Synthetic oligonucleotide
ttagatatcacgaagagctgacggatggtcggacaa

SEQ ID NO: 9416 - DNA, 37 bp, Artificial Sequence
  Synthetic oligonucleotide
ttatgtcatacaactaccaatccaattcggcgatgga

SEQ ID NO: 9417 - DNA, 36 bp, Artificial Sequence
  Synthetic oligonucleotide
ttcaggtgcagtgatctgggggttttgtgctcttaa

SEQ ID NO: 9418 - DNA, 38 bp, Artificial Sequence
  Synthetic oligonucleotide
ttcggagtcctcgtaaagtcaacgaaatggtgagctga

SEQ ID NO: 9419 - DNA, 35 bp, Artificial Sequence
  Synthetic oligonucleotide
ttctggcgggggacggaggctagcgtgcgtacagc

SEQ ID NO: 9420 - DNA, 36 bp, Artificial Sequence
  Synthetic oligonucleotide
ttgaggagggtgtggatcgcccttttctggcagaaa

SEQ ID NO: 9421 - DNA, 36 bp, Artificial Sequence
  Synthetic oligonucleotide
ttgatctgcggggatgattgtgtgcgtagcctgcac

SEQ ID NO: 9422 - DNA, 35 bp, Artificial Sequence
  Synthetic oligonucleotide
ttgcacccaatccatactgcgatcatggtaggaat

SEQ ID NO: 9423 - DNA, 36 bp, Artificial Sequence
  Synthetic oligonucleotide
ttgtgggaccagtgcgagtgcgccggccggtttcaa

SEQ ID NO: 9424 - DNA, 35 bp, Artificial Sequence
  Synthetic oligonucleotide
tttcaccttggctactctagacggtggtagaggaa

SEQ ID NO: 9425 - DNA, 38 bp, Artificial Sequence
  Synthetic oligonucleotide
tttggctgtatcaacagcgttaatctctgatggattga

SEQ ID NO: 9426 - DNA, 36 bp, Artificial Sequence
  Synthetic oligonucleotide
tcaagcccaccgaagctcatgtcgcctgtgtacgta

SEQ ID NO: 9427 - DNA, 36 bp, Artificial Sequence
  Synthetic oligonucleotide
ggtgcgtccgtattaaaaagagttgagagttctaag

SEQ ID NO: 9428 - DNA, 35 bp, Artificial Sequence
  Synthetic oligonucleotide
aatcgcggcgacgctaaacgttcatccgggaagtt

SEQ ID NO: 9429 - DNA, 35 bp, Artificial Sequence
  Synthetic oligonucleotide
agtacggtcaattggcgttattagttgtacatggg

SEQ ID NO: 9430 - DNA, 35 bp, Artificial Sequence
  Synthetic oligonucleotide
gtacattccaatttgtgctctgggagtggataaat

SEQ ID NO: 9431 - DNA, 37 bp, Artificial Sequence
  Synthetic oligonucleotide
ttatcggagcgatacggtaacgaagctggactaccga

SEQ ID NO: 9432 - DNA, 36 bp, Artificial Sequence
  Synthetic oligonucleotide
tagtagacgcgacaataatcgtggatgactgcgtga

SEQ ID NO: 9433 - DNA, 36 bp, Artificial Sequence
  Synthetic oligonucleotide
gactaggacacagatcaatagcctccgtgaactgta

SEQ ID NO: 9434 - DNA, 35 bp, Artificial Sequence
  Synthetic oligonucleotide
ggagatctcatgaagccacgtcgagcgtgtcaatc

SEQ ID NO: 9435 - DNA, 38 bp, Artificial Sequence
  Synthetic oligonucleotide
ggggtagctcacgtctaacggagtctggaatgaaatga

SEQ ID NO: 9436 - DNA, 36 bp, Artificial Sequence
  Synthetic oligonucleotide
tgtcatgggagtgtacacctattagagcgggtgaaa

SEQ ID NO: 9437 - DNA, 37 bp, Artificial Sequence
  Synthetic oligonucleotide
actgggtcatggtgtactgcgcgatggccacgtgcga

SEQ ID NO: 9438 - DNA, 38 bp, Artificial Sequence
  Synthetic oligonucleotide
gcacgagagctagaggcacgtactagtggttatattga

SEQ ID NO: 9439 - DNA, 35 bp, Artificial Sequence
  Synthetic oligonucleotide
ggggtacttgtagcagtcaaatatcgactgagcca

SEQ ID NO: 9440 - DNA, 35 bp, Artificial Sequence
  Synthetic oligonucleotide
tggtccagtgtaaaaaaattttagttcttttgtta

SEQ ID NO: 9441 - DNA, 35 bp, Artificial Sequence
  Synthetic oligonucleotide
gccgtacacggtatgtttgcgtttccgtccttccc

SEQ ID NO: 9442 - DNA, 36 bp, Artificial Sequence
  Synthetic oligonucleotide
aacgtaactactgcggtgggcttacttgatatacta

SEQ ID NO: 9443 - DNA, 37 bp, Artificial Sequence
  Synthetic oligonucleotide
cccagactgactgccagtcacagtttcgcttaggcga

SEQ ID NO: 9444 - DNA, 37 bp, Artificial Sequence
  Synthetic oligonucleotide
acccatatcaggtaaaaggggcgcgtttgttgcggga

SEQ ID NO: 9445 - DNA, 36 bp, Artificial Sequence
  Synthetic oligonucleotide
gagaaacggcttcggatccgtttttacgtcctgtga

SEQ ID NO: 9446 - DNA, 36 bp, Artificial Sequence
  Synthetic oligonucleotide
gcgacagactctggatttgagctctttcgccgctta

SEQ ID NO: 9447 - DNA, 37 bp, Artificial Sequence
  Synthetic oligonucleotide
taacggaaatctctttccacagtcggcttgggtgtga

SEQ ID NO: 9448 - DNA, 37 bp, Artificial Sequence
  Synthetic oligonucleotide
taagagcgataaccagcaagtgtcttcacgtatagga

SEQ ID NO: 9449 - DNA, 35 bp, Artificial Sequence
  Synthetic oligonucleotide
accttgcaaagttcatgatagagacaccctgcttt

SEQ ID NO: 9450 - DNA, 37 bp, Artificial Sequence
  Synthetic oligonucleotide
cacatggctaggtaacggctactccctttcgaacaga

SEQ ID NO: 9451 - DNA, 36 bp, Artificial Sequence
  Synthetic oligonucleotide
tccacgccccagtagtttggcttgcggggtctagaa

SEQ ID NO: 9452 - DNA, 37 bp, Artificial Sequence
  Synthetic oligonucleotide
aagggcacttaggccataggcgtcattgtaagaacga

SEQ ID NO: 9453 - DNA, 35 bp, Artificial Sequence
  Synthetic oligonucleotide
gaaactgatgtctttgccgacgatacatgccttgg

SEQ ID NO: 9454 - DNA, 35 bp, Artificial Sequence
  Synthetic oligonucleotide
ttctgtaaaggcgtactacgggtttacgggactgt

SEQ ID NO: 9455 - DNA, 35 bp, Artificial Sequence
  Synthetic oligonucleotide
aaacttaggaggcgttaaatgatttctgtaacgta

SEQ ID NO: 9456 - DNA, 38 bp, Artificial Sequence
  Synthetic oligonucleotide
acagtagggcgggtatttcgccgggtgactacacatga

SEQ ID NO: 9457 - DNA, 38 bp, Artificial Sequence
  Synthetic oligonucleotide
acccgtgatccgcatgtgccccccaattcaagtcgtga

SEQ ID NO: 9458 - DNA, 38 bp, Artificial Sequence
  Synthetic oligonucleotide
agtcctgcctaagacacctgttaagcacgcctgggtga

SEQ ID NO: 9459 - DNA, 35 bp, Artificial Sequence
  Synthetic oligonucleotide
gagataccccccttgcccgcgtgttaagtagctga

SEQ ID NO: 9460 - DNA, 36 bp, Artificial Sequence
  Synthetic oligonucleotide
gagcaaggctccgtaccgaccggctgaatcgagata

SEQ ID NO: 9461 - DNA, 35 bp, Artificial Sequence
  Synthetic oligonucleotide
gcgcttttgaccatgagtttgaaaacttcccgggg

SEQ ID NO: 9462 - DNA, 35 bp, Artificial Sequence
  Synthetic oligonucleotide
gcggccacatatttgggcgcctattctgcattcaa

SEQ ID NO: 9463 - DNA, 36 bp, Artificial Sequence
  Synthetic oligonucleotide
gctatgcccacacaagcgctcagtaagtcccatgta

SEQ ID NO: 9464 - DNA, 38 bp, Artificial Sequence
  Synthetic oligonucleotide
gtcgctagtaaccatatggtgtggaaaaagttacgtga

SEQ ID NO: 9465 - DNA, 37 bp, Artificial Sequence
  Synthetic oligonucleotide
gttggacagcaacacgtctttggttatacgtggcaca

SEQ ID NO: 9466 - DNA, 35 bp, Artificial Sequence
  Synthetic oligonucleotide
gttgtagacccgtagtctcccagttatgtgtggct

SEQ ID NO: 9467 - DNA, 38 bp, Artificial Sequence
  Synthetic oligonucleotide
tacgtggaggactgcgacaggatacagctacgatctga

SEQ ID NO: 9468 - DNA, 37 bp, Artificial Sequence
  Synthetic oligonucleotide
tagtgttggtactgcggcaagtgttgactcttcggga

SEQ ID NO: 9469 - DNA, 34 bp, Artificial Sequence
  Synthetic oligonucleotide
tatacataatcgggcgtatgtatatcctctgggt

SEQ ID NO: 9470 - DNA, 38 bp, Artificial Sequence
  Synthetic oligonucleotide
tctcatacaggcgttaggcacggataaatagttgttga

SEQ ID NO: 9471 - DNA, 37 bp, Artificial Sequence
  Synthetic oligonucleotide
tctggggctgctttagacttaatgtcgtgatatgcta

SEQ ID NO: 9472 - DNA, 37 bp, Artificial Sequence
  Synthetic oligonucleotide
tgaacgatggggggtgtaccacatgaagtttcgtgga

SEQ ID NO: 9473 - DNA, 38 bp, Artificial Sequence
  Synthetic oligonucleotide
tgtcgcgctgtgaccggtggtgttagtgctttacttga

SEQ ID NO: 9474 - DNA, 38 bp, Artificial Sequence
  Synthetic oligonucleotide
accaccctgtcgtgtgctgataaaccaatcgatggtga

SEQ ID NO: 9475 - DNA, 36 bp, Artificial Sequence
  Synthetic oligonucleotide
aacgactcctaaccgtgatgacaaggcgttcacgga

SEQ ID NO: 9476 - DNA, 36 bp, Artificial Sequence
  Synthetic oligonucleotide
agggccaggtaatgctaagaagccagtttattgaaa

SEQ ID NO: 9477 - DNA, 37 bp, Artificial Sequence
  Synthetic oligonucleotide
ctgtattgaagacacattaaccggaatccggccacga

SEQ ID NO: 9478 - DNA, 35 bp, Artificial Sequence
  Synthetic oligonucleotide
gaactaacggaacccgagtgatttcgtacgaatat

SEQ ID NO: 9479 - DNA, 35 bp, Artificial Sequence
  Synthetic oligonucleotide
gacacagatgcctagtcaaccgcaaggagggtcac

SEQ ID NO: 9480 - DNA, 37 bp, Artificial Sequence
  Synthetic oligonucleotide
gcgagggcatattgcgctaattttgtccaatagggga

SEQ ID NO: 9481 - DNA, 36 bp, Artificial Sequence
  Synthetic oligonucleotide
ggctcgggacacgcaatgcccgggcccaaaccggaa

SEQ ID NO: 9482 - DNA, 38 bp, Artificial Sequence
  Synthetic oligonucleotide
gggataatctcatgcttgtatccatgctgttgttttga

SEQ ID NO: 9483 - DNA, 36 bp, Artificial Sequence
  Synthetic oligonucleotide
gtctgcagggggcacggaaaaggttagggctcgata

SEQ ID NO: 9484 - DNA, 37 bp, Artificial Sequence
  Synthetic oligonucleotide
gtggaataccgcacccggtgttgagacggaatctgga

SEQ ID NO: 9485 - DNA, 35 bp, Artificial Sequence
  Synthetic oligonucleotide
tagttggcctgtcacccagccaaaggaactactag

SEQ ID NO: 9486 - DNA, 38 bp, Artificial Sequence
  Synthetic oligonucleotide
tccaggtttgaaaatggggctacttgagttggtcctga

SEQ ID NO: 9487 - DNA, 38 bp, Artificial Sequence
  Synthetic oligonucleotide
gtaaatgcccagggggagcaatcgccgtgcttgaagga

SEQ ID NO: 9488 - DNA, 38 bp, Artificial Sequence
  Synthetic oligonucleotide
tcgcacggagacgccgcgcaggcggactgcattcgtga

SEQ ID NO: 9489 - DNA, 35 bp, Artificial Sequence
  Synthetic oligonucleotide
aactatgctggtcatcagtttgtcgattctgaggg

SEQ ID NO: 9490 - DNA, 38 bp, Artificial Sequence
  Synthetic oligonucleotide
aactcacgtggggtacagcgaatcgacttgggaagtga

SEQ ID NO: 9491 - DNA, 37 bp, Artificial Sequence
  Synthetic oligonucleotide
aggtccatgcagctcgtacaaaacagtgttattgcga

SEQ ID NO: 9492 - DNA, 37 bp, Artificial Sequence
  Synthetic oligonucleotide
caatgaccgtaacaggttgggaatgcggacggtagga

SEQ ID NO: 9493 - DNA, 37 bp, Artificial Sequence
  Synthetic oligonucleotide
ccgcgggccacgctagcctaagttcatgtgtaacgga

SEQ ID NO: 9494 - DNA, 38 bp, Artificial Sequence
  Synthetic oligonucleotide
gatagttcatcaagatcacgtgtattgcgaccttttga

SEQ ID NO: 9495 - DNA, 35 bp, Artificial Sequence
  Synthetic oligonucleotide
gatcgtatttccatgaagaaataagggggggactg

SEQ ID NO: 9496 - DNA, 36 bp, Artificial Sequence
  Synthetic oligonucleotide
gcaacattgcaaatggatacttttcgtctgaacgaa

SEQ ID NO: 9497 - DNA, 38 bp, Artificial Sequence
  Synthetic oligonucleotide
gcaagattggtaggtcgataacgaaagggatgtaatga

SEQ ID NO: 9498 - DNA, 35 bp, Artificial Sequence
  Synthetic oligonucleotide
gctcccgcccagaaccacgcctagtcgactgtagg

SEQ ID NO: 9499 - DNA, 35 bp, Artificial Sequence
  Synthetic oligonucleotide
ggcgccacagtggcatcatacgtacggtaggctcc

SEQ ID NO: 9500 - DNA, 36 bp, Artificial Sequence
  Synthetic oligonucleotide
gtacattcctgtcaggtttgttaacaacggacgaca

SEQ ID NO: 9501 - DNA, 35 bp, Artificial Sequence
  Synthetic oligonucleotide
tactctagcgggtttctcggtaggagcaacagccc

SEQ ID NO: 9502 - DNA, 38 bp, Artificial Sequence
  Synthetic oligonucleotide
tagaagaaaattccgcgagccgacctgttactgcgtga

SEQ ID NO: 9503 - DNA, 35 bp, Artificial Sequence
  Synthetic oligonucleotide
tagtgccatataacacaccagggattatgatgccg

SEQ ID NO: 9504 - DNA, 37 bp, Artificial Sequence
  Synthetic oligonucleotide
ttcaacaatccaacagacctgtacgatagtgagacga

SEQ ID NO: 9505 - DNA, 38 bp, Artificial Sequence
  Synthetic oligonucleotide
tttacttcccggagttatgttagggctcgggctcttga

SEQ ID NO: 9506 - DNA, 36 bp, Artificial Sequence
  Synthetic oligonucleotide
tgatcagtaatcacgactaagttcatggggtgagta

SEQ ID NO: 9507 - DNA, 35 bp, Artificial Sequence
  Synthetic oligonucleotide
attagcaggcctccgggcgttggttgggtgaccac

SEQ ID NO: 9508 - DNA, 35 bp, Artificial Sequence
  Synthetic oligonucleotide
tagtccgcgggggaataacgtacgagttttttcga

SEQ ID NO: 9509 - DNA, 35 bp, Artificial Sequence
  Synthetic oligonucleotide
gaatagcgatctctaggatacaagcgtttcgcctg

SEQ ID NO: 9510 - DNA, 35 bp, Artificial Sequence
  Synthetic oligonucleotide
aaccaacccactggtctacggtaaggcatgattgg

SEQ ID NO: 9511 - DNA, 37 bp, Artificial Sequence
  Synthetic oligonucleotide
aagccacgtaagctgcattatcatagctcgaatcaga

SEQ ID NO: 9512 - DNA, 37 bp, Artificial Sequence
  Synthetic oligonucleotide
aatgaccgaaggagggattagtcaacgaactaacaga

SEQ ID NO: 9513 - DNA, 37 bp, Artificial Sequence
  Synthetic oligonucleotide
aatgcgtagtaagccctcatatggcgcactggcatga

SEQ ID NO: 9514 - DNA, 37 bp, Artificial Sequence
  Synthetic oligonucleotide
acaatcatgacggctgaacaactgtgcgccgacagga

SEQ ID NO: 9515 - DNA, 36 bp, Artificial Sequence
  Synthetic oligonucleotide
accgttcagtacgcgcgcctgaaaatgattgcaaaa

SEQ ID NO: 9516 - DNA, 36 bp, Artificial Sequence
  Synthetic oligonucleotide
acgtccgtgcgtgtcactgtggtgtaacccccccca

SEQ ID NO: 9517 - DNA, 38 bp, Artificial Sequence
  Synthetic oligonucleotide
agcactagtcacggagatccagcctaggtatcgcttga

SEQ ID NO: 9518 - DNA, 38 bp, Artificial Sequence
  Synthetic oligonucleotide
aggactcacctcgggggagaccatagggatgtccggga

SEQ ID NO: 9519 - DNA, 35 bp, Artificial Sequence
  Synthetic oligonucleotide
attggccccgcagacatatctgatgtacccgctcc

SEQ ID NO: 9520 - DNA, 35 bp, Artificial Sequence
  Synthetic oligonucleotide
caatgggctctttgtcgtactaagttatatcttac

SEQ ID NO: 9521 - DNA, 35 bp, Artificial Sequence
  Synthetic oligonucleotide
cacgctggtaggtgtttaataatgttggaatcagt

SEQ ID NO: 9522 - DNA, 37 bp, Artificial Sequence
  Synthetic oligonucleotide
cccgtgctgcaattgagactaatttggtcgacgatga

SEQ ID NO: 9523 - DNA, 37 bp, Artificial Sequence
  Synthetic oligonucleotide
gaagcacagaggtcctcgcccgaaatgcctcaggaga

SEQ ID NO: 9524 - DNA, 35 bp, Artificial Sequence
  Synthetic oligonucleotide
gacctccagggcgcgagataatttctacagagagc

SEQ ID NO: 9525 - DNA, 38 bp, Artificial Sequence
  Synthetic oligonucleotide
gagacgggtgggatatctgggacctctagccgtcatga

SEQ ID NO: 9526 - DNA, 36 bp, Artificial Sequence
  Synthetic oligonucleotide
gcatttcagccatagtcatttggcttcttgccacga

SEQ ID NO: 9527 - DNA, 35 bp, Artificial Sequence
  Synthetic oligonucleotide
gccgctggcatattaggttcacataggcaattagc

SEQ ID NO: 9528 - DNA, 37 bp, Artificial Sequence
  Synthetic oligonucleotide
ggcttatggatataaggaacgactgcgtgaggtttga

SEQ ID NO: 9529 - DNA, 35 bp, Artificial Sequence
  Synthetic oligonucleotide
gtagttgcagtcaacagtgacttaacaggtacatg

SEQ ID NO: 9530 - DNA, 36 bp, Artificial Sequence
  Synthetic oligonucleotide
tagcccatgcgggcggtcgtttcctgtgctcatgta

SEQ ID NO: 9531 - DNA, 37 bp, Artificial Sequence
  Synthetic oligonucleotide
tatggagttgtatactgcgtaagactcctgtggtaga

SEQ ID NO: 9532 - DNA, 38 bp, Artificial Sequence
  Synthetic oligonucleotide
tccgtacaggttgtggctatgtcagctatggcgattga

SEQ ID NO: 9533 - DNA, 37 bp, Artificial Sequence
  Synthetic oligonucleotide
tcgcagtgctggttaatcggacacatcatcgcgctga

SEQ ID NO: 9534 - DNA, 35 bp, Artificial Sequence
  Synthetic oligonucleotide
ttactgctgcatgcattaaggtttgttgtccgttc

SEQ ID NO: 9535 - DNA, 35 bp, Artificial Sequence
  Synthetic oligonucleotide
tcaccacctcaaacgtactgtttctaacttgaggg

SEQ ID NO: 9536 - DNA, 37 bp, Artificial Sequence
  Synthetic oligonucleotide
gacttacccttgagactcgatatagcgggttttacga

SEQ ID NO: 9537 - DNA, 34 bp, Artificial Sequence
  Synthetic oligonucleotide
gcgtatcgacgataactaactcgagcgggtggtg

SEQ ID NO: 9538 - DNA, 35 bp, Artificial Sequence
  Synthetic oligonucleotide
tcccttgatgcgaaagctgcagtttgatgactggt

SEQ ID NO: 9539 - DNA, 35 bp, Artificial Sequence
  Synthetic oligonucleotide
aacgcacgttggatcagatgctttcttacgactgt

SEQ ID NO: 9540 - DNA, 37 bp, Artificial Sequence
  Synthetic oligonucleotide
aacggagtgatagactgtccctggtcagttgtatcga

SEQ ID NO: 9541 - DNA, 37 bp, Artificial Sequence
  Synthetic oligonucleotide
agagataaggtcgcggtatttatcatttttgatgtga

SEQ ID NO: 9542 - DNA, 36 bp, Artificial Sequence
  Synthetic oligonucleotide
agaggtcggagcattcgaactaaagtctgcgataca

SEQ ID NO: 9543 - DNA, 37 bp, Artificial Sequence
  Synthetic oligonucleotide
ataacagattcactccgattgaagactatcgggatga

SEQ ID NO: 9544 - DNA, 35 bp, Artificial Sequence
  Synthetic oligonucleotide
atccacaaccaggcgggggcgctaccgccaaattg

SEQ ID NO: 9545 - DNA, 35 bp, Artificial Sequence
  Synthetic oligonucleotide
atccgggagagtacgtagaaattagttccgcgaga

SEQ ID NO: 9546 - DNA, 38 bp, Artificial Sequence
  Synthetic oligonucleotide
atgatggagcatgattggcgatcaatttgtgctggtga

SEQ ID NO: 9547 - DNA, 35 bp, Artificial Sequence
  Synthetic oligonucleotide
attaagccacattctgtgggtttttgtgtagggta

SEQ ID NO: 9548 - DNA, 35 bp, Artificial Sequence
  Synthetic oligonucleotide
attgaacaatcagcttacgaggatgtggcatcgcc

SEQ ID NO: 9549 - DNA, 35 bp, Artificial Sequence
  Synthetic oligonucleotide
caacaggtctagtaaccacaaggacgaaggcatgc

SEQ ID NO: 9550 - DNA, 37 bp, Artificial Sequence
  Synthetic oligonucleotide
catgagctattaactggttaggtacgagtctcacgga

SEQ ID NO: 9551 - DNA, 36 bp, Artificial Sequence
  Synthetic oligonucleotide
ccgggtgttcttcgtggtacccggggttccatacaa

SEQ ID NO: 9552 - DNA, 34 bp, Artificial Sequence
  Synthetic oligonucleotide
gaatatgctaacgggcgtgctggtgggcttgtaa

SEQ ID NO: 9553 - DNA, 37 bp, Artificial Sequence
  Synthetic oligonucleotide
gacctggcgcctttgaaatgacatcgacagcctgaga

SEQ ID NO: 9554 - DNA, 38 bp, Artificial Sequence
  Synthetic oligonucleotide
gactgggcatgactggtgaaatgggggactcaacttga

SEQ ID NO: 9555 - DNA, 35 bp, Artificial Sequence
  Synthetic oligonucleotide
gatagggggggctttgatatcaggaagcgcccgcc

SEQ ID NO: 9556 - DNA, 35 bp, Artificial Sequence
  Synthetic oligonucleotide
gatcggacgttaccctgacggggacatcgggggtc

SEQ ID NO: 9557 - DNA, 37 bp, Artificial Sequence
  Synthetic oligonucleotide
gcacatcaaattcactggtcacaggtgcatggaggga

SEQ ID NO: 9558 - DNA, 37 bp, Artificial Sequence
  Synthetic oligonucleotide
gcagtcactcacggtgggagccaatcggagaacagga

SEQ ID NO: 9559 - DNA, 35 bp, Artificial Sequence
  Synthetic oligonucleotide
gcccatcacgtggtcttacgtgatggatacgtagg

SEQ ID NO: 9560 - DNA, 38 bp, Artificial Sequence
  Synthetic oligonucleotide
gcgaggtctattgaaataggctatccaaagctctatga

SEQ ID NO: 9561 - DNA, 35 bp, Artificial Sequence
  Synthetic oligonucleotide
ggacttgtctggacaggaagggaatttgaactagg

SEQ ID NO: 9562 - DNA, 36 bp, Artificial Sequence
  Synthetic oligonucleotide
ggatgaaataatcagagccgcgttatgactcaacca

SEQ ID NO: 9563 - DNA, 35 bp, Artificial Sequence
  Synthetic oligonucleotide
gggcggataatcgttctgcgtgtttcggaatcttg

SEQ ID NO: 9564 - DNA, 35 bp, Artificial Sequence
  Synthetic oligonucleotide
ggggccactaagctaacgtgctcacagtgcaagta

SEQ ID NO: 9565 - DNA, 35 bp, Artificial Sequence
  Synthetic oligonucleotide
gttacagagtcttggtaatgggtgtcgcaatgcta

SEQ ID NO: 9566 - DNA, 35 bp, Artificial Sequence
  Synthetic oligonucleotide
gttttaatttccgttccgcgttcacgggggagtag

SEQ ID NO: 9567 - DNA, 38 bp, Artificial Sequence
  Synthetic oligonucleotide
tccgtactgagtcgctagagctgtcatccagacaatga

SEQ ID NO: 9568 - DNA, 36 bp, Artificial Sequence
  Synthetic oligonucleotide
tctaggtggttggtatatggagactgttatcgatta

SEQ ID NO: 9569 - DNA, 36 bp, Artificial Sequence
  Synthetic oligonucleotide
tgccactcatttcctgtactggagttacaggcggtc

SEQ ID NO: 9570 - DNA, 35 bp, Artificial Sequence
  Synthetic oligonucleotide
tgcggaggtcaaaccaccaatgccgtaatatgctg

SEQ ID NO: 9571 - DNA, 37 bp, Artificial Sequence
  Synthetic oligonucleotide
ttacctggtcaaggcgtctcatgtatattgcgtgaga

SEQ ID NO: 9572 - DNA, 37 bp, Artificial Sequence
  Synthetic oligonucleotide
ttggaggacgcgtgtgcgagttcgcagtcattctaga

SEQ ID NO: 9573 - DNA, 37 bp, Artificial Sequence
  Synthetic oligonucleotide
ttgtatttggagagtgtgtgatccgattcggggacga

SEQ ID NO: 9574 - DNA, 36 bp, Artificial Sequence
  Synthetic oligonucleotide
ttgttgttatatgtgtcatcgatcgccactggctga

SEQ ID NO: 9575 - DNA, 38 bp, Artificial Sequence
  Synthetic oligonucleotide
tttagtaccgaatgaggagtcgtggggcatccaactga

SEQ ID NO: 9576 - DNA, 35 bp, Artificial Sequence
  Synthetic oligonucleotide
tgatagcagcttgaaattgatctcaactcgaagtg

SEQ ID NO: 9577 - DNA, 36 bp, Artificial Sequence
  Synthetic oligonucleotide
ttgtcggaactgattctggcatattgaagataagaa

SEQ ID NO: 9578 - DNA, 38 bp, Artificial Sequence
  Synthetic oligonucleotide
gataggcaaaccctcgtgccaaggtgagtgggacttga

SEQ ID NO: 9579 - DNA, 36 bp, Artificial Sequence
  Synthetic oligonucleotide
ggacgggtattagccactttatggtacaggtaggta

SEQ ID NO: 9580 - DNA, 36 bp, Artificial Sequence
  Synthetic oligonucleotide
gtcttagtactgactgttgttggggttggttcatta

SEQ ID NO: 9581 - DNA, 36 bp, Artificial Sequence
  Synthetic oligonucleotide
tgaaatacgaacaaggcgtaggaacgcaagttgtca

SEQ ID NO: 9582 - DNA, 35 bp, Artificial Sequence
  Synthetic oligonucleotide
tgaccaacgtatacaagctgctgcctggcgacagc

SEQ ID NO: 9583 - DNA, 35 bp, Artificial Sequence
  Synthetic oligonucleotide
aaatacgtgtgccacggggtacgttgtcttggcta

SEQ ID NO: 9584 - DNA, 36 bp, Artificial Sequence
  Synthetic oligonucleotide
aaggggtccagtaccttactaggacgtggggaatta

SEQ ID NO: 9585 - DNA, 36 bp, Artificial Sequence
  Synthetic oligonucleotide
acaacggtcgtggtcagtcaatattgtgtcatttga

SEQ ID NO: 9586 - DNA, 37 bp, Artificial Sequence
  Synthetic oligonucleotide
agactcgagaccgggaattaacttaccctagcgcaga

SEQ ID NO: 9587 - DNA, 37 bp, Artificial Sequence
  Synthetic oligonucleotide
aggtggcttaacgtcctgcaggatacgcgcttttcga

SEQ ID NO: 9588 - DNA, 36 bp, Artificial Sequence
  Synthetic oligonucleotide
ataggctggggtgcgacgcggcattttttggctaca

SEQ ID NO: 9589 - DNA, 35 bp, Artificial Sequence
  Synthetic oligonucleotide
atatctttaagctagatgtgcgtgtcaaattcttg

SEQ ID NO: 9590 - DNA, 37 bp, Artificial Sequence
  Synthetic oligonucleotide
atcgtggataataattttcacgtgctgagctagctga

SEQ ID NO: 9591 - DNA, 34 bp, Artificial Sequence
  Synthetic oligonucleotide
atcgtggggcgttccttaacggggtatcgaggga

SEQ ID NO: 9592 - DNA, 38 bp, Artificial Sequence
  Synthetic oligonucleotide
atctagaggtggttgaatgcgattggagcccgtaatga

SEQ ID NO: 9593 - DNA, 37 bp, Artificial Sequence
  Synthetic oligonucleotide
attgcatgtttggaggttcgacgtttaattcgctcga

SEQ ID NO: 9594 - DNA, 38 bp, Artificial Sequence
  Synthetic oligonucleotide
cttgaccaagggccggcgactccagtctatcggtttga

SEQ ID NO: 9595 - DNA, 37 bp, Artificial Sequence
  Synthetic oligonucleotide
gaagtacgaacacgttttggtagccataaatttccga

SEQ ID NO: 9596 - DNA, 35 bp, Artificial Sequence
  Synthetic oligonucleotide
gaatgagctagatgcgcagggatctcgctgcagtg

SEQ ID NO: 9597 - DNA, 35 bp, Artificial Sequence
  Synthetic oligonucleotide
gacctgccccgactaagagcaccgcgcgtgaagtg

SEQ ID NO: 9598 - DNA, 35 bp, Artificial Sequence
  Synthetic oligonucleotide
gacctggccacgaagtctgagccgcgataggttcc

SEQ ID NO: 9599 - DNA, 35 bp, Artificial Sequence
  Synthetic oligonucleotide
gatagtcgacgttctgtcacggacggactttgtct

SEQ ID NO: 9600 - DNA, 38 bp, Artificial Sequence
  Synthetic oligonucleotide
gcaaacttcctagttgacatctctgaccggcatattga

SEQ ID NO: 9601 - DNA, 38 bp, Artificial Sequence
  Synthetic oligonucleotide
gcacccagtaattatggtgtttactgctttgtcgctga

SEQ ID NO: 9602 - DNA, 37 bp, Artificial Sequence
  Synthetic oligonucleotide
gcgaggactcagccacgacgtttgcttgtccgtagga

SEQ ID NO: 9603 - DNA, 37 bp, Artificial Sequence
  Synthetic oligonucleotide
gcgagggggcttcaggtcgcttataccgcacgataga

SEQ ID NO: 9604 - DNA, 36 bp, Artificial Sequence
  Synthetic oligonucleotide
gcgtttctcgggaagtgagcagatattttatgtaga

SEQ ID NO: 9605 - DNA, 35 bp, Artificial Sequence
  Synthetic oligonucleotide
gctacttggtgataagggtaaaaggaggggttatg

SEQ ID NO: 9606 - DNA, 36 bp, Artificial Sequence
  Synthetic oligonucleotide
gctggaacgcactgattagcaaacaaaccaatgcga

SEQ ID NO: 9607 - DNA, 37 bp, Artificial Sequence
  Synthetic oligonucleotide
ggtgcgccaagcgaggcgactccgcggggtgctccga

SEQ ID NO: 9608 - DNA, 35 bp, Artificial Sequence
  Synthetic oligonucleotide
ggtgtgagttggtgattgtgtttagtgtttcttga

SEQ ID NO: 9609 - DNA, 38 bp, Artificial Sequence
  Synthetic oligonucleotide
gtataagaacggaacatttcaacagccaatggcaatga

SEQ ID NO: 9610 - DNA, 38 bp, Artificial Sequence
  Synthetic oligonucleotide
gtgtcctaaggggaataactgcctaaggatactcgtga

SEQ ID NO: 9611 - DNA, 35 bp, Artificial Sequence
  Synthetic oligonucleotide
taaatacgcacaatgctctaacctactgcacttgg

SEQ ID NO: 9612 - DNA, 37 bp, Artificial Sequence
  Synthetic oligonucleotide
taacgagcggcaatagctataattgtcatacgctcga

SEQ ID NO: 9613 - DNA, 38 bp, Artificial Sequence
  Synthetic oligonucleotide
taatacgtgtaaagtgaaaagagtaggacgttgtatga

SEQ ID NO: 9614 - DNA, 37 bp, Artificial Sequence
  Synthetic oligonucleotide
taattcgtaatgcgccacggattgcgtttccttagaa

SEQ ID NO: 9615 - DNA, 38 bp, Artificial Sequence
  Synthetic oligonucleotide
taccatgtacattagttgtccattgaggaagaacgtga

SEQ ID NO: 9616 - DNA, 36 bp, Artificial Sequence
  Synthetic oligonucleotide
tacccgcgatgattgaggaaagcggttaggaattta

SEQ ID NO: 9617 - DNA, 37 bp, Artificial Sequence
  Synthetic oligonucleotide
tactcccccatcgtctccggggatttggtaagaacga

SEQ ID NO: 9618 - DNA, 37 bp, Artificial Sequence
  Synthetic oligonucleotide
taggacaaaagtcggggtggtgttgataagggcctga

SEQ ID NO: 9619 - DNA, 35 bp, Artificial Sequence
  Synthetic oligonucleotide
tcaacggtgcgctgccagacaagtccagcgcgagt

SEQ ID NO: 9620 - DNA, 35 bp, Artificial Sequence
  Synthetic oligonucleotide
tcaccggctcccctacagagtgtaccaatggaatg

SEQ ID NO: 9621 - DNA, 37 bp, Artificial Sequence
  Synthetic oligonucleotide
tcattctgggtggaactgtcttggcctaactccgcga

SEQ ID NO: 9622 - DNA, 35 bp, Artificial Sequence
  Synthetic oligonucleotide
tccgcggaagattttctatgatgtactcggagtat

SEQ ID NO: 9623 - DNA, 35 bp, Artificial Sequence
  Synthetic oligonucleotide
tcgcctgcctacgaatcctcttatatgcttgccta

SEQ ID NO: 9624 - DNA, 37 bp, Artificial Sequence
  Synthetic oligonucleotide
tctcacctagtcaggtttttaagtccttgctcctaga

SEQ ID NO: 9625 - DNA, 35 bp, Artificial Sequence
  Synthetic oligonucleotide
tctgccgttcgtaacaagcatgacgtacactgtat

SEQ ID NO: 9626 - DNA, 37 bp, Artificial Sequence
  Synthetic oligonucleotide
tcttgcgcatggaaaacggacacggacgcgtaggcga

SEQ ID NO: 9627 - DNA, 35 bp, Artificial Sequence
  Synthetic oligonucleotide
tgcatttaaagattttgtcaaatcgggtgagcgga

SEQ ID NO: 9628 - DNA, 38 bp, Artificial Sequence
  Synthetic oligonucleotide
tgccactgcttaagtctacaatagcaaccataccgtga

SEQ ID NO: 9629 - DNA, 37 bp, Artificial Sequence
  Synthetic oligonucleotide
tgctggtggaatcgtctgcttagccaatgtacgttga

SEQ ID NO: 9630 - DNA, 36 bp, Artificial Sequence
  Synthetic oligonucleotide
tggaacagaagcacgcagttcgtgcactgtttacta

SEQ ID NO: 9631 - DNA, 36 bp, Artificial Sequence
  Synthetic oligonucleotide
tgtacgcgttgtcgctgtgtgggtaacgtgtaccca

SEQ ID NO: 9632 - DNA, 35 bp, Artificial Sequence
  Synthetic oligonucleotide
tgtagggaaagtacgcaatagggagtatatgaagt

SEQ ID NO: 9633 - DNA, 36 bp, Artificial Sequence
  Synthetic oligonucleotide
ttcctggtccgtatgcgccgggccgggctaagcgta

SEQ ID NO: 9634 - DNA, 35 bp, Artificial Sequence
  Synthetic oligonucleotide
ttcgccgacgccctcggatcgtagatcaggagccc

SEQ ID NO: 9635 - DNA, 35 bp, Artificial Sequence
  Synthetic oligonucleotide
ttgcgtaaaatattaggcagtcagcattgaaactg

SEQ ID NO: 9636 - DNA, 36 bp, Artificial Sequence
  Synthetic oligonucleotide
ttgtacggacgggtgcttgcgggtattggtacgcga

SEQ ID NO: 9637 - DNA, 37 bp, Artificial Sequence
  Synthetic oligonucleotide
tttgcgttgctagtgaatgctttcgaattatattgga

SEQ ID NO: 9638 - DNA, 35 bp, Artificial Sequence
  Synthetic oligonucleotide
aatgcactctgaagtaaagattccatgatcaacag

SEQ ID NO: 9639 - DNA, 38 bp, Artificial Sequence
  Synthetic oligonucleotide
atccaagctcgattctgtacagcaccatgtcggattga

SEQ ID NO: 9640 - DNA, 36 bp, Artificial Sequence
  Synthetic oligonucleotide
gcattgcattgcggtataggttcggacgagagtcca

SEQ ID NO: 9641 - DNA, 36 bp, Artificial Sequence
  Synthetic oligonucleotide
ggtcacgaccagttacctccagttcgcatgttgtga

SEQ ID NO: 9642 - DNA, 34 bp, Artificial Sequence
  Synthetic oligonucleotide
tcactacttcataaccgatcgacagtaggtctta

SEQ ID NO: 9643 - DNA, 38 bp, Artificial Sequence
  Synthetic oligonucleotide
tccacattgtgaaaagtacttgggcggctttgccgtga

SEQ ID NO: 9644 - DNA, 38 bp, Artificial Sequence
  Synthetic oligonucleotide
acacgtgtggtgttgagtactgtgagttattactatga

SEQ ID NO: 9645 - DNA, 35 bp, Artificial Sequence
  Synthetic oligonucleotide
agtactgctctggggggtgtaggtccaactcaatg

SEQ ID NO: 9646 - DNA, 38 bp, Artificial Sequence
  Synthetic oligonucleotide
catgtggcgggtgtactccgacatagttaatcccgtga

SEQ ID NO: 9647 - DNA, 37 bp, Artificial Sequence
  Synthetic oligonucleotide
gaaatggcaatacgctgacgtgttgcactgtttccga

SEQ ID NO: 9648 - DNA, 36 bp, Artificial Sequence
  Synthetic oligonucleotide
aacgacatatgggtcgaaatgagaacacaagtggtg

SEQ ID NO: 9649 - DNA, 38 bp, Artificial Sequence
  Synthetic oligonucleotide
aactgcgcgtggtagaacgagaattgctttattggtga

SEQ ID NO: 9650 - DNA, 36 bp, Artificial Sequence
  Synthetic oligonucleotide
acaacattgtatgctggaatgttccttttcggtcga

SEQ ID NO: 9651 - DNA, 37 bp, Artificial Sequence
  Synthetic oligonucleotide
acctaggtgagagtagaatactacaacggtcacggga

SEQ ID NO: 9652 - DNA, 35 bp, Artificial Sequence
  Synthetic oligonucleotide
acgaagccccgtggccactattagtagtgcccttg

SEQ ID NO: 9653 - DNA, 38 bp, Artificial Sequence
  Synthetic oligonucleotide
acgtccttgatgatactgcaacatgtcaggtgacttga

SEQ ID NO: 9654 - DNA, 36 bp, Artificial Sequence
  Synthetic oligonucleotide
actcaggctttggtccggtcaacttgttcttgctga

SEQ ID NO: 9655 - DNA, 38 bp, Artificial Sequence
  Synthetic oligonucleotide
agactgtcgtgcagtatgccccggggtccattgtatga

SEQ ID NO: 9656 - DNA, 35 bp, Artificial Sequence
  Synthetic oligonucleotide
agagccgatcgaatagaggctaaggtgccgacttg

SEQ ID NO: 9657 - DNA, 35 bp, Artificial Sequence
  Synthetic oligonucleotide
aggacagagacacttagttaactttgcccaattgc

SEQ ID NO: 9658 - DNA, 35 bp, Artificial Sequence
  Synthetic oligonucleotide
agggctaaagtgctggtgctaagtatgatgccctt

SEQ ID NO: 9659 - DNA, 37 bp, Artificial Sequence
  Synthetic oligonucleotide
agggctggaaggaatggaccctttacctcaggggtga

SEQ ID NO: 9660 - DNA, 38 bp, Artificial Sequence
  Synthetic oligonucleotide
aggtaaatcgatgaccgcacgaccacatggcccgatga

SEQ ID NO: 9661 - DNA, 37 bp, Artificial Sequence
  Synthetic oligonucleotide
aggtaaattgccacgtagaactgcacaagtcttacga

SEQ ID NO: 9662 - DNA, 36 bp, Artificial Sequence
  Synthetic oligonucleotide
agtaggtatcagtcgtcgccgtgtcgttacagggga

SEQ ID NO: 9663 - DNA, 37 bp, Artificial Sequence
  Synthetic oligonucleotide
agtccctaagcgacgtagtggggctaacggaactaga

SEQ ID NO: 9664 - DNA, 36 bp, Artificial Sequence
  Synthetic oligonucleotide
agtccttgtgttcatgcttatagtgtggtcttagta

SEQ ID NO: 9665 - DNA, 36 bp, Artificial Sequence
  Synthetic oligonucleotide
agtttcggcctcaaccgatggagtgttcgcgttcga

SEQ ID NO: 9666 - DNA, 38 bp, Artificial Sequence
  Synthetic oligonucleotide
atcttgcgatgacgtgtgacaggtcatggggcgattga

SEQ ID NO: 9667 - DNA, 35 bp, Artificial Sequence
  Synthetic oligonucleotide
atgtcatacgtcggggtactggcttcctacatgtg

SEQ ID NO: 9668 - DNA, 35 bp, Artificial Sequence
  Synthetic oligonucleotide
attccgtaaggcactggaattttatctgttgtctg

SEQ ID NO: 9669 - DNA, 37 bp, Artificial Sequence
  Synthetic oligonucleotide
caagagctgatggaggagttgcacagccgtgcgcaga

SEQ ID NO: 9670 - DNA, 37 bp, Artificial Sequence
  Synthetic oligonucleotide
ccactactgccagtcattagtggtgatcgatacgtga

SEQ ID NO: 9671 - DNA, 35 bp, Artificial Sequence
  Synthetic oligonucleotide
cccgtaggatgaaagatctaggatgtacatggggg

SEQ ID NO: 9672 - DNA, 38 bp, Artificial Sequence
  Synthetic oligonucleotide
cctaatcttccgtgctcggacggtttctgaggacttga

SEQ ID NO: 9673 - DNA, 35 bp, Artificial Sequence
  Synthetic oligonucleotide
cctggcacatgtttcctattaactaggggcgctgc

SEQ ID NO: 9674 - DNA, 36 bp, Artificial Sequence
  Synthetic oligonucleotide
cgtaccgaacttgctaagggcatctttgtttagcta

SEQ ID NO: 9675 - DNA, 36 bp, Artificial Sequence
  Synthetic oligonucleotide
gaaatctgaccggcccacatttgaaatggactgtca

SEQ ID NO: 9676 - DNA, 35 bp, Artificial Sequence
  Synthetic oligonucleotide
gacctggcgtgtggcctgataggtataaaggtatg

SEQ ID NO: 9677 - DNA, 35 bp, Artificial Sequence
  Synthetic oligonucleotide
gatgagtctggatcatagaggcgtgtcggaaataa

SEQ ID NO: 9678 - DNA, 38 bp, Artificial Sequence
  Synthetic oligonucleotide
gattcaacaagcatcgggtgtggtggtgcgaactatga

SEQ ID NO: 9679 - DNA, 38 bp, Artificial Sequence
  Synthetic oligonucleotide
gcctgttcatgattctcctttgccgtatcctaaggtga

SEQ ID NO: 9680 - DNA, 35 bp, Artificial Sequence
  Synthetic oligonucleotide
gcgacaccagacaatcagtgcatggcctggtcatg

SEQ ID NO: 9681 - DNA, 37 bp, Artificial Sequence
  Synthetic oligonucleotide
gcttttacactactttgccaattccccgttcggtgga

SEQ ID NO: 9682 - DNA, 35 bp, Artificial Sequence
  Synthetic oligonucleotide
ggctattgatccttggagaagatgagcgggtacag

SEQ ID NO: 9683 - DNA, 36 bp, Artificial Sequence
  Synthetic oligonucleotide
gggacgcgcggatcgcggggatcgcaaggggaagga

SEQ ID NO: 9684 - DNA, 35 bp, Artificial Sequence
  Synthetic oligonucleotide
gggaggagatacatgacaattttagatccgttgcg

SEQ ID NO: 9685 - DNA, 38 bp, Artificial Sequence
  Synthetic oligonucleotide
ggtacacgcttgcttgcttttgctacctccgtagctga

SEQ ID NO: 9686 - DNA, 37 bp, Artificial Sequence
  Synthetic oligonucleotide
ggtcaaatgtaactgtcagactgcactaatcgagaga

SEQ ID NO: 9687 - DNA, 35 bp, Artificial Sequence
  Synthetic oligonucleotide
ggtcattccattagcgtgaagaaggccatggggtg

SEQ ID NO: 9688 - DNA, 32 bp, Artificial Sequence
  Synthetic oligonucleotide
ggtcattgcaaaaaagagcgacggaagtgatt

SEQ ID NO: 9689 - DNA, 37 bp, Artificial Sequence
  Synthetic oligonucleotide
ggtgaaggtactatgtcagctaacccggggacgccga

SEQ ID NO: 9690 - DNA, 35 bp, Artificial Sequence
  Synthetic oligonucleotide
ggttatgaagttctgatcgggtgtacacttccatt

SEQ ID NO: 9691 - DNA, 38 bp, Artificial Sequence
  Synthetic oligonucleotide
ggttctagattgcaggctcgcggagatagtttcgctga

SEQ ID NO: 9692 - DNA, 38 bp, Artificial Sequence
  Synthetic oligonucleotide
gtagaagtcgtgtgttcgagtgatacctgtgactatga

SEQ ID NO: 9693 - DNA, 35 bp, Artificial Sequence
  Synthetic oligonucleotide
gtcctctgaaccgggtaccctgatccttctgcctg

SEQ ID NO: 9694 - DNA, 35 bp, Artificial Sequence
  Synthetic oligonucleotide
gtgagcccttccgtctgaggtgctgctattccgta

SEQ ID NO: 9695 - DNA, 36 bp, Artificial Sequence
  Synthetic oligonucleotide
gtgagtcaacgtggagtggcttaatcaggaggttta

SEQ ID NO: 9696 - DNA, 35 bp, Artificial Sequence
  Synthetic oligonucleotide
gtgtcctagacttcttactgcatctcataatgcgc

SEQ ID NO: 9697 - DNA, 38 bp, Artificial Sequence
  Synthetic oligonucleotide
gttgcgcctcgtgggcgtgacacaggtacatcgcctga

SEQ ID NO: 9698 - DNA, 35 bp, Artificial Sequence
  Synthetic oligonucleotide
gtttaacatgagaccgcttgctccctacctatgga

SEQ ID NO: 9699 - DNA, 35 bp, Artificial Sequence
  Synthetic oligonucleotide
taaatcctgccctcccccgcctacggcaagaatat

SEQ ID NO: 9700 - DNA, 37 bp, Artificial Sequence
  Synthetic oligonucleotide
taagtgaccaccttgttcttaggtgaggcgccttgga

SEQ ID NO: 9701 - DNA, 37 bp, Artificial Sequence
  Synthetic oligonucleotide
taattacgagcgtttaaacgtccaggtcatgggatga

SEQ ID NO: 9702 - DNA, 38 bp, Artificial Sequence
  Synthetic oligonucleotide
tacacaacttttgtggttcagtggtgtagccggaatga

SEQ ID NO: 9703 - DNA, 35 bp, Artificial Sequence
  Synthetic oligonucleotide
tacgggggtatgggccgggcctgttctaatgtctg

SEQ ID NO: 9704 - DNA, 36 bp, Artificial Sequence
  Synthetic oligonucleotide
tagagttttaagcatacgagagggtattgaaggcta

SEQ ID NO: 9705 - DNA, 35 bp, Artificial Sequence
  Synthetic oligonucleotide
tatcgcaacggaatgaaatactttagagacgctag

SEQ ID NO: 9706 - DNA, 36 bp, Artificial Sequence
  Synthetic oligonucleotide
tatggaccattggggaataagagtccggttctacaa

SEQ ID NO: 9707 - DNA, 35 bp, Artificial Sequence
  Synthetic oligonucleotide
tccgcaccgctccatggacatggaggcctatctaa

SEQ ID NO: 9708 - DNA, 35 bp, Artificial Sequence
  Synthetic oligonucleotide
tccgtgctatagtcttagagaatctcatgggtcct

SEQ ID NO: 9709 - DNA, 37 bp, Artificial Sequence
  Synthetic oligonucleotide
tctacacagacacagaggcgagggcccacttgcgtga

SEQ ID NO: 9710 - DNA, 35 bp, Artificial Sequence
  Synthetic oligonucleotide
tgaaagatagagcgaaaggccctgtttacgatact

SEQ ID NO: 9711 - DNA, 35 bp, Artificial Sequence
  Synthetic oligonucleotide
tgaaccaccatgtggcttacaacgtgttccatgaa

SEQ ID NO: 9712 - DNA, 37 bp, Artificial Sequence
  Synthetic oligonucleotide
tgacgaaatctttactgtaatggccagtaaggcccga

SEQ ID NO: 9713 - DNA, 35 bp, Artificial Sequence
  Synthetic oligonucleotide
tgataaaatcgcaatataagttacggccgtaggac

SEQ ID NO: 9714 - DNA, 37 bp, Artificial Sequence
  Synthetic oligonucleotide
tgcgtctttttgaggcgagttttcctggcgcaatgga

SEQ ID NO: 9715 - DNA, 35 bp, Artificial Sequence
  Synthetic oligonucleotide
ttacacggagagctgttcaaatatgaaaaacaagg

SEQ ID NO: 9716 - DNA, 38 bp, Artificial Sequence
  Synthetic oligonucleotide
ttacggaattgggcgagactaattaggatcatatgtga

SEQ ID NO: 9717 - DNA, 36 bp, Artificial Sequence
  Synthetic oligonucleotide
ttacgtgacatggccttcagagacagttttactata

SEQ ID NO: 9718 - DNA, 36 bp, Artificial Sequence
  Synthetic oligonucleotide
ttcatactcctacgtaccgccccagacaaactagaa

SEQ ID NO: 9719 - DNA, 35 bp, Artificial Sequence
  Synthetic oligonucleotide
ttggcgtggttacccggacgggaaaaactcaagtg

SEQ ID NO: 9720 - DNA, 37 bp, Artificial Sequence
  Synthetic oligonucleotide
ttgggttactgacatgctttggactttgatccgacga

SEQ ID NO: 9721 - DNA, 38 bp, Artificial Sequence
  Synthetic oligonucleotide
ttgttgagagacctctgtgcgctatttgtcgcggatga

SEQ ID NO: 9722 - DNA, 35 bp, Artificial Sequence
  Synthetic oligonucleotide
gtcacgtacacttcaagattgtgcgatctgtacga

SEQ ID NO: 9723 - DNA, 36 bp, Artificial Sequence
  Synthetic oligonucleotide
actgaataatgagcgcgggtaacgtattcagaggca

SEQ ID NO: 9724 - DNA, 38 bp, Artificial Sequence
  Synthetic oligonucleotide
ggtggaccgaagttcgcgacgtaatgcgggaaggatga

SEQ ID NO: 9725 - DNA, 36 bp, Artificial Sequence
  Synthetic oligonucleotide
gtggggagagtcaaattaatagagcttttaatgaaa

SEQ ID NO: 9726 - DNA, 35 bp, Artificial Sequence
  Synthetic oligonucleotide
gcgactcgttcataccagcgcacaaacctagcgta

SEQ ID NO: 9727 - DNA, 35 bp, Artificial Sequence
  Synthetic oligonucleotide
aaagtgatacacagggattagtgaagcagtcacgc

SEQ ID NO: 9728 - DNA, 36 bp, Artificial Sequence
  Synthetic oligonucleotide
attgggagccgttcgcagaatagtgcgagtgggata

SEQ ID NO: 9729 - DNA, 35 bp, Artificial Sequence
  Synthetic oligonucleotide
gactcagcatgtattttaactaggcgtactgtgac

SEQ ID NO: 9730 - DNA, 38 bp, Artificial Sequence
  Synthetic oligonucleotide
tacacttcgcgctagtggagtggaagggacgaaagtga

SEQ ID NO: 9731 - DNA, 38 bp, Artificial Sequence
  Synthetic oligonucleotide
tcagtagtgaatctgtgaagctgcagtagggttaatga

SEQ ID NO: 9732 - DNA, 35 bp, Artificial Sequence
  Synthetic oligonucleotide
tgaaaaaatcaacgtctcagggcgactgtggtagt

SEQ ID NO: 9733 - DNA, 38 bp, Artificial Sequence
  Synthetic oligonucleotide
aaaaaagtcgggtttagtcgggttgttaaccagagtga

SEQ ID NO: 9734 - DNA, 35 bp, Artificial Sequence
  Synthetic oligonucleotide
aaccaccttaaaggcgcagttcacaagaacgaggg

SEQ ID NO: 9735 - DNA, 36 bp, Artificial Sequence
  Synthetic oligonucleotide
aagaattctggccgtcacaacgtaccttagcacaca

SEQ ID NO: 9736 - DNA, 35 bp, Artificial Sequence
  Synthetic oligonucleotide
aatggctactcagctctggggttgtggttttagtg

SEQ ID NO: 9737 - DNA, 35 bp, Artificial Sequence
  Synthetic oligonucleotide
acccgcaggtgtataccctgtctgcgaagtgcttt

SEQ ID NO: 9738 - DNA, 35 bp, Artificial Sequence
  Synthetic oligonucleotide
accgccattgctctacggtttagtcccttgcgtga

SEQ ID NO: 9739 - DNA, 36 bp, Artificial Sequence
  Synthetic oligonucleotide
acctcagaaaacgttacgcggacgggctaacaatca

SEQ ID NO: 9740 - DNA, 37 bp, Artificial Sequence
  Synthetic oligonucleotide
acttgggaaacagccgaactctgtctacaaagagtga

SEQ ID NO: 9741 - DNA, 37 bp, Artificial Sequence
  Synthetic oligonucleotide
agcggtacgagcatgttcacgacacagggatgggcga

SEQ ID NO: 9742 - DNA, 38 bp, Artificial Sequence
  Synthetic oligonucleotide
agggactaacgctgtttttgtaacgactcccagactga

SEQ ID NO: 9743 - DNA, 38 bp, Artificial Sequence
  Synthetic oligonucleotide
agtgctccagcgcgtttgctgggatcgctacgatttga

SEQ ID NO: 9744 - DNA, 35 bp, Artificial Sequence
  Synthetic oligonucleotide
agtgggaaattggttgcggttctgataccacaggg

SEQ ID NO: 9745 - DNA, 38 bp, Artificial Sequence
  Synthetic oligonucleotide
atcacgttacgggtagctctagctgtgcatgcgcgtga

SEQ ID NO: 9746 - DNA, 38 bp, Artificial Sequence
  Synthetic oligonucleotide
atggcaaaacgtggcattgctaacttaaagtagtatga

SEQ ID NO: 9747 - DNA, 38 bp, Artificial Sequence
  Synthetic oligonucleotide
atgggacccacaatacttatatgggatccgtactgtga

SEQ ID NO: 9748 - DNA, 37 bp, Artificial Sequence
  Synthetic oligonucleotide
cacggactgtgacttctgcatcttgctcggattgaga

SEQ ID NO: 9749 - DNA, 36 bp, Artificial Sequence
  Synthetic oligonucleotide
cacttgagcacttgactgtaccgcattctctatgaa

SEQ ID NO: 9750 - DNA, 38 bp, Artificial Sequence
  Synthetic oligonucleotide
caggcggggccaacgctaagtcttgtcactcatgatga

SEQ ID NO: 9751 - DNA, 35 bp, Artificial Sequence
  Synthetic oligonucleotide
catggataggtcgtctacgaccacggaggaatctg

SEQ ID NO: 9752 - DNA, 35 bp, Artificial Sequence
  Synthetic oligonucleotide
cgcagacgatcatgttcaaggtgtggtacctctgc

SEQ ID NO: 9753 - DNA, 35 bp, Artificial Sequence
  Synthetic oligonucleotide
cgtagatcaaacatgcagccatataggacgcttca

SEQ ID NO: 9754 - DNA, 38 bp, Artificial Sequence
  Synthetic oligonucleotide
ctaccttgaaggtaatcacatggggtcatggtacttga

SEQ ID NO: 9755 - DNA, 37 bp, Artificial Sequence
  Synthetic oligonucleotide
gaagggggtcgggccaaggctggtgattcccctctga

SEQ ID NO: 9756 - DNA, 38 bp, Artificial Sequence
  Synthetic oligonucleotide
gaatcgggaaaacgcgtaaaacagcttgtaaatgatga

SEQ ID NO: 9757 - DNA, 36 bp, Artificial Sequence
  Synthetic oligonucleotide
gaattggccctgcctctagtgaacggggtatgcgaa

SEQ ID NO: 9758 - DNA, 36 bp, Artificial Sequence
  Synthetic oligonucleotide
gacaggtgccaacgttgctgcaatgtagtctagcga

SEQ ID NO: 9759 - DNA, 35 bp, Artificial Sequence
  Synthetic oligonucleotide
gacgggtatccgatacgcaccgcattttttttcag

SEQ ID NO: 9760 - DNA, 37 bp, Artificial Sequence
  Synthetic oligonucleotide
gagacttgcgaatgtacataccagtcgggtcatgtga

SEQ ID NO: 9761 - DNA, 36 bp, Artificial Sequence
  Synthetic oligonucleotide
gagtgatgggtgctcagccgagggacggaacaggga

SEQ ID NO: 9762 - DNA, 35 bp, Artificial Sequence
  Synthetic oligonucleotide
gatggctagggtggtgtctcaaggagatagagcaa

SEQ ID NO: 9763 - DNA, 37 bp, Artificial Sequence
  Synthetic oligonucleotide
gcagacaacgtgcaggtggctcaagaattcttcgtga

SEQ ID NO: 9764 - DNA, 38 bp, Artificial Sequence
  Synthetic oligonucleotide
gcaggtggatacgctcttacccaaaggctcatcggtga

SEQ ID NO: 9765 - DNA, 35 bp, Artificial Sequence
  Synthetic oligonucleotide
gccaggtttggaccatgacatagaagggctactgc

SEQ ID NO: 9766 - DNA, 36 bp, Artificial Sequence
  Synthetic oligonucleotide
gcgctagagcactatgtacaccgccgggcacatgga

SEQ ID NO: 9767 - DNA, 35 bp, Artificial Sequence
  Synthetic oligonucleotide
gcgctatctatgggtaaggtttctgcgacggaaaa

SEQ ID NO: 9768 - DNA, 36 bp, Artificial Sequence
  Synthetic oligonucleotide
gcgcttctcagggctccctccagttaattagaatga

SEQ ID NO: 9769 - DNA, 37 bp, Artificial Sequence
  Synthetic oligonucleotide
ggtccgccgacttagatagaaaaactgaagcacgaga

SEQ ID NO: 9770 - DNA, 36 bp, Artificial Sequence
  Synthetic oligonucleotide
gtaatccatcgtgccgtttggtatgggcctaacaaa

SEQ ID NO: 9771 - DNA, 35 bp, Artificial Sequence
  Synthetic oligonucleotide
gtatcgttcgccctcgcacccggcatgtaaccgtg

SEQ ID NO: 9772 - DNA, 35 bp, Artificial Sequence
  Synthetic oligonucleotide
gtattaacaccaacatgtcttgttcacccgcgagc

SEQ ID NO: 9773 - DNA, 36 bp, Artificial Sequence
  Synthetic oligonucleotide
gtctacatcggggtctgcctgtatttctggtgtaga

SEQ ID NO: 9774 - DNA, 36 bp, Artificial Sequence
  Synthetic oligonucleotide
gtctggacaatcacacgtttcggaatcgtgcttata

SEQ ID NO: 9775 - DNA, 38 bp, Artificial Sequence
  Synthetic oligonucleotide
gtggtcaccggagtgaatgagcgaacgacccgtcctga

SEQ ID NO: 9776 - DNA, 37 bp, Artificial Sequence
  Synthetic oligonucleotide
gttatgtagatccagatcgataggaaccgtcgttgga

SEQ ID NO: 9777 - DNA, 35 bp, Artificial Sequence
  Synthetic oligonucleotide
taagggctgcatggactcatctagaacaccgcccc

SEQ ID NO: 9778 - DNA, 38 bp, Artificial Sequence
  Synthetic oligonucleotide
taagtcgaggtggaagtacgccttacctatgggagtga

SEQ ID NO: 9779 - DNA, 36 bp, Artificial Sequence
  Synthetic oligonucleotide
tactgccgtaaattatccgcggccatggtcgggtca

SEQ ID NO: 9780 - DNA, 36 bp, Artificial Sequence
  Synthetic oligonucleotide
tagattcccattgttagagcgagtacgaccccccaa

SEQ ID NO: 9781 - DNA, 36 bp, Artificial Sequence
  Synthetic oligonucleotide
tagcttcaaggctagtatcttacacaacatgggtta

SEQ ID NO: 9782 - DNA, 37 bp, Artificial Sequence
  Synthetic oligonucleotide
tataatctgccgaaatcaggatcaacgtatcatgcga

SEQ ID NO: 9783 - DNA, 37 bp, Artificial Sequence
  Synthetic oligonucleotide
tattgggaggtgcgtggcgagagcttttgtcgattga

SEQ ID NO: 9784 - DNA, 35 bp, Artificial Sequence
  Synthetic oligonucleotide
tcaaagcatctttaacgagttcatcgttcagtccg

SEQ ID NO: 9785 - DNA, 34 bp, Artificial Sequence
  Synthetic oligonucleotide
tcacacacataaggttcgacttgtgtgggttaca

SEQ ID NO: 9786 - DNA, 37 bp, Artificial Sequence
  Synthetic oligonucleotide
tcacattgaagcaaaccaggtggttcacgtgtgatga

SEQ ID NO: 9787 - DNA, 36 bp, Artificial Sequence
  Synthetic oligonucleotide
tcatgcgcccattaaggtaggtggagacatgataga

SEQ ID NO: 9788 - DNA, 38 bp, Artificial Sequence
  Synthetic oligonucleotide
tccggtaagcagtcggaagatttgagtgacgacactga

SEQ ID NO: 9789 - DNA, 36 bp, Artificial Sequence
  Synthetic oligonucleotide
tcgactatcgcctccacaacggctacgagtcatgca

SEQ ID NO: 9790 - DNA, 38 bp, Artificial Sequence
  Synthetic oligonucleotide
tcgtcatgagtggatgttgaagaggcttggaattatga

SEQ ID NO: 9791 - DNA, 36 bp, Artificial Sequence
  Synthetic oligonucleotide
tcttcgccataagcctgaacgcgcaatatgcggaaa

SEQ ID NO: 9792 - DNA, 35 bp, Artificial Sequence
  Synthetic oligonucleotide
tgagcgttggcgaaccgctccggttgctgaggttt

SEQ ID NO: 9793 - DNA, 38 bp, Artificial Sequence
  Synthetic oligonucleotide
tgcaataaagggggtagatgtaagaggtcactgactga

SEQ ID NO: 9794 - DNA, 36 bp, Artificial Sequence
  Synthetic oligonucleotide
tgcggaatgttcgaatggtcatagtgattgttatta

SEQ ID NO: 9795 - DNA, 38 bp, Artificial Sequence
  Synthetic oligonucleotide
tggagttgcttgtcaccagaaaagctgtttgtaggtga

SEQ ID NO: 9796 - DNA, 37 bp, Artificial Sequence
  Synthetic oligonucleotide
tggtctaacaatacttcatccgcgtttagccgaccga

SEQ ID NO: 9797 - DNA, 38 bp, Artificial Sequence
  Synthetic oligonucleotide
ttgaagaccctccgggtgtacttgctcaaaaggggtga

SEQ ID NO: 9798 - DNA, 37 bp, Artificial Sequence
  Synthetic oligonucleotide
ttgacggccaagctgtcagtgcttttccatttaatga

SEQ ID NO: 9799 - DNA, 35 bp, Artificial Sequence
  Synthetic oligonucleotide
ttgcgtgaaattcgaatttgcccactcgcctcctg

SEQ ID NO: 9800 - DNA, 37 bp, Artificial Sequence
  Synthetic oligonucleotide
ttgttcaagcactcatcgcgctatgactactccctga

SEQ ID NO: 9801 - DNA, 37 bp, Artificial Sequence
  Synthetic oligonucleotide
tttgaatcggggatctttgtacctattcctgactgga

SEQ ID NO: 9802 - DNA, 37 bp, Artificial Sequence
  Synthetic oligonucleotide
tttggttagcaccgtgggtgactcccggactgtatga

SEQ ID NO: 9803 - DNA, 37 bp, Artificial Sequence
  Synthetic oligonucleotide
tcatgccttataagcggcgaagttccggagctagtga

SEQ ID NO: 9804 - DNA, 35 bp, Artificial Sequence
  Synthetic oligonucleotide
aaacatgtatgcgattagatcgtggggtgcgaacg

SEQ ID NO: 9805 - DNA, 37 bp, Artificial Sequence
  Synthetic oligonucleotide
acttccaagcggtagtatgcattttgtggaggccaga

SEQ ID NO: 9806 - DNA, 36 bp, Artificial Sequence
  Synthetic oligonucleotide
acttttgaggatgagggatggagcaaaacacgtaca

SEQ ID NO: 9807 - DNA, 36 bp, Artificial Sequence
  Synthetic oligonucleotide
agagcgaggagagcatctcggagccgacgctgctta

SEQ ID NO: 9808 - DNA, 36 bp, Artificial Sequence
  Synthetic oligonucleotide
agtacgtggatcgaacccgaacagcgtttggttcga

SEQ ID NO: 9809 - DNA, 36 bp, Artificial Sequence
  Synthetic oligonucleotide
agtatgcatgttgggtaagtccccgcaaatatcaaa

SEQ ID NO: 9810 - DNA, 37 bp, Artificial Sequence
  Synthetic oligonucleotide
gcctacccaatagtactggaacgcgacacatgcgaga

SEQ ID NO: 9811 - DNA, 38 bp, Artificial Sequence
  Synthetic oligonucleotide
gtacgatttccaggggaacgagtcgtcttaggatatga

SEQ ID NO: 9812 - DNA, 35 bp, Artificial Sequence
  Synthetic oligonucleotide
tctatgggcgaaaagaactaattggagcctgggcc

SEQ ID NO: 9813 - DNA, 36 bp, Artificial Sequence
  Synthetic oligonucleotide
ttcgcattcatggactcggggccgtgttacgggcta

SEQ ID NO: 9814 - DNA, 38 bp, Artificial Sequence
  Synthetic oligonucleotide
ttgttgaacttccggtacatggggtttagcggacgtga

SEQ ID NO: 9815 - DNA, 36 bp, Artificial Sequence
  Synthetic oligonucleotide
tgtacgtgggtgttgaacgggagatccacaactcga

SEQ ID NO: 9816 - DNA, 35 bp, Artificial Sequence
  Synthetic oligonucleotide
actctatgggcgtacggaacaacgtcacctttggt

SEQ ID NO: 9817 - DNA, 35 bp, Artificial Sequence
  Synthetic oligonucleotide
agtgaattcctttcaatatacagtcccaagcgatg

SEQ ID NO: 9818 - DNA, 36 bp, Artificial Sequence
  Synthetic oligonucleotide
atctaggagacattcaagatgtagacctcagatcta

SEQ ID NO: 9819 - DNA, 35 bp, Artificial Sequence
  Synthetic oligonucleotide
gacccgggcaccacactgcaaaggctacagcctac

SEQ ID NO: 9820 - DNA, 35 bp, Artificial Sequence
  Synthetic oligonucleotide
gacgacaatccgagtagtttagtacgactagactc

SEQ ID NO: 9821 - DNA, 35 bp, Artificial Sequence
  Synthetic oligonucleotide
gcaggaatgacttaggacaaactaagcatcagaga

SEQ ID NO: 9822 - DNA, 35 bp, Artificial Sequence
  Synthetic oligonucleotide
ggactgccgatgatagggaataagtctaggcccat

SEQ ID NO: 9823 - DNA, 35 bp, Artificial Sequence
  Synthetic oligonucleotide
gggacgcttaaaccccagtcatgtagggcgaacac

SEQ ID NO: 9824 - DNA, 37 bp, Artificial Sequence
  Synthetic oligonucleotide
gtaaggagtcatagcgtaatttagactttagtcagga

SEQ ID NO: 9825 - DNA, 37 bp, Artificial Sequence
  Synthetic oligonucleotide
gttagggaggcacagcacacgcgtaaaaggtaataga

SEQ ID NO: 9826 - DNA, 37 bp, Artificial Sequence
  Synthetic oligonucleotide
taactgcggggctggtttttccgtagggggaaataga

SEQ ID NO: 9827 - DNA, 37 bp, Artificial Sequence
  Synthetic oligonucleotide
taaggttggtcccaggattctacagagttccgtaaga

SEQ ID NO: 9828 - DNA, 35 bp, Artificial Sequence
  Synthetic oligonucleotide
taattctcgcggatcgtggagacgtatctatttaa

SEQ ID NO: 9829 - DNA, 38 bp, Artificial Sequence
  Synthetic oligonucleotide
tagtataatcgagcgtctcccgtgttcacggaatatga

SEQ ID NO: 9830 - DNA, 35 bp, Artificial Sequence
  Synthetic oligonucleotide
tcccccagcttagttgctcggttacgttcacggtt

SEQ ID NO: 9831 - DNA, 36 bp, Artificial Sequence
  Synthetic oligonucleotide
tcctcattccttcgtattggtaagtaaagcatcgta

SEQ ID NO: 9832 - DNA, 35 bp, Artificial Sequence
  Synthetic oligonucleotide
tgtcgcagttgagggaactttcgcgcttgaagtgc

SEQ ID NO: 9833 - DNA, 37 bp, Artificial Sequence
  Synthetic oligonucleotide
ttacatacatcaggtcaggaacactcaaccttggaga

SEQ ID NO: 9834 - DNA, 36 bp, Artificial Sequence
  Synthetic oligonucleotide
gatgggccaggtatttaatacttggggatgagtaca

SEQ ID NO: 9835 - DNA, 35 bp, Artificial Sequence
  Synthetic oligonucleotide
accggacctcggtcggaactgcgttaggaatggga

SEQ ID NO: 9836 - DNA, 37 bp, Artificial Sequence
  Synthetic oligonucleotide
tgtagagtagtgagacgtattctgtgtggttctagga

SEQ ID NO: 9837 - DNA, 35 bp, Artificial Sequence
  Synthetic oligonucleotide
aacaagagcggtgcaggtttctggcacactacttc

SEQ ID NO: 9838 - DNA, 38 bp, Artificial Sequence
  Synthetic oligonucleotide
acagcccggtaggcgtttgtggttctgttatgctctga

SEQ ID NO: 9839 - DNA, 35 bp, Artificial Sequence
  Synthetic oligonucleotide
agtcatgtggtaggttggataccgaatccggcgta

SEQ ID NO: 9840 - DNA, 35 bp, Artificial Sequence
  Synthetic oligonucleotide
agtccaatacgtacaaatgttgcgaccacaattct

SEQ ID NO: 9841 - DNA, 37 bp, Artificial Sequence
  Synthetic oligonucleotide
atgaataatgcgcgcatgggtattcacctacattcga

SEQ ID NO: 9842 - DNA, 35 bp, Artificial Sequence
  Synthetic oligonucleotide
atgacaagatcggactagtctctatcaaggatggg

SEQ ID NO: 9843 - DNA, 36 bp, Artificial Sequence
  Synthetic oligonucleotide
atgtacatgcgctcgcggtctttatctcgttctaga

SEQ ID NO: 9844 - DNA, 36 bp, Artificial Sequence
  Synthetic oligonucleotide
attaccctcagtaagtgaggcggggattattccgga

SEQ ID NO: 9845 - DNA, 36 bp, Artificial Sequence
  Synthetic oligonucleotide
cctgcaacattattcggaggataattgcaggaccta

SEQ ID NO: 9846 - DNA, 35 bp, Artificial Sequence
  Synthetic oligonucleotide
ctaggaatgttgtgatatgaggtctatgagcgtgt

SEQ ID NO: 9847 - DNA, 36 bp, Artificial Sequence
  Synthetic oligonucleotide
gaaactttacgctgactggtcgaagtcagcatagaa

SEQ ID NO: 9848 - DNA, 38 bp, Artificial Sequence
  Synthetic oligonucleotide
gaacacgataataatgcgtggacggatgacggacctga

SEQ ID NO: 9849 - DNA, 36 bp, Artificial Sequence
  Synthetic oligonucleotide
gaaggcttaccaaaagcgtgaatgagataggtcaga

SEQ ID NO: 9850 - DNA, 37 bp, Artificial Sequence
  Synthetic oligonucleotide
gaagggtactatagggtactgacaggttacagggcga

SEQ ID NO: 9851 - DNA, 35 bp, Artificial Sequence
  Synthetic oligonucleotide
ggacgagtattcaccgatcgagttttagatgaggg

SEQ ID NO: 9852 - DNA, 35 bp, Artificial Sequence
  Synthetic oligonucleotide
ggatcttggggagaccacgtcgatccaggcgtgag

SEQ ID NO: 9853 - DNA, 36 bp, Artificial Sequence
  Synthetic oligonucleotide
gggactcacgtgagggcttcgaccgtacgaaagtga

SEQ ID NO: 9854 - DNA, 37 bp, Artificial Sequence
  Synthetic oligonucleotide
gtgaacagccggagccattccaacggatatcttgcga

SEQ ID NO: 9855 - DNA, 35 bp, Artificial Sequence
  Synthetic oligonucleotide
gttctgcaggcatgttggtcacaatgggtttcgac

SEQ ID NO: 9856 - DNA, 36 bp, Artificial Sequence
  Synthetic oligonucleotide
tccggcttcgttgcggagcgccaaagaaatcacgga

SEQ ID NO: 9857 - DNA, 38 bp, Artificial Sequence
  Synthetic oligonucleotide
ttgtccgaccgaatggagtaagcaagcgatgtttctga

SEQ ID NO: 9858 - DNA, 37 bp, Artificial Sequence
  Synthetic oligonucleotide
accgtcctagcgaccgccaaggtgccttaggtcttga

SEQ ID NO: 9859 - DNA, 35 bp, Artificial Sequence
  Synthetic oligonucleotide
gctgtctgaggacacggtctcatataagtttccat

SEQ ID NO: 9860 - DNA, 36 bp, Artificial Sequence
  Synthetic oligonucleotide
aaccaacagaggcatcatgttataggtaaatgataa

SEQ ID NO: 9861 - DNA, 35 bp, Artificial Sequence
  Synthetic oligonucleotide
aactcgttagtgaagcatatacgtggggttatcgt

SEQ ID NO: 9862 - DNA, 37 bp, Artificial Sequence
  Synthetic oligonucleotide
aatgcagataagtcaaatcgtagggtgtcagggggga

SEQ ID NO: 9863 - DNA, 38 bp, Artificial Sequence
  Synthetic oligonucleotide
actaccctgctatgccaacaagcagtaggtcgtactga

SEQ ID NO: 9864 - DNA, 35 bp, Artificial Sequence
  Synthetic oligonucleotide
agactaaggcccgaaggctaacgttgtatgtaata

SEQ ID NO: 9865 - DNA, 35 bp, Artificial Sequence
  Synthetic oligonucleotide
aggggctagaacccgagattgagtacatgagccac

SEQ ID NO: 9866 - DNA, 35 bp, Artificial Sequence
  Synthetic oligonucleotide
agtgtacagttttgtgttcgctgtagtgctgcatg

SEQ ID NO: 9867 - DNA, 35 bp, Artificial Sequence
  Synthetic oligonucleotide
ctaccagatcggggcaagacgctacttgcagttgg

SEQ ID NO: 9868 - DNA, 36 bp, Artificial Sequence
  Synthetic oligonucleotide
gaaacgtacttcacacggggttctgtaaggggtcca

SEQ ID NO: 9869 - DNA, 37 bp, Artificial Sequence
  Synthetic oligonucleotide
gcattattaggatagcccttcctttggcgtctaggga

SEQ ID NO: 9870 - DNA, 36 bp, Artificial Sequence
  Synthetic oligonucleotide
ggactgtggcgcattagacgataatgttttgttgga

SEQ ID NO: 9871 - DNA, 36 bp, Artificial Sequence
  Synthetic oligonucleotide
ggagacagtccatgccggaaattttaagggaatgta

SEQ ID NO: 9872 - DNA, 38 bp, Artificial Sequence
  Synthetic oligonucleotide
gtctttccgatacggacttggcgatatcgaggtagtga

SEQ ID NO: 9873 - DNA, 35 bp, Artificial Sequence
  Synthetic oligonucleotide
gtttcagacttttgccaattgcggatagtagcatg

SEQ ID NO: 9874 - DNA, 35 bp, Artificial Sequence
  Synthetic oligonucleotide
taagtccctagtttcagacgtgctcgggtacggta

SEQ ID NO: 9875 - DNA, 38 bp, Artificial Sequence
  Synthetic oligonucleotide
tacaggaatgtccgcggtgttactatagttttgtgtga

SEQ ID NO: 9876 - DNA, 35 bp, Artificial Sequence
  Synthetic oligonucleotide
tacgaaggaagtagtcatgacagtagattgacgac

SEQ ID NO: 9877 - DNA, 35 bp, Artificial Sequence
  Synthetic oligonucleotide
tagccacttggtaaagtgttaatctttgcagtgtg

SEQ ID NO: 9878 - DNA, 37 bp, Artificial Sequence
  Synthetic oligonucleotide
taggaacggcatcacacattattgattgttgaggaga

SEQ ID NO: 9879 - DNA, 38 bp, Artificial Sequence
  Synthetic oligonucleotide
tcaccgaacgatttggagaataatgaagccttgcttga

SEQ ID NO: 9880 - DNA, 35 bp, Artificial Sequence
  Synthetic oligonucleotide
tgacggcgacagttatttgatatcgcgatgagcag

SEQ ID NO: 9881 - DNA, 35 bp, Artificial Sequence
  Synthetic oligonucleotide
tgagctgttcactactttacggattgtggctgtgc

SEQ ID NO: 9882 - DNA, 37 bp, Artificial Sequence
  Synthetic oligonucleotide
tgcaagccaccgtggctatgtggggctaggtcaacga

SEQ ID NO: 9883 - DNA, 37 bp, Artificial Sequence
  Synthetic oligonucleotide
tccgcagaaacatattctggtacgtactgctggaaga

SEQ ID NO: 9884 - DNA, 36 bp, Artificial Sequence
  Synthetic oligonucleotide
actttaggtacgagctgtttggctaggaagttgata

SEQ ID NO: 9885 - DNA, 38 bp, Artificial Sequence
  Synthetic oligonucleotide
gaccaccggccatatcgcttaaactccagtctgcttga

SEQ ID NO: 9886 - DNA, 36 bp, Artificial Sequence
  Synthetic oligonucleotide
tgacccgtcccgtggattactgccgggaagctcgta

SEQ ID NO: 9887 - DNA, 38 bp, Artificial Sequence
  Synthetic oligonucleotide
aaaggtaggtctccgggagagatccttcatgcttttga

SEQ ID NO: 9888 - DNA, 37 bp, Artificial Sequence
  Synthetic oligonucleotide
aaatcgctaggtgagagtcatacttggggttgtgtga

SEQ ID NO: 9889 - DNA, 38 bp, Artificial Sequence
  Synthetic oligonucleotide
acactcagtcgaagattaggagagtacggcgtacttga

SEQ ID NO: 9890 - DNA, 35 bp, Artificial Sequence
  Synthetic oligonucleotide
actggacctgatctacgcacgacgtggggttcaag

SEQ ID NO: 9891 - DNA, 35 bp, Artificial Sequence
  Synthetic oligonucleotide
agtctacatttactagtgcgaaccaatggactagg

SEQ ID NO: 9892 - DNA, 35 bp, Artificial Sequence
  Synthetic oligonucleotide
cacattgaaacatgaatcagtcggacgtccgtttc

SEQ ID NO: 9893 - DNA, 37 bp, Artificial Sequence
  Synthetic oligonucleotide
gaacaggtcgcgttttattaggctgtatcatgttaga

SEQ ID NO: 9894 - DNA, 35 bp, Artificial Sequence
  Synthetic oligonucleotide
gatacccctgtgcgctcatttgagtcaaaatagtg

SEQ ID NO: 9895 - DNA, 36 bp, Artificial Sequence
  Synthetic oligonucleotide
gatgaggaggtacgagctctaagacaaatggttcca

SEQ ID NO: 9896 - DNA, 38 bp, Artificial Sequence
  Synthetic oligonucleotide
gccatggcctagggagtggggtctcttaagggttatga

SEQ ID NO: 9897 - DNA, 37 bp, Artificial Sequence
  Synthetic oligonucleotide
gctaaactactgccgtaaatggtaaggttttctgtga

SEQ ID NO: 9898 - DNA, 35 bp, Artificial Sequence
  Synthetic oligonucleotide
gctgggaattgacccatcacctttcgtagtcttgt

SEQ ID NO: 9899 - DNA, 37 bp, Artificial Sequence
  Synthetic oligonucleotide
ggacggtaagacattttatcccgtgcacatggattga

SEQ ID NO: 9900 - DNA, 36 bp, Artificial Sequence
  Synthetic oligonucleotide
ggccctcatgacaaataagagcgagggaatcggtaa

SEQ ID NO: 9901 - DNA, 36 bp, Artificial Sequence
  Synthetic oligonucleotide
ggggtggatacgggtcatgatcagtttgcggggtaa

SEQ ID NO: 9902 - DNA, 35 bp, Artificial Sequence
  Synthetic oligonucleotide
ggggtggtagtaggatccgcgccgtccttctttag

SEQ ID NO: 9903 - DNA, 35 bp, Artificial Sequence
  Synthetic oligonucleotide
gttgtcgaccatgagccgctgttgagaagggattt

SEQ ID NO: 9904 - DNA, 37 bp, Artificial Sequence
  Synthetic oligonucleotide
taaaagggtagtcgcgagagccttaacgtcatactga

SEQ ID NO: 9905 - DNA, 37 bp, Artificial Sequence
  Synthetic oligonucleotide
taatctgtaggtaaagggctgtttagggaatctaaga

SEQ ID NO: 9906 - DNA, 38 bp, Artificial Sequence
  Synthetic oligonucleotide
tccggattttgagatgcgggaggtggaacgaatggtga

SEQ ID NO: 9907 - DNA, 37 bp, Artificial Sequence
  Synthetic oligonucleotide
tgaccccgcgggcatatgatttggtgcccaagacgga

SEQ ID NO: 9908 - DNA, 36 bp, Artificial Sequence
  Synthetic oligonucleotide
tgcattgaactaccagttctaccatcacgttatcga

SEQ ID NO: 9909 - DNA, 38 bp, Artificial Sequence
  Synthetic oligonucleotide
tgttcaaatccttcgaatggaatcgaagggagacctga

SEQ ID NO: 9910 - DNA, 37 bp, Artificial Sequence
  Synthetic oligonucleotide
tgtttccagatgcgcgatttaatccgcaatgccacga

SEQ ID NO: 9911 - DNA, 37 bp, Artificial Sequence
  Synthetic oligonucleotide
ttagatccagacagatgtaccctgcatggaaatggga

SEQ ID NO: 9912 - DNA, 35 bp, Artificial Sequence
  Synthetic oligonucleotide
ttcccgggatcttcaccgttctacgtcaatccttt

SEQ ID NO: 9913 - DNA, 35 bp, Artificial Sequence
  Synthetic oligonucleotide
ttgttccactcgcgtcggaacacgtccgtgctagt

SEQ ID NO: 9914 - DNA, 37 bp, Artificial Sequence
  Synthetic oligonucleotide
tttccgccagacttgttcgccgcagcccggcccggga

SEQ ID NO: 9915 - DNA, 38 bp, Artificial Sequence
  Synthetic oligonucleotide
tttgctgttgctcccctgcacttttgtccaccgattga

SEQ ID NO: 9916 - DNA, 38 bp, Artificial Sequence
  Synthetic oligonucleotide
gttcatcgtaggtcctgggcacttaaacaccggactga

SEQ ID NO: 9917 - DNA, 35 bp, Artificial Sequence
  Synthetic oligonucleotide
agttggagccttgtagggggaggatgcatatagcg

SEQ ID NO: 9918 - DNA, 38 bp, Artificial Sequence
  Synthetic oligonucleotide
agaacgtacttgtagtaaaggcactatgaagtgggtga

SEQ ID NO: 9919 - DNA, 37 bp, Artificial Sequence
  Synthetic oligonucleotide
aattgagaacgtggaaagacgcaattctgattactga

SEQ ID NO: 9920 - DNA, 35 bp, Artificial Sequence
  Synthetic oligonucleotide
acgcaacataagcaaaggaatcggactaacagcgc

SEQ ID NO: 9921 - DNA, 37 bp, Artificial Sequence
  Synthetic oligonucleotide
gagtcatggggtcaggtgttagtcttaggagtaagga

SEQ ID NO: 9922 - DNA, 38 bp, Artificial Sequence
  Synthetic oligonucleotide
gtatcgttgtacgttgaggcggtttatcctatgactga

SEQ ID NO: 9923 - DNA, 37 bp, Artificial Sequence
  Synthetic oligonucleotide
gtgatagagtttatgcttgtattttgtgcgcactaga

SEQ ID NO: 9924 - DNA, 35 bp, Artificial Sequence
  Synthetic oligonucleotide
tccgtcacgtagttgggcaattgtctcgttgaaaa

SEQ ID NO: 9925 - DNA, 37 bp, Artificial Sequence
  Synthetic oligonucleotide
gttagcatggggtccatagctccactagtaaagccga

SEQ ID NO: 9926 - DNA, 36 bp, Artificial Sequence
  Synthetic oligonucleotide
aaactttagccaggacggtctggggcgtgcgaagta

SEQ ID NO: 9927 - DNA, 35 bp, Artificial Sequence
  Synthetic oligonucleotide
aacacacgggcttattaaagtagctacacttagaa

SEQ ID NO: 9928 - DNA, 36 bp, Artificial Sequence
  Synthetic oligonucleotide
aatgacataaacaagaattccgagtgcgttgtgata

SEQ ID NO: 9929 - DNA, 35 bp, Artificial Sequence
  Synthetic oligonucleotide
aatgcttcattgttttgaaacggggttctttggtc

SEQ ID NO: 9930 - DNA, 38 bp, Artificial Sequence
  Synthetic oligonucleotide
aattctagcgatgtcgatgatctttagatgggctatga

SEQ ID NO: 9931 - DNA, 37 bp, Artificial Sequence
  Synthetic oligonucleotide
acagatttcggtacgagattctatcagtgcaaggaga

SEQ ID NO: 9932 - DNA, 35 bp, Artificial Sequence
  Synthetic oligonucleotide
accatttgaggtgtctttaatacacgtactaactt

SEQ ID NO: 9933 - DNA, 35 bp, Artificial Sequence
  Synthetic oligonucleotide
accgacaccatgcacagtgccagacagtatagggg

SEQ ID NO: 9934 - DNA, 37 bp, Artificial Sequence
  Synthetic oligonucleotide
acttggtaacatatcagtcctagttaaggagaacgga

SEQ ID NO: 9935 - DNA, 35 bp, Artificial Sequence
  Synthetic oligonucleotide
agcgttaataatgctttcacaggttcttacccatg

SEQ ID NO: 9936 - DNA, 38 bp, Artificial Sequence
  Synthetic oligonucleotide
agcttcccagcccggaatcgtaactggttattatatga

SEQ ID NO: 9937 - DNA, 35 bp, Artificial Sequence
  Synthetic oligonucleotide
ataagggacccaaacgaatgagagaaagatgcgtc

SEQ ID NO: 9938 - DNA, 38 bp, Artificial Sequence
  Synthetic oligonucleotide
atagaaacgctcccgtgaaggtacgacagacaaggtga

SEQ ID NO: 9939 - DNA, 38 bp, Artificial Sequence
  Synthetic oligonucleotide
atcctaccctgcacccaatcgagtggggtgaccactga

SEQ ID NO: 9940 - DNA, 38 bp, Artificial Sequence
  Synthetic oligonucleotide
atcggggcaatcgcaagtgtgacgccgcgctccggtga

SEQ ID NO: 9941 - DNA, 35 bp, Artificial Sequence
  Synthetic oligonucleotide
atggtagtaggcgtattcatttacaaggatttgct

SEQ ID NO: 9942 - DNA, 35 bp, Artificial Sequence
  Synthetic oligonucleotide
cgactgccgccgacgccaccactctggtgcgctgt

SEQ ID NO: 9943 - DNA, 36 bp, Artificial Sequence
  Synthetic oligonucleotide
gaaatgtcgtactcgcacttatgtattcactgtata

SEQ ID NO: 9944 - DNA, 38 bp, Artificial Sequence
  Synthetic oligonucleotide
gatccggtggggtcatgccaaagccctccgtacgttga

SEQ ID NO: 9945 - DNA, 37 bp, Artificial Sequence
  Synthetic oligonucleotide
gatgcggaagcttatttaaggtgtccgcttgttgcga

SEQ ID NO: 9946 - DNA, 38 bp, Artificial Sequence
  Synthetic oligonucleotide
gcctagctgcgattccagggagaaggtggcttggctga

SEQ ID NO: 9947 - DNA, 38 bp, Artificial Sequence
  Synthetic oligonucleotide
gcctcaatgggacgactgccagccggacatcattctga

SEQ ID NO: 9948 - DNA, 38 bp, Artificial Sequence
  Synthetic oligonucleotide
gcgcgacttcctccacgagattgcaccgggctaggtga

SEQ ID NO: 9949 - DNA, 37 bp, Artificial Sequence
  Synthetic oligonucleotide
gcgtaattactccgttactagcgcatgtgctccggga

SEQ ID NO: 9950 - DNA, 35 bp, Artificial Sequence
  Synthetic oligonucleotide
ggaaggatagacagaacatcgctttcaagttcagg

SEQ ID NO: 9951 - DNA, 36 bp, Artificial Sequence
  Synthetic oligonucleotide
ggactgctgagcattttcgaatgagacttagtgaaa

SEQ ID NO: 9952 - DNA, 35 bp, Artificial Sequence
  Synthetic oligonucleotide
ggcgccgagcgttacacagttgatcaggccacgtg

SEQ ID NO: 9953 - DNA, 35 bp, Artificial Sequence
  Synthetic oligonucleotide
gggtcgtaacggggtgacatgcgacgtacggctac

SEQ ID NO: 9954 - DNA, 37 bp, Artificial Sequence
  Synthetic oligonucleotide
gtaacgggaactaaagatcagcgagaccgcccgttga

SEQ ID NO: 9955 - DNA, 35 bp, Artificial Sequence
  Synthetic oligonucleotide
gtaggcgtactaaatccacaattaggttgtatctg

SEQ ID NO: 9956 - DNA, 37 bp, Artificial Sequence
  Synthetic oligonucleotide
gtcgagcgataaaggatagtctcgaagaacgacagga

SEQ ID NO: 9957 - DNA, 38 bp, Artificial Sequence
  Synthetic oligonucleotide
gtgttttggattgtattggctaggcgatcatcggttga

SEQ ID NO: 9958 - DNA, 38 bp, Artificial Sequence
  Synthetic oligonucleotide
gttttacgtcacgcagtccgtatagcgaacctcattga

SEQ ID NO: 9959 - DNA, 38 bp, Artificial Sequence
  Synthetic oligonucleotide
tagcgcgcgttcagttataaagtaacttgattacgtga

SEQ ID NO: 9960 - DNA, 38 bp, Artificial Sequence
  Synthetic oligonucleotide
tgaagcacgcctagccacccgattgaagctcgtcctga

SEQ ID NO: 9961 - DNA, 37 bp, Artificial Sequence
  Synthetic oligonucleotide
tgaatccacgtacactgtgaagcataattcacgaaga

SEQ ID NO: 9962 - DNA, 36 bp, Artificial Sequence
  Synthetic oligonucleotide
tgcatagggcccaaatcgtaccggtatccgtttgga

SEQ ID NO: 9963 - DNA, 35 bp, Artificial Sequence
  Synthetic oligonucleotide
tttcacgtggagacccgttcggggctgactccagc

SEQ ID NO: 9964 - DNA, 35 bp, Artificial Sequence
  Synthetic oligonucleotide
tttccactgaacatgttgcggtcaagatcgagcca

SEQ ID NO: 9965 - DNA, 38 bp, Artificial Sequence
  Synthetic oligonucleotide
agttacgccctgggttcaggtcatttacggtactgtga

SEQ ID NO: 9966 - DNA, 36 bp, Artificial Sequence
  Synthetic oligonucleotide
agcggagccgagaatatcaatagtcatggtggtcca

SEQ ID NO: 9967 - DNA, 37 bp, Artificial Sequence
  Synthetic oligonucleotide
gctccaggtgctgtgaacgacctacgtcgtcatcaga

SEQ ID NO: 9968 - DNA, 36 bp, Artificial Sequence
  Synthetic oligonucleotide
gctgaggttgaggagaggaaccccaactgttgagta

SEQ ID NO: 9969 - DNA, 35 bp, Artificial Sequence
  Synthetic oligonucleotide
atggagtgcccggctcaaaatcaaacggacatata

SEQ ID NO: 9970 - DNA, 37 bp, Artificial Sequence
  Synthetic oligonucleotide
gattcacgaatgtaattagactgaagtcaattgatga

SEQ ID NO: 9971 - DNA, 37 bp, Artificial Sequence
  Synthetic oligonucleotide
tctaggtcctgcactataaggcggaactctattacga

SEQ ID NO: 9972 - DNA, 36 bp, Artificial Sequence
  Synthetic oligonucleotide
agtagcactccgtgaggaggtccagcaggtaatcta

SEQ ID NO: 9973 - DNA, 28 bp, Artificial Sequence
  Synthetic oligonucleotide
atagggctacagtatcaggtaagtcaca

SEQ ID NO: 9974 - DNA, 37 bp, Artificial Sequence
  Synthetic oligonucleotide
attgtcgatacccatgttccaatgttacgtatgctga

SEQ ID NO: 9975 - DNA, 35 bp, Artificial Sequence
  Synthetic oligonucleotide
ggtgccctggagacagcaataatacaggtctacct

SEQ ID NO: 9976 - DNA, 36 bp, Artificial Sequence
  Synthetic oligonucleotide
gtcatggatcggaggggacagactggaaagtcggga

SEQ ID NO: 9977 - DNA, 36 bp, Artificial Sequence
  Synthetic oligonucleotide
tactgtttacgccgaggtagcccttcttcggagtta

SEQ ID NO: 9978 - DNA, 36 bp, Artificial Sequence
  Synthetic oligonucleotide
tcttgctctcacaagacacgtcgttaggaatccgga

SEQ ID NO: 9979 - DNA, 38 bp, Artificial Sequence
  Synthetic oligonucleotide
tgagtattgcacgtcgagatcgagtgaaggggtactga

SEQ ID NO: 9980 - DNA, 37 bp, Artificial Sequence
  Synthetic oligonucleotide
tgcaagaaacttattgagatgagggttcgttcaacga

SEQ ID NO: 9981 - DNA, 37 bp, Artificial Sequence
  Synthetic oligonucleotide
ttgcgttcttgagtagtttagcacgagttcaaacaga

SEQ ID NO: 9982 - DNA, 35 bp, Artificial Sequence
  Synthetic oligonucleotide
atgtacgtaggtatgttttaccttgaaagtggtta

SEQ ID NO: 9983 - DNA, 37 bp, Artificial Sequence
  Synthetic oligonucleotide
gactcaccgctgcgggtatatcgctagtctgtcttga

SEQ ID NO: 9984 - DNA, 36 bp, Artificial Sequence
  Synthetic oligonucleotide
agcttttccaccccccacgcggttcgtatagaagga

SEQ ID NO: 9985 - DNA, 36 bp, Artificial Sequence
  Synthetic oligonucleotide
agtcgagctggctctcgctcatgtgtaatacagtga

SEQ ID NO: 9986 - DNA, 36 bp, Artificial Sequence
  Synthetic oligonucleotide
gtcatgcaagatatgcagtgtgacggactacaaaga

SEQ ID NO: 9987 - DNA, 38 bp, Artificial Sequence
  Synthetic oligonucleotide
aaaagaggcaccaacgttctaacgggggtattaaatga

SEQ ID NO: 9988 - DNA, 36 bp, Artificial Sequence
  Synthetic oligonucleotide
aaactcacgggcactcggttcttttatacccacaaa

SEQ ID NO: 9989 - DNA, 37 bp, Artificial Sequence
  Synthetic oligonucleotide
aaagtagcggctcatcgatactctacccttctaggga

SEQ ID NO: 9990 - DNA, 37 bp, Artificial Sequence
  Synthetic oligonucleotide
aacgcgggggtctcaacagaaggatatgcgaggcgga

SEQ ID NO: 9991 - DNA, 38 bp, Artificial Sequence
  Synthetic oligonucleotide
aacgtattaattgatatgggtccggttcaagtttttga

SEQ ID NO: 9992 - DNA, 36 bp, Artificial Sequence
  Synthetic oligonucleotide
acctgcgttagtaggtcgcctcaccgtaagacggaa

SEQ ID NO: 9993 - DNA, 37 bp, Artificial Sequence
  Synthetic oligonucleotide
acgacggacccaatgaggtgctctcttctaccttaga

SEQ ID NO: 9994 - DNA, 38 bp, Artificial Sequence
  Synthetic oligonucleotide
agctgaatggtacccgtcttgcaatatgcataaagcga

SEQ ID NO: 9995 - DNA, 38 bp, Artificial Sequence
  Synthetic oligonucleotide
agtacggtttgttgcacattatcgtgggggtgctatga

SEQ ID NO: 9996 - DNA, 35 bp, Artificial Sequence
  Synthetic oligonucleotide
agtgcactgcgaaccctagaacggtaatgatcggc

SEQ ID NO: 9997 - DNA, 36 bp, Artificial Sequence
  Synthetic oligonucleotide
atagtagggcaccatgtgattagcggtcaaacatca

SEQ ID NO: 9998 - DNA, 37 bp, Artificial Sequence
  Synthetic oligonucleotide
atcttagaatagcctagacgtaccgcggtgggtgtga

SEQ ID NO: 9999 - DNA, 36 bp, Artificial Sequence
  Synthetic oligonucleotide
atgtttcctcgtgcgtattccaacctgttatgggta

SEQ ID NO: 10000 - DNA, 37 bp, Artificial Sequence
  Synthetic oligonucleotide
catgactttgtagttaagggaaaatgctttccattga

SEQ ID NO: 10001 - DNA, 35 bp, Artificial Sequence
  Synthetic oligonucleotide
gaacaggtggaggcgctcgaagatggtgcctgatg

SEQ ID NO: 10002 - DNA, 37 bp, Artificial Sequence
  Synthetic oligonucleotide
gacatgcttacccagtctacgcgacagacgcccaaga

SEQ ID NO: 10003 - DNA, 37 bp, Artificial Sequence
  Synthetic oligonucleotide
gacgcctcgggttggttaaggcaaagatgtgtgccga

SEQ ID NO: 10004 - DNA, 37 bp, Artificial Sequence
  Synthetic oligonucleotide
gagccaactgggcttggagaggtttttcggtgatcga

SEQ ID NO: 10005 - DNA, 37 bp, Artificial Sequence
  Synthetic oligonucleotide
gagcccttacactttaggctgtagactgcggttatga

SEQ ID NO: 10006 - DNA, 38 bp, Artificial Sequence
  Synthetic oligonucleotide
gattcgagatgcctcagtatgtcacccatgggatatga

SEQ ID NO: 10007 - DNA, 36 bp, Artificial Sequence
  Synthetic oligonucleotide
gcccattccttacttgtcgatgtgcacttaacctta

SEQ ID NO: 10008 - DNA, 35 bp, Artificial Sequence
  Synthetic oligonucleotide
gcgaacatcgtggcaacttgtactattgtaaggcc

SEQ ID NO: 10009 - DNA, 35 bp, Artificial Sequence
  Synthetic oligonucleotide
gcgggcattttcgctgtacctgcagaggatgacga

SEQ ID NO: 10010 - DNA, 37 bp, Artificial Sequence
  Synthetic oligonucleotide
gctactgtgcgtgatcacgcctcagaggaatggatga

SEQ ID NO: 10011 - DNA, 37 bp, Artificial Sequence
  Synthetic oligonucleotide
ggacggagtattcactcactgatgagccaatacggga

SEQ ID NO: 10012 - DNA, 36 bp, Artificial Sequence
  Synthetic oligonucleotide
ggccgtggcactttaacgactgtgggccccccaata

SEQ ID NO: 10013 - DNA, 35 bp, Artificial Sequence
  Synthetic oligonucleotide
ggggaccactttgacctgaaatcatccttaagagc

SEQ ID NO: 10014 - DNA, 36 bp, Artificial Sequence
  Synthetic oligonucleotide
ggtacgattgttggcggggagtgcacatcctgctga

SEQ ID NO: 10015 - DNA, 37 bp, Artificial Sequence
  Synthetic oligonucleotide
gtaattctacaaatattggtgcagaacaatcctacga

SEQ ID NO: 10016 - DNA, 37 bp, Artificial Sequence
  Synthetic oligonucleotide
gtagatcaagagctttttgcagtagtatgcagagcga

SEQ ID NO: 10017 - DNA, 35 bp, Artificial Sequence
  Synthetic oligonucleotide
gtaggaggtcctggagttccaggtgtcccatgtgg

SEQ ID NO: 10018 - DNA, 37 bp, Artificial Sequence
  Synthetic oligonucleotide
gtcccctggtccttaagtcagctagaagctgggtaga

SEQ ID NO: 10019 - DNA, 37 bp, Artificial Sequence
  Synthetic oligonucleotide
gtctgcggacgctctatcaccgtagggtgtatacgga

SEQ ID NO: 10020 - DNA, 36 bp, Artificial Sequence
  Synthetic oligonucleotide
gttccaaggtcatttgttcctccgatagacttttta

SEQ ID NO: 10021 - DNA, 38 bp, Artificial Sequence
  Synthetic oligonucleotide
taatgagtgcgatctcaataacgtcttctgtcgattga

SEQ ID NO: 10022 - DNA, 36 bp, Artificial Sequence
  Synthetic oligonucleotide
taccccgttgacccccactccctgtatggagccgca

SEQ ID NO: 10023 - DNA, 37 bp, Artificial Sequence
  Synthetic oligonucleotide
taccttcggatcgaggtgacgtataaaggatggaaga

SEQ ID NO: 10024 - DNA, 36 bp, Artificial Sequence
  Synthetic oligonucleotide
tatactgttgtgcaagtctgtagtccattacccgta

SEQ ID NO: 10025 - DNA, 35 bp, Artificial Sequence
  Synthetic oligonucleotide
tcattgactacaggcgcataaggtaactactgtgt

SEQ ID NO: 10026 - DNA, 37 bp, Artificial Sequence
  Synthetic oligonucleotide
tccccccggatggagttagcgctgacgcgaccaatga

SEQ ID NO: 10027 - DNA, 36 bp, Artificial Sequence
  Synthetic oligonucleotide
tcttactttgtgactgtgcttcctgatggtcaatga

SEQ ID NO: 10028 - DNA, 37 bp, Artificial Sequence
  Synthetic oligonucleotide
tgacaaatatcaccgtgatccagctaggtagatacga

SEQ ID NO: 10029 - DNA, 35 bp, Artificial Sequence
  Synthetic oligonucleotide
tgacggtgaaaattctatttagtagcacgattgcg

SEQ ID NO: 10030 - DNA, 36 bp, Artificial Sequence
  Synthetic oligonucleotide
tgagtggccatatgtcggagatttgcacgcctagaa

SEQ ID NO: 10031 - DNA, 37 bp, Artificial Sequence
  Synthetic oligonucleotide
tgccctcctcaatgcaattgtagttttccactccgga

SEQ ID NO: 10032 - DNA, 38 bp, Artificial Sequence
  Synthetic oligonucleotide
tgccgccggcaccgagggctgattattaagacggatga

SEQ ID NO: 10033 - DNA, 36 bp, Artificial Sequence
  Synthetic oligonucleotide
tgtacagtgggcttgccgtactagtatattatttga

SEQ ID NO: 10034 - DNA, 35 bp, Artificial Sequence
  Synthetic oligonucleotide
tgtcaggtgttatggactacgacaaagcatgcagt

SEQ ID NO: 10035 - DNA, 36 bp, Artificial Sequence
  Synthetic oligonucleotide
ttgatggaaccataaggtttgttgttttatctagaa

SEQ ID NO: 10036 - DNA, 37 bp, Artificial Sequence
  Synthetic oligonucleotide
ttggaactagagctgtaagtcacacggtactgaggga

SEQ ID NO: 10037 - DNA, 38 bp, Artificial Sequence
  Synthetic oligonucleotide
tttagcatgtccgtcttatgtgccgacccgccccctga

SEQ ID NO: 10038 - DNA, 38 bp, Artificial Sequence
  Synthetic oligonucleotide
tttcggttacgctcacccccgcgtaccgcatacaatga

SEQ ID NO: 10039 - DNA, 38 bp, Artificial Sequence
  Synthetic oligonucleotide
aatcgatgcattcacttttattgtcggggggataatga

SEQ ID NO: 10040 - DNA, 36 bp, Artificial Sequence
  Synthetic oligonucleotide
atgatgacacatctccaagaaaatcgctccagtaga

SEQ ID NO: 10041 - DNA, 35 bp, Artificial Sequence
  Synthetic oligonucleotide
gacctgccttcagtggggttcttgtaaagctccgg

SEQ ID NO: 10042 - DNA, 36 bp, Artificial Sequence
  Synthetic oligonucleotide
gcaccggaaattgagcgcttagctagctacaaccaa

SEQ ID NO: 10043 - DNA, 37 bp, Artificial Sequence
  Synthetic oligonucleotide
gccccagcaaatagtctagacagtacatgcgatagga

SEQ ID NO: 10044 - DNA, 36 bp, Artificial Sequence
  Synthetic oligonucleotide
gtgtagaggttccatggtcggtaacgccattgtcta

SEQ ID NO: 10045 - DNA, 35 bp, Artificial Sequence
  Synthetic oligonucleotide
tatcacggtcgaaacgaccccagaaatggagacat

SEQ ID NO: 10046 - DNA, 36 bp, Artificial Sequence
  Synthetic oligonucleotide
tcactggtgcttcggctcatgacaatcgaaaagata

SEQ ID NO: 10047 - DNA, 37 bp, Artificial Sequence
  Synthetic oligonucleotide
agcgggctatacctcttgttgaggccgcacgctacga

SEQ ID NO: 10048 - DNA, 35 bp, Artificial Sequence
  Synthetic oligonucleotide
gggtagtgttttatgtaccctaaatccttctcgtc

SEQ ID NO: 10049 - DNA, 37 bp, Artificial Sequence
  Synthetic oligonucleotide
ttcatacctgcgtgttcaggacgaacgtgatccgtga

SEQ ID NO: 10050 - DNA, 38 bp, Artificial Sequence
  Synthetic oligonucleotide
actcggagcttcaaaccggtccatcgggtcagtactga

SEQ ID NO: 10051 - DNA, 35 bp, Artificial Sequence
  Synthetic oligonucleotide
ggctagctgataccatcgtagggttactagcacca

SEQ ID NO: 10052 - DNA, 37 bp, Artificial Sequence
  Synthetic oligonucleotide
tgtgttgctttggacttagcgatccatgcaccaacta

SEQ ID NO: 10053 - DNA, 36 bp, Artificial Sequence
  Synthetic oligonucleotide
ttcaccagccgccacgcggttagttcagcaaatgta

SEQ ID NO: 10054 - DNA, 35 bp, Artificial Sequence
  Synthetic oligonucleotide
caccttatggcatggccgttggggtgccgtacaac

SEQ ID NO: 10055 - DNA, 35 bp, Artificial Sequence
  Synthetic oligonucleotide
gtagttgtcatcagtaggggggtcatcagattcaa

SEQ ID NO: 10056 - DNA, 36 bp, Artificial Sequence
  Synthetic oligonucleotide
tcacaagtcctctggtacgattttgtgacgttcgta

SEQ ID NO: 10057 - DNA, 36 bp, Artificial Sequence
  Synthetic oligonucleotide
aaacggaacactggctcgggcggtgttttgaatata

SEQ ID NO: 10058 - DNA, 35 bp, Artificial Sequence
  Synthetic oligonucleotide
aacgagggtgttgagtccaattgccagaggtagtc

SEQ ID NO: 10059 - DNA, 38 bp, Artificial Sequence
  Synthetic oligonucleotide
aacgatccatactggtcgtagcggtcaactaggaatga

SEQ ID NO: 10060 - DNA, 36 bp, Artificial Sequence
  Synthetic oligonucleotide
aagaaacgacgtttgcaggttaagactgcgacatga

SEQ ID NO: 10061 - DNA, 35 bp, Artificial Sequence
  Synthetic oligonucleotide
aagattgggaccctcggatgcaccatcattcactg

SEQ ID NO: 10062 - DNA, 38 bp, Artificial Sequence
  Synthetic oligonucleotide
aagctgcatcttcaatggtcatgcatcatcatccttga

SEQ ID NO: 10063 - DNA, 35 bp, Artificial Sequence
  Synthetic oligonucleotide
aaggactgggtcatcccgactcgatgtctaatcgg

SEQ ID NO: 10064 - DNA, 36 bp, Artificial Sequence
  Synthetic oligonucleotide
aagggaataccccagtgacggacgccgaatggttaa

SEQ ID NO: 10065 - DNA, 36 bp, Artificial Sequence
  Synthetic oligonucleotide
aatcagaggtgattccggcctgatagtgtcaaccgc

SEQ ID NO: 10066 - DNA, 37 bp, Artificial Sequence
  Synthetic oligonucleotide
aatgaggttgaacgtctctcatagaccgtcaatgtga

SEQ ID NO: 10067 - DNA, 35 bp, Artificial Sequence
  Synthetic oligonucleotide
aatgccacatatagtcgcctccgagtatctacgag

SEQ ID NO: 10068 - DNA, 38 bp, Artificial Sequence
  Synthetic oligonucleotide
aatggaggggacagaggtgttacgtgctgacgagttga

SEQ ID NO: 10069 - DNA, 38 bp, Artificial Sequence
  Synthetic oligonucleotide
aatgtgacacccactgtttgtgaatgctggtcctgtga

SEQ ID NO: 10070 - DNA, 37 bp, Artificial Sequence
  Synthetic oligonucleotide
acagtaagatgccgaggcaactgagtgagacagagta

SEQ ID NO: 10071 - DNA, 38 bp, Artificial Sequence
  Synthetic oligonucleotide
acgaaacttcccgcaagatgttttttagttgtcgctga

SEQ ID NO: 10072 - DNA, 37 bp, Artificial Sequence
  Synthetic oligonucleotide
acgttcccctgacactaagatttagaacgtcggttga

SEQ ID NO: 10073 - DNA, 38 bp, Artificial Sequence
  Synthetic oligonucleotide
actagacgcttgcatattagttcaggcgcatcgcctga

SEQ ID NO: 10074 - DNA, 36 bp, Artificial Sequence
  Synthetic oligonucleotide
actatgccggttcagttcttcagcatatacgaagga

SEQ ID NO: 10075 - DNA, 35 bp, Artificial Sequence
  Synthetic oligonucleotide
acttcagtagtttaacttcgcggagactacagcac

SEQ ID NO: 10076 - DNA, 35 bp, Artificial Sequence
  Synthetic oligonucleotide
agaagagcgccaaattcatcagagatctcttagaa

SEQ ID NO: 10077 - DNA, 37 bp, Artificial Sequence
  Synthetic oligonucleotide
agacaacgctaacaggtcagaaagctctgttattcga

SEQ ID NO: 10078 - DNA, 38 bp, Artificial Sequence
  Synthetic oligonucleotide
agagcaaggaatacagagccagggaaccctcggtgtga

SEQ ID NO: 10079 - DNA, 35 bp, Artificial Sequence
  Synthetic oligonucleotide
agagcgggggattagaggtcctgttccatgaactg

SEQ ID NO: 10080 - DNA, 38 bp, Artificial Sequence
  Synthetic oligonucleotide
agcacttacctactggtggtgttgttcgatctcagtga

SEQ ID NO: 10081 - DNA, 37 bp, Artificial Sequence
  Synthetic oligonucleotide
agccagctgtaggttgctacccgcacttcttccaaga

SEQ ID NO: 10082 - DNA, 36 bp, Artificial Sequence
  Synthetic oligonucleotide
aggaaatgctagaggacgttcaaggggggcgaagaa

SEQ ID NO: 10083 - DNA, 36 bp, Artificial Sequence
  Synthetic oligonucleotide
aggtgccggactcagagtggatcgcctgttgtgcca

SEQ ID NO: 10084 - DNA, 38 bp, Artificial Sequence
  Synthetic oligonucleotide
agttactggcgatcaatgggccttacccaagccggtga

SEQ ID NO: 10085 - DNA, 35 bp, Artificial Sequence
  Synthetic oligonucleotide
agttagtgtccggccctaagataatccgtggcgct

SEQ ID NO: 10086 - DNA, 36 bp, Artificial Sequence
  Synthetic oligonucleotide
ataacggacagtcttgatgcctgtaggaaatactaa

SEQ ID NO: 10087 - DNA, 36 bp, Artificial Sequence
  Synthetic oligonucleotide
atagctccgcggcggagtgaaggcttgtatcaatta

SEQ ID NO: 10088 - DNA, 38 bp, Artificial Sequence
  Synthetic oligonucleotide
atataaatgaggcgcaatatatgttagagtaatcgtga

SEQ ID NO: 10089 - DNA, 35 bp, Artificial Sequence
  Synthetic oligonucleotide
atcagcgcattacagacatgtgcttatgttgcaag

SEQ ID NO: 10090 - DNA, 35 bp, Artificial Sequence
  Synthetic oligonucleotide
atcctcgaaaagtacaagcgtgtctcaactcatgg

SEQ ID NO: 10091 - DNA, 36 bp, Artificial Sequence
  Synthetic oligonucleotide
atcgggtacagcaattaagttattaacgcccgttga

SEQ ID NO: 10092 - DNA, 35 bp, Artificial Sequence
  Synthetic oligonucleotide
atgacaggtcgtcattgataaggaatgaactagtg

SEQ ID NO: 10093 - DNA, 36 bp, Artificial Sequence
  Synthetic oligonucleotide
atgtattggtgtctgcaattttcatatggggttggt

SEQ ID NO: 10094 - DNA, 35 bp, Artificial Sequence
  Synthetic oligonucleotide
atgttatgggcctgtggggacgagggacacaaggt

SEQ ID NO: 10095 - DNA, 38 bp, Artificial Sequence
  Synthetic oligonucleotide
attggagaggtctggaagcaataatattgttcggatga

SEQ ID NO: 10096 - DNA, 35 bp, Artificial Sequence
  Synthetic oligonucleotide
attggtacttaccatgttggtaagccaacccaacg

SEQ ID NO: 10097 - DNA, 38 bp, Artificial Sequence
  Synthetic oligonucleotide
cacgggctggtatgagcggtacggtgacgagcacatga

SEQ ID NO: 10098 - DNA, 38 bp, Artificial Sequence
  Synthetic oligonucleotide
catggaattggcgcccattttgtgtagacttcgactga

SEQ ID NO: 10099 - DNA, 35 bp, Artificial Sequence
  Synthetic oligonucleotide
catgtaatatgcagtgatgatatggtaataattcg

SEQ ID NO: 10100 - DNA, 35 bp, Artificial Sequence
  Synthetic oligonucleotide
ccggaccatatttcacgatcaggttgcccgttaga

SEQ ID NO: 10101 - DNA, 35 bp, Artificial Sequence
  Synthetic oligonucleotide
cttacatctgtgtcttatccctagtgctgggccaa

SEQ ID NO: 10102 - DNA, 37 bp, Artificial Sequence
  Synthetic oligonucleotide
gaaactctgcacatgagtagaatgtacgtacgctgga

SEQ ID NO: 10103 - DNA, 37 bp, Artificial Sequence
  Synthetic oligonucleotide
gaacagcagaaatcaatgccctaattgtggtatggga

SEQ ID NO: 10104 - DNA, 35 bp, Artificial Sequence
  Synthetic oligonucleotide
gaacgcgaatacagcatacgagtgatagatccagg

SEQ ID NO: 10105 - DNA, 38 bp, Artificial Sequence
  Synthetic oligonucleotide
gaactcccgatgacgtactaaacccctgggcaatttga

SEQ ID NO: 10106 - DNA, 38 bp, Artificial Sequence
  Synthetic oligonucleotide
gaatgtagattccgctcagtcttgcgtggggccaatga

SEQ ID NO: 10107 - DNA, 38 bp, Artificial Sequence
  Synthetic oligonucleotide
gacggttaccgtgggaagtattgtctctacatcgctta

SEQ ID NO: 10108 - DNA, 37 bp, Artificial Sequence
  Synthetic oligonucleotide
gagacattatgaagctaatcgcatacggtgtgagcga

SEQ ID NO: 10109 - DNA, 35 bp, Artificial Sequence
  Synthetic oligonucleotide
gagcaattccacgcgaagattatgttggtgaaggg

SEQ ID NO: 10110 - DNA, 38 bp, Artificial Sequence
  Synthetic oligonucleotide
gaggacggggttttttgcggggtaggttaggtacctga

SEQ ID NO: 10111 - DNA, 35 bp, Artificial Sequence
  Synthetic oligonucleotide
gagtatgctctaatcccggctctgagatcccccgc

SEQ ID NO: 10112 - DNA, 37 bp, Artificial Sequence
  Synthetic oligonucleotide
gataactaatagtacccgggaagttaggtttggtaga

SEQ ID NO: 10113 - DNA, 38 bp, Artificial Sequence
  Synthetic oligonucleotide
gatacaactggactgatcgtctaagggtttaggcctga

SEQ ID NO: 10114 - DNA, 35 bp, Artificial Sequence
  Synthetic oligonucleotide
gatttaagccgtttcaggtcagtctcggacatagc

SEQ ID NO: 10115 - DNA, 38 bp, Artificial Sequence
  Synthetic oligonucleotide
gcaaaggttcaatagtgtaactaacactactagattga

SEQ ID NO: 10116 - DNA, 35 bp, Artificial Sequence
  Synthetic oligonucleotide
gcaggcatacagttgaacaatgttttccctcccga

SEQ ID NO: 10117 - DNA, 38 bp, Artificial Sequence
  Synthetic oligonucleotide
gccgtccgaagggccatgcagtactgaactaggtttga

SEQ ID NO: 10118 - DNA, 35 bp, Artificial Sequence
  Synthetic oligonucleotide
gcgacgccccagccgaccttacaaccgccgcatag

SEQ ID NO: 10119 - DNA, 35 bp, Artificial Sequence
  Synthetic oligonucleotide
gcgcccaaggtggtgtattagaccttagatatgtt

SEQ ID NO: 10120 - DNA, 38 bp, Artificial Sequence
  Synthetic oligonucleotide
gcggtcatggtgggcgcataaggcgttggtgcgaatga

SEQ ID NO: 10121 - DNA, 36 bp, Artificial Sequence
  Synthetic oligonucleotide
gctcggccccctaggttggcgcctttggacgagaga

SEQ ID NO: 10122 - DNA, 35 bp, Artificial Sequence
  Synthetic oligonucleotide
gcttcgtatctcccttccgttcgttctcacacgaa

SEQ ID NO: 10123 - DNA, 37 bp, Artificial Sequence
  Synthetic oligonucleotide
ggattagtgagataggaacgtaggcttccctgcaaga

SEQ ID NO: 10124 - DNA, 38 bp, Artificial Sequence
  Synthetic oligonucleotide
ggccccaatacagtgacttggggtcaactggaaagtga

SEQ ID NO: 10125 - DNA, 35 bp, Artificial Sequence
  Synthetic oligonucleotide
gggaaacctgtagaatgggtaggaaccagggaacg

SEQ ID NO: 10126 - DNA, 35 bp, Artificial Sequence
  Synthetic oligonucleotide
ggtgtcggatccggaaagagcgaactctgggttaa

SEQ ID NO: 10127 - DNA, 37 bp, Artificial Sequence
  Synthetic oligonucleotide
gtaccgttgggcggtcagtgcatgtgggcgtcatcga

SEQ ID NO: 10128 - DNA, 38 bp, Artificial Sequence
  Synthetic oligonucleotide
gtagttcatgcgaagtcacggatagtactttggtctga

SEQ ID NO: 10129 - DNA, 38 bp, Artificial Sequence
  Synthetic oligonucleotide
gtcaacatatggtttgtgggttatatgaactacgttga

SEQ ID NO: 10130 - DNA, 36 bp, Artificial Sequence
  Synthetic oligonucleotide
gtcacgttgcattactgtctggtggtggtgtgttga

SEQ ID NO: 10131 - DNA, 36 bp, Artificial Sequence
  Synthetic oligonucleotide
gtcatagctacgtgggctttagggcctaaacagaaa

SEQ ID NO: 10132 - DNA, 35 bp, Artificial Sequence
  Synthetic oligonucleotide
gtctggatcacggtttactgctcagatagggttgt

SEQ ID NO: 10133 - DNA, 35 bp, Artificial Sequence
  Synthetic oligonucleotide
gtgacaataattggcaacggtggtgagggtttata

SEQ ID NO: 10134 - DNA, 36 bp, Artificial Sequence
  Synthetic oligonucleotide
gtgaccacttcagcgtgggggcaatcatagggggta

SEQ ID NO: 10135 - DNA, 37 bp, Artificial Sequence
  Synthetic oligonucleotide
gttaggtagacttctggtggtaattgtgtcgcgtaga

SEQ ID NO: 10136 - DNA, 37 bp, Artificial Sequence
  Synthetic oligonucleotide
taataacccttcagtcctggcgagtgcgggataagga

SEQ ID NO: 10137 - DNA, 35 bp, Artificial Sequence
  Synthetic oligonucleotide
tacactcccagatgtcgtaccttgtttaaggggta

SEQ ID NO: 10138 - DNA, 35 bp, Artificial Sequence
  Synthetic oligonucleotide
tactacggttttccgtttgtcagttcccgaatgga

SEQ ID NO: 10139 - DNA, 38 bp, Artificial Sequence
  Synthetic oligonucleotide
tattggtccgcgccgcacagacgtacctgggctactga

SEQ ID NO: 10140 - DNA, 37 bp, Artificial Sequence
  Synthetic oligonucleotide
tcaagtcagtaggtaaacataaggatcaaacagatga

SEQ ID NO: 10141 - DNA, 36 bp, Artificial Sequence
  Synthetic oligonucleotide
tcaggaaacgctttccgaaccttaagagccgagcaa

SEQ ID NO: 10142 - DNA, 36 bp, Artificial Sequence
  Synthetic oligonucleotide
tccgaatgaaccttaccggaaccaatctgcgatgaa

SEQ ID NO: 10143 - DNA, 35 bp, Artificial Sequence
  Synthetic oligonucleotide
tccgcgaggcagaaaggcatactttaagtattcaa

SEQ ID NO: 10144 - DNA, 37 bp, Artificial Sequence
  Synthetic oligonucleotide
tccggtgaaggatctgtgatctccagcatatcctcga

SEQ ID NO: 10145 - DNA, 35 bp, Artificial Sequence
  Synthetic oligonucleotide
tccttaggggactttacgaacgtcatgttctgccg

SEQ ID NO: 10146 - DNA, 38 bp, Artificial Sequence
  Synthetic oligonucleotide
tctacccctggggtatcatgatagcggcgcaactatga

SEQ ID NO: 10147 - DNA, 36 bp, Artificial Sequence
  Synthetic oligonucleotide
tgaaggaatgtcgacccggattttgctaccggagca

SEQ ID NO: 10148 - DNA, 37 bp, Artificial Sequence
  Synthetic oligonucleotide
tgatgcagtctatgacggctccggggtgaattttgga

SEQ ID NO: 10149 - DNA, 37 bp, Artificial Sequence
  Synthetic oligonucleotide
tgccaagtggaaccaaagttctgcagtctgtggtgga

SEQ ID NO: 10150 - DNA, 35 bp, Artificial Sequence
  Synthetic oligonucleotide
tgcccagagcatagtaaagcctgttctacattatg

SEQ ID NO: 10151 - DNA, 36 bp, Artificial Sequence
  Synthetic oligonucleotide
tgccgaaggttgtgagacgcatgtagaataggccaa

SEQ ID NO: 10152 - DNA, 36 bp, Artificial Sequence
  Synthetic oligonucleotide
tgggactgcggttacagcaggacaagacgtactgaa

SEQ ID NO: 10153 - DNA, 36 bp, Artificial Sequence
  Synthetic oligonucleotide
tgggtccaatttacgtcggtgacgatttacgaagga

SEQ ID NO: 10154 - DNA, 35 bp, Artificial Sequence
  Synthetic oligonucleotide
ttaaggggccggattaaagaccgctttctgattga

SEQ ID NO: 10155 - DNA, 38 bp, Artificial Sequence
  Synthetic oligonucleotide
ttagaaccggtgtttttgaagactttacttgggtctga

SEQ ID NO: 10156 - DNA, 37 bp, Artificial Sequence
  Synthetic oligonucleotide
ttagtatctatccgacgacgattgcgctgcatttgga

SEQ ID NO: 10157 - DNA, 35 bp, Artificial Sequence
  Synthetic oligonucleotide
ttccgggaggccgccgtgtggtcgagtcagagatg

SEQ ID NO: 10158 - DNA, 36 bp, Artificial Sequence
  Synthetic oligonucleotide
ttggagtgaggagtgagtgttgttatttaaaaggta

SEQ ID NO: 10159 - DNA, 36 bp, Artificial Sequence
  Synthetic oligonucleotide
ttggcaaatgccgtgagcgtagcgtaaaacactgca

SEQ ID NO: 10160 - DNA, 38 bp, Artificial Sequence
  Synthetic oligonucleotide
ttggggggttcatagtcacacagaccgtgccagtgtga

SEQ ID NO: 10161 - DNA, 38 bp, Artificial Sequence
  Synthetic oligonucleotide
ttgtatcctaccgcgagaagttgttataagctatgtga

SEQ ID NO: 10162 - DNA, 35 bp, Artificial Sequence
  Synthetic oligonucleotide
ttgtggtttagacctctaagtaatggtattcgaag

SEQ ID NO: 10163 - DNA, 36 bp, Artificial Sequence
  Synthetic oligonucleotide
ttgttgaggggagagctatgttggttgccagaggta

SEQ ID NO: 10164 - DNA, 35 bp, Artificial Sequence
  Synthetic oligonucleotide
tttaaatccttgtcaaggtcttgtagcctatgtaa

SEQ ID NO: 10165 - DNA, 36 bp, Artificial Sequence
  Synthetic oligonucleotide
tttactgttggtattaaccgacaaggttatattgta

SEQ ID NO: 10166 - DNA, 38 bp, Artificial Sequence
  Synthetic oligonucleotide
tttggtgtccagccctagcatggatgtaaataaagtga

SEQ ID NO: 10167 - DNA, 38 bp, Artificial Sequence
  Synthetic oligonucleotide
agacacatttcgagtggggcgatccatctacgcactga

SEQ ID NO: 10168 - DNA, 37 bp, Artificial Sequence
  Synthetic oligonucleotide
cttacgactgcgccttagatatggcgaagttcctcga

SEQ ID NO: 10169 - DNA, 35 bp, Artificial Sequence
  Synthetic oligonucleotide
ttcgtcagtattcggcgtttttgtgtgcgttaatg

SEQ ID NO: 10170 - DNA, 38 bp, Artificial Sequence
  Synthetic oligonucleotide
acccaaagctgggagtgtgatcggacggaccggactga

SEQ ID NO: 10171 - DNA, 37 bp, Artificial Sequence
  Synthetic oligonucleotide
gggcggtctaggtcccaagccaattatgaatgcagga

SEQ ID NO: 10172 - DNA, 37 bp, Artificial Sequence
  Synthetic oligonucleotide
tgtggaaggtggcttgtagaaagcttccaaggggaga

SEQ ID NO: 10173 - DNA, 35 bp, Artificial Sequence
  Synthetic oligonucleotide
ttcccgtatgatggaaacgtttaagatggtctaag

SEQ ID NO: 10174 - DNA, 35 bp, Artificial Sequence
  Synthetic oligonucleotide
actcgggactataccgtggtgggagggtaagtacg

SEQ ID NO: 10175 - DNA, 35 bp, Artificial Sequence
  Synthetic oligonucleotide
aactgcagacttttggtttgacgggtgactagagg

SEQ ID NO: 10176 - DNA, 37 bp, Artificial Sequence
  Synthetic oligonucleotide
acatgagcgcccccctctcttgatcttggagtaaaga

SEQ ID NO: 10177 - DNA, 34 bp, Artificial Sequence
  Synthetic oligonucleotide
aggttcaatacactacttagagcgacgagaccgt

SEQ ID NO: 10178 - DNA, 38 bp, Artificial Sequence
  Synthetic oligonucleotide
agtacacagtgcacgtgggcgtagtttggtgagcctga

SEQ ID NO: 10179 - DNA, 35 bp, Artificial Sequence
  Synthetic oligonucleotide
atctgtcgtaaagtggtgctgatgaaatgtttggg

SEQ ID NO: 10180 - DNA, 36 bp, Artificial Sequence
  Synthetic oligonucleotide
gaagcggtcatacgtcatgtttgatgaacgtgtcga

SEQ ID NO: 10181 - DNA, 36 bp, Artificial Sequence
  Synthetic oligonucleotide
gacatgcttctgttgcagtctgtaaagcttcggtga

SEQ ID NO: 10182 - DNA, 35 bp, Artificial Sequence
  Synthetic oligonucleotide
gatgaaaccggatgcagtgctaatgtcttcgaaca

SEQ ID NO: 10183 - DNA, 36 bp, Artificial Sequence
  Synthetic oligonucleotide
gccgtcattttgatcgcctatttaagtctatcctca

SEQ ID NO: 10184 - DNA, 37 bp, Artificial Sequence
  Synthetic oligonucleotide
gcctataggatgaagggcttctagtctgacagcacga

SEQ ID NO: 10185 - DNA, 37 bp, Artificial Sequence
  Synthetic oligonucleotide
gcctatgccacggcactcgattccatgggatgtagga

SEQ ID NO: 10186 - DNA, 36 bp, Artificial Sequence
  Synthetic oligonucleotide
gcgtatgaagttcgcactctgggattgctggccgga

SEQ ID NO: 10187 - DNA, 36 bp, Artificial Sequence
  Synthetic oligonucleotide
gctcctgatgtatggggtcaaagcaggtgtaaagga

SEQ ID NO: 10188 - DNA, 37 bp, Artificial Sequence
  Synthetic oligonucleotide
gtaagtgggcgcaggcccgttttgaatggggatgcga

SEQ ID NO: 10189 - DNA, 37 bp, Artificial Sequence
  Synthetic oligonucleotide
gtaggtagtttgcgatccaggggatattcgacttgga

SEQ ID NO: 10190 - DNA, 36 bp, Artificial Sequence
  Synthetic oligonucleotide
gtgaacttagggagtaagacagcttaggcgtactga

SEQ ID NO: 10191 - DNA, 35 bp, Artificial Sequence
  Synthetic oligonucleotide
gtgctttgggaagccgtcaagtaccgtttctacgt

SEQ ID NO: 10192 - DNA, 36 bp, Artificial Sequence
  Synthetic oligonucleotide
tcaccggaactcatgtacttatggcgtcatgggcta

SEQ ID NO: 10193 - DNA, 35 bp, Artificial Sequence
  Synthetic oligonucleotide
tcggactcaacgggttttcaacttttcattgcata

SEQ ID NO: 10194 - DNA, 37 bp, Artificial Sequence
  Synthetic oligonucleotide
atcgagagtctaacagttcgagaacccctgatttgga

SEQ ID NO: 10195 - DNA, 36 bp, Artificial Sequence
  Synthetic oligonucleotide
tatttcccgccctgcgattgacgtaccaggtgacga

SEQ ID NO: 10196 - DNA, 36 bp, Artificial Sequence
  Synthetic oligonucleotide
tgtacttacacggtgctatattaagcgtttgtgaga

SEQ ID NO: 10197 - DNA, 35 bp, Artificial Sequence
  Synthetic oligonucleotide
cctccggtcgggggctatgctaaattactaaagtg

SEQ ID NO: 10198 - DNA, 38 bp, Artificial Sequence
  Synthetic oligonucleotide
tgcacgttgtgtagatgttgggtgtccagtaggcgtga

SEQ ID NO: 10199 - DNA, 38 bp, Artificial Sequence
  Synthetic oligonucleotide
ttgcccctggggtgagtattcaaaggcgtaagctctga

SEQ ID NO: 10200 - DNA, 35 bp, Artificial Sequence
  Synthetic oligonucleotide
aataggcgaagtgacttgctgggaaaacagggtaa

SEQ ID NO: 10201 - DNA, 37 bp, Artificial Sequence
  Synthetic oligonucleotide
acacgctgagtgtcggagattactgttgaggttcgga

SEQ ID NO: 10202 - DNA, 36 bp, Artificial Sequence
  Synthetic oligonucleotide
actgttgggggggacggtgagtaatggcctctaaga

SEQ ID NO: 10203 - DNA, 34 bp, Artificial Sequence
  Synthetic oligonucleotide
atatatcgcgctagtacaattcaggactagggta

SEQ ID NO: 10204 - DNA, 37 bp, Artificial Sequence
  Synthetic oligonucleotide
atgcgttgcaaaccagcggacctgctaagtaatggga

SEQ ID NO: 10205 - DNA, 35 bp, Artificial Sequence
  Synthetic oligonucleotide
atgggggccaagaaccacgtgaggggaccactgcg

SEQ ID NO: 10206 - DNA, 35 bp, Artificial Sequence
  Synthetic oligonucleotide
atggtgacgctaggcaagtttcgaagtgtttgctc

SEQ ID NO: 10207 - DNA, 38 bp, Artificial Sequence
  Synthetic oligonucleotide
atttgtgtcgtatcggggagtggatgctttggatctga

SEQ ID NO: 10208 - DNA, 37 bp, Artificial Sequence
  Synthetic oligonucleotide
gactccgtttcagcatatagggggagccaggttcgga

SEQ ID NO: 10209 - DNA, 37 bp, Artificial Sequence
  Synthetic oligonucleotide
gagtactgtctgagtgcgaagtgccatagggaatcga

SEQ ID NO: 10210 - DNA, 38 bp, Artificial Sequence
  Synthetic oligonucleotide
gatactctgctgacatgcgggtaatgtaggaatattga

SEQ ID NO: 10211 - DNA, 35 bp, Artificial Sequence
  Synthetic oligonucleotide
gctataccgtaatcttgcttcagggacttaggtta

SEQ ID NO: 10212 - DNA, 37 bp, Artificial Sequence
  Synthetic oligonucleotide
gtaaatcgtgatcataaaggtcacatggttcgttcga

SEQ ID NO: 10213 - DNA, 35 bp, Artificial Sequence
  Synthetic oligonucleotide
gtatgaggatcgtcaccagtcaagagagggaatgc

SEQ ID NO: 10214 - DNA, 35 bp, Artificial Sequence
  Synthetic oligonucleotide
tactttccgtagtaagcaccaggttgtccacaggc

SEQ ID NO: 10215 - DNA, 37 bp, Artificial Sequence
  Synthetic oligonucleotide
tataccgcactcctttcgtaaggagctgtgctgcaga

SEQ ID NO: 10216 - DNA, 35 bp, Artificial Sequence
  Synthetic oligonucleotide
tcataggtctctcaggtcaatgcttggtgcccccc

SEQ ID NO: 10217 - DNA, 36 bp, Artificial Sequence
  Synthetic oligonucleotide
tccagttcgattgggcgtacgtactctacgggtgga

SEQ ID NO: 10218 - DNA, 36 bp, Artificial Sequence
  Synthetic oligonucleotide
tccgcaaactgggcgttctctcaagcaccgttaaaa

SEQ ID NO: 10219 - DNA, 38 bp, Artificial Sequence
  Synthetic oligonucleotide
tctgaacgactgtacataacagatgtcagacaacatga

SEQ ID NO: 10220 - DNA, 35 bp, Artificial Sequence
  Synthetic oligonucleotide
tgaatagtagcgaggtggtcgtcacatggcggatg

SEQ ID NO: 10221 - DNA, 38 bp, Artificial Sequence
  Synthetic oligonucleotide
ttaaccccgtatcaatgggagtgagtgccaagtcctga

SEQ ID NO: 10222 - DNA, 35 bp, Artificial Sequence
  Synthetic oligonucleotide
ttgcgccggaatgaaaggcgagtaaacgagctggt

SEQ ID NO: 10223 - DNA, 35 bp, Artificial Sequence
  Synthetic oligonucleotide
tttaggaagcaattctgtatattaacaacgccacg

SEQ ID NO: 10224 - DNA, 35 bp, Artificial Sequence
  Synthetic oligonucleotide
aacttcctctcactaaggtagcgcttctttcctac

SEQ ID NO: 10225 - DNA, 38 bp, Artificial Sequence
  Synthetic oligonucleotide
atgcgtaggcatggctcgggtaacttaagtccagttga

SEQ ID NO: 10226 - DNA, 36 bp, Artificial Sequence
  Synthetic oligonucleotide
gatcaaagtggtggatcgcctaattggctagtcgta

SEQ ID NO: 10227 - DNA, 37 bp, Artificial Sequence
  Synthetic oligonucleotide
ggttccgggatgctgacattgtttgtcaacttattga

SEQ ID NO: 10228 - DNA, 35 bp, Artificial Sequence
  Synthetic oligonucleotide
atcttccccccccggatgagaggagggactcagat

SEQ ID NO: 10229 - DNA, 35 bp, Artificial Sequence
  Synthetic oligonucleotide
tgacgtgccaacgattgcatctgctgcattcctcg

SEQ ID NO: 10230 - DNA, 36 bp, Artificial Sequence
  Synthetic oligonucleotide
acccgtacgtgcctgggaacaacggcgacagttcga

SEQ ID NO: 10231 - DNA, 37 bp, Artificial Sequence
  Synthetic oligonucleotide
acatcagtcgactccaggcacgtggtgaggttttgga

SEQ ID NO: 10232 - DNA, 36 bp, Artificial Sequence
  Synthetic oligonucleotide
aacgggggtgtttactgcggtcaaggaaaccacaaa

SEQ ID NO: 10233 - DNA, 36 bp, Artificial Sequence
  Synthetic oligonucleotide
aatggagtctcctcgagggagtatgatcaaacgaga

SEQ ID NO: 10234 - DNA, 37 bp, Artificial Sequence
  Synthetic oligonucleotide
acaaatgggacgtggagatagaatggctcctcgatga

SEQ ID NO: 10235 - DNA, 38 bp, Artificial Sequence
  Synthetic oligonucleotide
acctgtttagggagtggatttcccgaacattgtactga

SEQ ID NO: 10236 - DNA, 38 bp, Artificial Sequence
  Synthetic oligonucleotide
acgaccaggaccggaaaatggggagctagaagttatga

SEQ ID NO: 10237 - DNA, 36 bp, Artificial Sequence
  Synthetic oligonucleotide
acgctaaggatataggagtactggactctttcgcga

SEQ ID NO: 10238 - DNA, 35 bp, Artificial Sequence
  Synthetic oligonucleotide
acgtggtgtaaggcgacattgctcgggctaaatga

SEQ ID NO: 10239 - DNA, 37 bp, Artificial Sequence
  Synthetic oligonucleotide
actccatacactgcaatataaaggagtctgtacgcga

SEQ ID NO: 10240 - DNA, 37 bp, Artificial Sequence
  Synthetic oligonucleotide
atgggttgaatcgagtgtaatgtaggcattgtgttga

SEQ ID NO: 10241 - DNA, 38 bp, Artificial Sequence
  Synthetic oligonucleotide
caccagtcctcccccctattgggtagggtagccggtga

SEQ ID NO: 10242 - DNA, 36 bp, Artificial Sequence
  Synthetic oligonucleotide
cccgtgacgacgtaatctgcgctcagaaatatcgta

SEQ ID NO: 10243 - DNA, 38 bp, Artificial Sequence
  Synthetic oligonucleotide
ccggtgcgcggtctgtcgggttgaacctgtaccgttga

SEQ ID NO: 10244 - DNA, 38 bp, Artificial Sequence
  Synthetic oligonucleotide
gaatcgcgggaacggggggtatctaatgggcctactga

SEQ ID NO: 10245 - DNA, 35 bp, Artificial Sequence
  Synthetic oligonucleotide
gacatagtcgtacattcaaaggacggttagaaata

SEQ ID NO: 10246 - DNA, 37 bp, Artificial Sequence
  Synthetic oligonucleotide
gacctgcgatccacaatgccgaaacaccgagggggga

SEQ ID NO: 10247 - DNA, 35 bp, Artificial Sequence
  Synthetic oligonucleotide
gggaggttgtcatgaaggagaatagtgttgtattg

SEQ ID NO: 10248 - DNA, 35 bp, Artificial Sequence
  Synthetic oligonucleotide
ggtagtcattaaacattgtgtatgagtcctctatg

SEQ ID NO: 10249 - DNA, 37 bp, Artificial Sequence
  Synthetic oligonucleotide
ggtctagtaaattcggtgggttcacctttctcaggga

SEQ ID NO: 10250 - DNA, 35 bp, Artificial Sequence
  Synthetic oligonucleotide
gtagacaggttcgggtcttgtccactacacggtga

SEQ ID NO: 10251 - DNA, 38 bp, Artificial Sequence
  Synthetic oligonucleotide
gtatcggaatcgttcgggtcgcagaactgacggcatga

SEQ ID NO: 10252 - DNA, 36 bp, Artificial Sequence
  Synthetic oligonucleotide
gtgcaccgctattcgattccccccgagagcgggtga

SEQ ID NO: 10253 - DNA, 37 bp, Artificial Sequence
  Synthetic oligonucleotide
gtgttcttctgcaatctagcgaacttaagatgtggga

SEQ ID NO: 10254 - DNA, 37 bp, Artificial Sequence
  Synthetic oligonucleotide
gtttgaaccgttaccacaatagtgggtatttggtgga

SEQ ID NO: 10255 - DNA, 36 bp, Artificial Sequence
  Synthetic oligonucleotide
taacgggcttggccatggtagtccgatgaagtacta

SEQ ID NO: 10256 - DNA, 35 bp, Artificial Sequence
  Synthetic oligonucleotide
tacaagccatgccacgtactccgaccaaacaaaac

SEQ ID NO: 10257 - DNA, 38 bp, Artificial Sequence
  Synthetic oligonucleotide
taggaacttgagttagatgtataagtgtccacgtatga

SEQ ID NO: 10258 - DNA, 35 bp, Artificial Sequence
  Synthetic oligonucleotide
tagtacgtctcatttacccgagtgtacatgtccaa

SEQ ID NO: 10259 - DNA, 37 bp, Artificial Sequence
  Synthetic oligonucleotide
tcaaacgtccgcggtaaattaatagtatctctataga

SEQ ID NO: 10260 - DNA, 38 bp, Artificial Sequence
  Synthetic oligonucleotide
tcattggtcgtggggacctgtatatttggaactggtga

SEQ ID NO: 10261 - DNA, 35 bp, Artificial Sequence
  Synthetic oligonucleotide
tccgaggtagtctaggtcgtattcagccaccttat

SEQ ID NO: 10262 - DNA, 36 bp, Artificial Sequence
  Synthetic oligonucleotide
tcctacagtctgggttctgacccttgcccacgatga

SEQ ID NO: 10263 - DNA, 36 bp, Artificial Sequence
  Synthetic oligonucleotide
tggatagaatctgaacaattgtactcgagtcctgta

SEQ ID NO: 10264 - DNA, 36 bp, Artificial Sequence
  Synthetic oligonucleotide
ttaagtgttgcaagaagtaccaagacaaattgttca

SEQ ID NO: 10265 - DNA, 35 bp, Artificial Sequence
  Synthetic oligonucleotide
ttacgcgaggggagggttacttaagacacgcaagc

SEQ ID NO: 10266 - DNA, 38 bp, Artificial Sequence
  Synthetic oligonucleotide
gtcaacaactgtcctcatctggatacgggcttacctga

SEQ ID NO: 10267 - DNA, 37 bp, Artificial Sequence
  Synthetic oligonucleotide
gaaatggtcggaggaccttcaagccacggactgttga

SEQ ID NO: 10268 - DNA, 36 bp, Artificial Sequence
  Synthetic oligonucleotide
gacttgagtcccgtctttagcgttaatacataacga

SEQ ID NO: 10269 - DNA, 38 bp, Artificial Sequence
  Synthetic oligonucleotide
ggggccggtcggttattgaggtcccgatgccccattga

SEQ ID NO: 10270 - DNA, 37 bp, Artificial Sequence
  Synthetic oligonucleotide
ggttcgcagtttggaagtaacagcaaaattatcgtga

SEQ ID NO: 10271 - DNA, 35 bp, Artificial Sequence
  Synthetic oligonucleotide
gttcgtcgaacctgcggcccgtcattattggggct

SEQ ID NO: 10272 - DNA, 35 bp, Artificial Sequence
  Synthetic oligonucleotide
ttcctgacaaatgagggttttagccagtcgcctag

SEQ ID NO: 10273 - DNA, 35 bp, Artificial Sequence
  Synthetic oligonucleotide
ttcggtactttcactttactgggggctgattgact

SEQ ID NO: 10274 - DNA, 38 bp, Artificial Sequence
  Synthetic oligonucleotide
acacgcagtgtacgcaatggtatggctaagcaaattga

SEQ ID NO: 10275 - DNA, 35 bp, Artificial Sequence
  Synthetic oligonucleotide
gcctggtgggtagttctgtctgtgaggcttcctgc

SEQ ID NO: 10276 - DNA, 36 bp, Artificial Sequence
  Synthetic oligonucleotide
gtccgggctatacggatacccaggatcctgagataa

SEQ ID NO: 10277 - DNA, 36 bp, Artificial Sequence
  Synthetic oligonucleotide
tttcgaatcgttgtacatagcgatcaacgttacaga

SEQ ID NO: 10278 - DNA, 36 bp, Artificial Sequence
  Synthetic oligonucleotide
gccccagctcgttgtgcaggggaaactggtatacca

SEQ ID NO: 10279 - DNA, 36 bp, Artificial Sequence
  Synthetic oligonucleotide
ttactactagtggagggaggcaattgctgcacgaca

SEQ ID NO: 10280 - DNA, 36 bp, Artificial Sequence
  Synthetic oligonucleotide
aactgtggtcagatagggcgagtacggttaacccga

SEQ ID NO: 10281 - DNA, 35 bp, Artificial Sequence
  Synthetic oligonucleotide
accatggctcgggcatcacctgtcaggttgctttt

SEQ ID NO: 10282 - DNA, 36 bp, Artificial Sequence
  Synthetic oligonucleotide
agtaggggaaacaggtacgtttacgttgtagatgga

SEQ ID NO: 10283 - DNA, 36 bp, Artificial Sequence
  Synthetic oligonucleotide
gagcaccagtcgtccgtgagatggactgtgcacgta

SEQ ID NO: 10284 - DNA, 35 bp, Artificial Sequence
  Synthetic oligonucleotide
ggtgacaaacgcttataggcttgcgccacgtggtg

SEQ ID NO: 10285 - DNA, 37 bp, Artificial Sequence
  Synthetic oligonucleotide
aaaccagcgaccgtcccgtgacataggcgacaaatga

SEQ ID NO: 10286 - DNA, 36 bp, Artificial Sequence
  Synthetic oligonucleotide
aacaacgcgtgggccgacgagaggagtgtagagata

SEQ ID NO: 10287 - DNA, 36 bp, Artificial Sequence
  Synthetic oligonucleotide
aacatgggaatgggggatcagtcacgttattggtca

SEQ ID NO: 10288 - DNA, 35 bp, Artificial Sequence
  Synthetic oligonucleotide
aagctttgagtcatgggtatagggttttttctgac

SEQ ID NO: 10289 - DNA, 36 bp, Artificial Sequence
  Synthetic oligonucleotide
aagggaatacagagacatcccttatacggttcggta

SEQ ID NO: 10290 - DNA, 36 bp, Artificial Sequence
  Synthetic oligonucleotide
aataagctccgctcggcgtgatagagggcttggcca

SEQ ID NO: 10291 - DNA, 35 bp, Artificial Sequence
  Synthetic oligonucleotide
aatcgggactatcccatgggccaatgacaacgtgg

SEQ ID NO: 10292 - DNA, 36 bp, Artificial Sequence
  Synthetic oligonucleotide
acaggttgtggaaaaacatgcgtgttaactttttta

SEQ ID NO: 10293 - DNA, 36 bp, Artificial Sequence
  Synthetic oligonucleotide
accctggttcaagtttcatcttcgttagatactgga

SEQ ID NO: 10294 - DNA, 35 bp, Artificial Sequence
  Synthetic oligonucleotide
actgagagtgtagtaggtctccgcgcctggggcac

SEQ ID NO: 10295 - DNA, 35 bp, Artificial Sequence
  Synthetic oligonucleotide
agacttgagctccgggggacgtgaaagtgaagtaa

SEQ ID NO: 10296 - DNA, 35 bp, Artificial Sequence
  Synthetic oligonucleotide
aggacacactagtcgttttggccaagttctaaatc

SEQ ID NO: 10297 - DNA, 35 bp, Artificial Sequence
  Synthetic oligonucleotide
agtactggtgatggcgaatccaatgggagattggt

SEQ ID NO: 10298 - DNA, 35 bp, Artificial Sequence
  Synthetic oligonucleotide
agtcgcgaccttgcagatatgggagcaggtacgga

SEQ ID NO: 10299 - DNA, 36 bp, Artificial Sequence
  Synthetic oligonucleotide
agtctaaaggcatgtatggggatataccacagagca

SEQ ID NO: 10300 - DNA, 38 bp, Artificial Sequence
  Synthetic oligonucleotide
atagaggttgagtcatatggttttatccttattcttga

SEQ ID NO: 10301 - DNA, 37 bp, Artificial Sequence
  Synthetic oligonucleotide
atgatcaactgatcttattgagccgtgaacaatggga

SEQ ID NO: 10302 - DNA, 36 bp, Artificial Sequence
  Synthetic oligonucleotide
atttgcgtcataaatagatttatcggtggcctggga

SEQ ID NO: 10303 - DNA, 35 bp, Artificial Sequence
  Synthetic oligonucleotide
ccattagggcgagggtggacgaccaatacgcggta

SEQ ID NO: 10304 - DNA, 38 bp, Artificial Sequence
  Synthetic oligonucleotide
ccctccccgaccctttgcagtacttagtcatgtggtga

SEQ ID NO: 10305 - DNA, 36 bp, Artificial Sequence
  Synthetic oligonucleotide
gaagagactatagcgacatagaaaagtcgctaaata

SEQ ID NO: 10306 - DNA, 36 bp, Artificial Sequence
  Synthetic oligonucleotide
gacagtgcgaagtgcgtttatttttatacagggtaa

SEQ ID NO: 10307 - DNA, 35 bp, Artificial Sequence
  Synthetic oligonucleotide
gacggatggcgcctatcttatcaggttgactgatc

SEQ ID NO: 10308 - DNA, 35 bp, Artificial Sequence
  Synthetic oligonucleotide
gactcgttccagccatcgtggtcgttcgcgtatgt

SEQ ID NO: 10309 - DNA, 36 bp, Artificial Sequence
  Synthetic oligonucleotide
gagcacaaactgtgaagccacaaaacgccgtacgca

SEQ ID NO: 10310 - DNA, 38 bp, Artificial Sequence
  Synthetic oligonucleotide
gatagggcgtttgaaattggtgaagtaagagaaaatga

SEQ ID NO: 10311 - DNA, 37 bp, Artificial Sequence
  Synthetic oligonucleotide
gatggtacactttgcactaaggggaatttcccaagga

SEQ ID NO: 10312 - DNA, 35 bp, Artificial Sequence
  Synthetic oligonucleotide
gcaagggaggacactccgtgcccgggtattcttag

SEQ ID NO: 10313 - DNA, 37 bp, Artificial Sequence
  Synthetic oligonucleotide
gcgaacaagactaagaactgcatctaggttcaaagga

SEQ ID NO: 10314 - DNA, 38 bp, Artificial Sequence
  Synthetic oligonucleotide
ggacgggagagtaggcgtgggattatggtgagtactga

SEQ ID NO: 10315 - DNA, 36 bp, Artificial Sequence
  Synthetic oligonucleotide
ggcctaattcgagggggtggaaaaggccggtaccga

SEQ ID NO: 10316 - DNA, 37 bp, Artificial Sequence
  Synthetic oligonucleotide
ggtctgtaagcgttttcagttctgcaaccttaccgga

SEQ ID NO: 10317 - DNA, 36 bp, Artificial Sequence
  Synthetic oligonucleotide
ggtggggcactaattcgggtttgtgtaaggtgggaa

SEQ ID NO: 10318 - DNA, 37 bp, Artificial Sequence
  Synthetic oligonucleotide
gtaacccgtcagtgccaaacattgttggcgacggtga

SEQ ID NO: 10319 - DNA, 38 bp, Artificial Sequence
  Synthetic oligonucleotide
gtacctccctgacgcgtgctcgctttgcacgttactga

SEQ ID NO: 10320 - DNA, 36 bp, Artificial Sequence
  Synthetic oligonucleotide
gtactgggtagtgttgcttctcatgacttaatgcga

SEQ ID NO: 10321 - DNA, 35 bp, Artificial Sequence
  Synthetic oligonucleotide
gtagataatgcatgttagctggtatataagtagtc

SEQ ID NO: 10322 - DNA, 38 bp, Artificial Sequence
  Synthetic oligonucleotide
gtagttactgcttcaggaaaaactaagttctgggatga

SEQ ID NO: 10323 - DNA, 36 bp, Artificial Sequence
  Synthetic oligonucleotide
gtccattcttacgagcctagacttgacatcacggta

SEQ ID NO: 10324 - DNA, 35 bp, Artificial Sequence
  Synthetic oligonucleotide
gtctgtgtccccgggcccctcgttgtagtacaaag

SEQ ID NO: 10325 - DNA, 36 bp, Artificial Sequence
  Synthetic oligonucleotide
gtgatgccacgtagtactatatgattccgggttata

SEQ ID NO: 10326 - DNA, 35 bp, Artificial Sequence
  Synthetic oligonucleotide
gtggttcctgggtccaggattggcccaaaacaagt

SEQ ID NO: 10327 - DNA, 37 bp, Artificial Sequence
  Synthetic oligonucleotide
gttctggttatgtaaatacgtgccgctgcagtttgga

SEQ ID NO: 10328 - DNA, 36 bp, Artificial Sequence
  Synthetic oligonucleotide
gttggagccgatccaggggtatgcggactggtccga

SEQ ID NO: 10329 - DNA, 35 bp, Artificial Sequence
  Synthetic oligonucleotide
taaggaaagttggccagatcagaaccggtgtgggg

SEQ ID NO: 10330 - DNA, 36 bp, Artificial Sequence
  Synthetic oligonucleotide
taccgtatgaactgagcgcgtgggtggaagggtcca

SEQ ID NO: 10331 - DNA, 37 bp, Artificial Sequence
  Synthetic oligonucleotide
tacgaaatgagcgatggatgcgctccatagttcggga

SEQ ID NO: 10332 - DNA, 36 bp, Artificial Sequence
  Synthetic oligonucleotide
tactagggtcatataactggtgatttagaattacga

SEQ ID NO: 10333 - DNA, 37 bp, Artificial Sequence
  Synthetic oligonucleotide
tagacgccacgggggatcagtagggtacaggggccga

SEQ ID NO: 10334 - DNA, 38 bp, Artificial Sequence
  Synthetic oligonucleotide
tagctggaggatcacttactattgccgaacatctgtga

SEQ ID NO: 10335 - DNA, 36 bp, Artificial Sequence
  Synthetic oligonucleotide
tcaccagcgatttaggcatgattagtgggtgtagta

SEQ ID NO: 10336 - DNA, 38 bp, Artificial Sequence
  Synthetic oligonucleotide
tgaccgtgcgatatctaagcattggagaaggctactga

SEQ ID NO: 10337 - DNA, 35 bp, Artificial Sequence
  Synthetic oligonucleotide
tgcaccactagcaaaagttttgcaacgtctgagga

SEQ ID NO: 10338 - DNA, 35 bp, Artificial Sequence
  Synthetic oligonucleotide
tgggaatgttactaacggtcagggaggaattctgg

SEQ ID NO: 10339 - DNA, 38 bp, Artificial Sequence
  Synthetic oligonucleotide
ttactggccgaaatggccgcacagtgcacgtagtatga

SEQ ID NO: 10340 - DNA, 37 bp, Artificial Sequence
  Synthetic oligonucleotide
ttcataagctgatcagacgctttgtcggtatgagtga

SEQ ID NO: 10341 - DNA, 35 bp, Artificial Sequence
  Synthetic oligonucleotide
ttgcaatgtctagatgttgcaatcgttctaagtca

SEQ ID NO: 10342 - DNA, 37 bp, Artificial Sequence
  Synthetic oligonucleotide
tttgactatgtttcgaaagtgtaaattggtactacga

SEQ ID NO: 10343 - DNA, 36 bp, Artificial Sequence
  Synthetic oligonucleotide
tttgcctaatagcattgccggagcctcccggccaaa

SEQ ID NO: 10344 - DNA, 35 bp, Artificial Sequence
  Synthetic oligonucleotide
tatacgtcgaatacccgatgagtctgttggctgtg

SEQ ID NO: 10345 - DNA, 37 bp, Artificial Sequence
  Synthetic oligonucleotide
tttcgaatctgtgtcatgacgagtagatattcgccca

SEQ ID NO: 10346 - DNA, 35 bp, Artificial Sequence
  Synthetic oligonucleotide
accgttcgcgagttacgtaatccggctccagacta

SEQ ID NO: 10347 - DNA, 35 bp, Artificial Sequence
  Synthetic oligonucleotide
gtcgatttgatgaaggtcgtaatgaatgatattcg

SEQ ID NO: 10348 - DNA, 35 bp, Artificial Sequence
  Synthetic oligonucleotide
ttaccggactatcacaagatgcctcctgttagggg

SEQ ID NO: 10349 - DNA, 37 bp, Artificial Sequence
  Synthetic oligonucleotide
taccgacgaagttagagagctcaatgattcggacaga

SEQ ID NO: 10350 - DNA, 34 bp, Artificial Sequence
  Synthetic oligonucleotide
catggagttctatctagtacctgtaaaaaggtta

SEQ ID NO: 10351 - DNA, 37 bp, Artificial Sequence
  Synthetic oligonucleotide
aattaagctagagcacctggttcgcaaggcgcaccga

SEQ ID NO: 10352 - DNA, 37 bp, Artificial Sequence
  Synthetic oligonucleotide
agagcaaagaatgggagaagattcggacacgttagga

SEQ ID NO: 10353 - DNA, 37 bp, Artificial Sequence
  Synthetic oligonucleotide
aggtcgggggtactgcggtccttctgaagaagcttga

SEQ ID NO: 10354 - DNA, 35 bp, Artificial Sequence
  Synthetic oligonucleotide
attcaatcgtggaccggataaagttatgcaaattc

SEQ ID NO: 10355 - DNA, 38 bp, Artificial Sequence
  Synthetic oligonucleotide
gatagaggcctaacgcgcgaactgctttgtatgactga

SEQ ID NO: 10356 - DNA, 34 bp, Artificial Sequence
  Synthetic oligonucleotide
gcctactatcacatcgagggtctggaaacgagca

SEQ ID NO: 10357 - DNA, 37 bp, Artificial Sequence
  Synthetic oligonucleotide
gctatgtcctcgctttagagcgtgctctcaattacga

SEQ ID NO: 10358 - DNA, 35 bp, Artificial Sequence
  Synthetic oligonucleotide
gctgacacatggatagcgttggggcacaaggatta

SEQ ID NO: 10359 - DNA, 37 bp, Artificial Sequence
  Synthetic oligonucleotide
ggttgtaatctcgctttcgtagtgccggaaactggga

SEQ ID NO: 10360 - DNA, 35 bp, Artificial Sequence
  Synthetic oligonucleotide
gtaggatagccaatttttctttcaggcgtttgcta

SEQ ID NO: 10361 - DNA, 36 bp, Artificial Sequence
  Synthetic oligonucleotide
gtatttgcgataaatggatcgccgacagctcgggca

SEQ ID NO: 10362 - DNA, 36 bp, Artificial Sequence
  Synthetic oligonucleotide
tagtggcgaccttgttgaaagggtaccaggaacata

SEQ ID NO: 10363 - DNA, 36 bp, Artificial Sequence
  Synthetic oligonucleotide
tatctggcaagggccatgatagctgaggtggaggta

SEQ ID NO: 10364 - DNA, 38 bp, Artificial Sequence
  Synthetic oligonucleotide
tccatcttgagtgacgtgcctgtgatgctctacgttga

SEQ ID NO: 10365 - DNA, 36 bp, Artificial Sequence
  Synthetic oligonucleotide
tgacccccggtaagtagtatagcacctgtattcgta

SEQ ID NO: 10366 - DNA, 36 bp, Artificial Sequence
  Synthetic oligonucleotide
tgagtcaaagacatagctctgcgagtctaggcggga

SEQ ID NO: 10367 - DNA, 36 bp, Artificial Sequence
  Synthetic oligonucleotide
aagattaggggaagctggcttcgggacatcggtgga

SEQ ID NO: 10368 - DNA, 37 bp, Artificial Sequence
  Synthetic oligonucleotide
aatgtcgagcgcctatcggtcgcattcccgccgtgga

SEQ ID NO: 10369 - DNA, 36 bp, Artificial Sequence
  Synthetic oligonucleotide
acagctacagcggagcgaaggcttgggcgcggtgaa

SEQ ID NO: 10370 - DNA, 38 bp, Artificial Sequence
  Synthetic oligonucleotide
accgcgctgtcgcagagcatcaacggtgtctgtgctga

SEQ ID NO: 10371 - DNA, 35 bp, Artificial Sequence
  Synthetic oligonucleotide
accgctgatgtcaggggttcgactctcatggccca

SEQ ID NO: 10372 - DNA, 35 bp, Artificial Sequence
  Synthetic oligonucleotide
acgtactcttcttggagttgcggaggtaagcaggc

SEQ ID NO: 10373 - DNA, 37 bp, Artificial Sequence
  Synthetic oligonucleotide
actctccactggggctcgggtatggtctgtgcggaga

SEQ ID NO: 10374 - DNA, 35 bp, Artificial Sequence
  Synthetic oligonucleotide
actgcacatgtcctgggtggtgttttgcggatatt

SEQ ID NO: 10375 - DNA, 35 bp, Artificial Sequence
  Synthetic oligonucleotide
agactgcactctcgaagtcgcgtaaacgaggtcaa

SEQ ID NO: 10376 - DNA, 35 bp, Artificial Sequence
  Synthetic oligonucleotide
agtagcccatctaggttctaggtgcctcggtttta

SEQ ID NO: 10377 - DNA, 35 bp, Artificial Sequence
  Synthetic oligonucleotide
agtgttgtgcgaagtttcgtgacggaatgaagtag

SEQ ID NO: 10378 - DNA, 35 bp, Artificial Sequence
  Synthetic oligonucleotide
agttgccattcttgtcctggtttgtgagtagattt

SEQ ID NO: 10379 - DNA, 36 bp, Artificial Sequence
  Synthetic oligonucleotide
atcgccggttccgggttgtggtgctgtttgctgttt

SEQ ID NO: 10380 - DNA, 36 bp, Artificial Sequence
  Synthetic oligonucleotide
atcggggtgaagggcaaccttcccggtgtactgtga

SEQ ID NO: 10381 - DNA, 35 bp, Artificial Sequence
  Synthetic oligonucleotide
atgaacacggaagataaacgggtgcagactgactg

SEQ ID NO: 10382 - DNA, 36 bp, Artificial Sequence
  Synthetic oligonucleotide
atgaactcacctttgggatgcggacactacgaccga

SEQ ID NO: 10383 - DNA, 35 bp, Artificial Sequence
  Synthetic oligonucleotide
atgggctatggcttgtgtgccggtacaacaggggg

SEQ ID NO: 10384 - DNA, 37 bp, Artificial Sequence
  Synthetic oligonucleotide
attgtaagcagaaatacatgttgtctatagaatttga

SEQ ID NO: 10385 - DNA, 35 bp, Artificial Sequence
  Synthetic oligonucleotide
atttgcatccactcgattgtcacgtacaacgtgag

SEQ ID NO: 10386 - DNA, 36 bp, Artificial Sequence
  Synthetic oligonucleotide
caaaatgtccgtgattggtatcctctgtttcaggaa

SEQ ID NO: 10387 - DNA, 35 bp, Artificial Sequence
  Synthetic oligonucleotide
cctagcttacgccgtaactcaggacggactcagac

SEQ ID NO: 10388 - DNA, 38 bp, Artificial Sequence
  Synthetic oligonucleotide
gaagcttgcgtggcggtaatgttcgcgccgcgccatga

SEQ ID NO: 10389 - DNA, 35 bp, Artificial Sequence
  Synthetic oligonucleotide
gcactgttctggtcaaaaagtagaacagaagttac

SEQ ID NO: 10390 - DNA, 36 bp, Artificial Sequence
  Synthetic oligonucleotide
gcatgtctggatatcaactctctggggtctgggaca

SEQ ID NO: 10391 - DNA, 35 bp, Artificial Sequence
  Synthetic oligonucleotide
gccctggtggggcgcacgagcaccccatgttattt

SEQ ID NO: 10392 - DNA, 38 bp, Artificial Sequence
  Synthetic oligonucleotide
ggtctgctcgatagtcgcctgaacacggcgttatttga

SEQ ID NO: 10393 - DNA, 35 bp, Artificial Sequence
  Synthetic oligonucleotide
ggtggaacagccccaaataacgtgtgcggaggaga

SEQ ID NO: 10394 - DNA, 36 bp, Artificial Sequence
  Synthetic oligonucleotide
gtagcccccaagagcgctgggctatacggtgcccca

SEQ ID NO: 10395 - DNA, 36 bp, Artificial Sequence
  Synthetic oligonucleotide
taagtgggattttgcacccgcttaaattcgtatgta

SEQ ID NO: 10396 - DNA, 38 bp, Artificial Sequence
  Synthetic oligonucleotide
tacgtttttgccgaggtccaagggtacgtactgcatga

SEQ ID NO: 10397 - DNA, 36 bp, Artificial Sequence
  Synthetic oligonucleotide
tatccaaagtctatacgatggtctaacccggaagca

SEQ ID NO: 10398 - DNA, 36 bp, Artificial Sequence
  Synthetic oligonucleotide
tatggtgaagcttgcggagccacttcgaggggtgga

SEQ ID NO: 10399 - DNA, 38 bp, Artificial Sequence
  Synthetic oligonucleotide
tcctcgttaaaccgacggtcagtctggctaagctttga

SEQ ID NO: 10400 - DNA, 36 bp, Artificial Sequence
  Synthetic oligonucleotide
tcgagccgaggagagttgttgttccttatctgttga

SEQ ID NO: 10401 - DNA, 36 bp, Artificial Sequence
  Synthetic oligonucleotide
tctgtgctgcactgctagggcaaattctgaccccca

SEQ ID NO: 10402 - DNA, 38 bp, Artificial Sequence
  Synthetic oligonucleotide
tcttgcatctcggccaccaaccgggcagtcttttttga

SEQ ID NO: 10403 - DNA, 38 bp, Artificial Sequence
  Synthetic oligonucleotide
tgaaaaggtcgtcagtgttaaacttcaacatcgggtga

SEQ ID NO: 10404 - DNA, 38 bp, Artificial Sequence
  Synthetic oligonucleotide
tgaacacggccggattgtgggagccttcggcttcttga

SEQ ID NO: 10405 - DNA, 37 bp, Artificial Sequence
  Synthetic oligonucleotide
tgaggacggtctttgtcttggccggtacgacgagcga

SEQ ID NO: 10406 - DNA, 35 bp, Artificial Sequence
  Synthetic oligonucleotide
tggccacagggcgacctgtgatgagtactgttgga

SEQ ID NO: 10407 - DNA, 35 bp, Artificial Sequence
  Synthetic oligonucleotide
tgtctgtacagtctctgcaggccacgttcgaagaa

SEQ ID NO: 10408 - DNA, 38 bp, Artificial Sequence
  Synthetic oligonucleotide
tgtgacgattcgggaccgaagtcaaatcattgtgatga

SEQ ID NO: 10409 - DNA, 37 bp, Artificial Sequence
  Synthetic oligonucleotide
tgtggcatggtctaaaatccgcgtccaacatggatga

SEQ ID NO: 10410 - DNA, 37 bp, Artificial Sequence
  Synthetic oligonucleotide
tgtggtctgcacttgatagataggatacaagaaccga

SEQ ID NO: 10411 - DNA, 37 bp, Artificial Sequence
  Synthetic oligonucleotide
ttatgttgtaggcaccgcttagcgccccgataattga

SEQ ID NO: 10412 - DNA, 37 bp, Artificial Sequence
  Synthetic oligonucleotide
ttccctcgtagggtttcgcactacagaacactgctga

SEQ ID NO: 10413 - DNA, 36 bp, Artificial Sequence
  Synthetic oligonucleotide
ttgcaaaacataactgggccggacacagggataata

SEQ ID NO: 10414 - DNA, 36 bp, Artificial Sequence
  Synthetic oligonucleotide
ttgtctaacactggactgatatgctagtgtatccga

SEQ ID NO: 10415 - DNA, 38 bp, Artificial Sequence
  Synthetic oligonucleotide
agggcacggttcgttgggagggttggcacgtaacctga

SEQ ID NO: 10416 - DNA, 36 bp, Artificial Sequence
  Synthetic oligonucleotide
atcgccagaccggtccactcttgcggcgttacacga

SEQ ID NO: 10417 - DNA, 36 bp, Artificial Sequence
  Synthetic oligonucleotide
gagtacacgcgagtgtgtttccttgaggcttgataa

SEQ ID NO: 10418 - DNA, 36 bp, Artificial Sequence
  Synthetic oligonucleotide
ggagtgagcacgtgttaagcatccatgagggtccaa

SEQ ID NO: 10419 - DNA, 38 bp, Artificial Sequence
  Synthetic oligonucleotide
tacatatgagagcgcggtgcatgatggtcgctatgtga

SEQ ID NO: 10420 - DNA, 38 bp, Artificial Sequence
  Synthetic oligonucleotide
tacagtgggagtggatgtacagcagtagtatgatttga

SEQ ID NO: 10421 - DNA, 38 bp, Artificial Sequence
  Synthetic oligonucleotide
aaccggccaatggtcattgcgttcagggtaagtactga

SEQ ID NO: 10422 - DNA, 37 bp, Artificial Sequence
  Synthetic oligonucleotide
acgttacagacacgtctcataataagggaatcgggga

SEQ ID NO: 10423 - DNA, 36 bp, Artificial Sequence
  Synthetic oligonucleotide
agccaacggcacgaaccagggcttaccggggtgtga

SEQ ID NO: 10424 - DNA, 35 bp, Artificial Sequence
  Synthetic oligonucleotide
aggtctaggacaagaacgcaacacttgtactgctt

SEQ ID NO: 10425 - DNA, 35 bp, Artificial Sequence
  Synthetic oligonucleotide
ataaggccccgactggacaggcatatgctgggcgc

SEQ ID NO: 10426 - DNA, 38 bp, Artificial Sequence
  Synthetic oligonucleotide
atcgtgctgtgctccaaagttttctgcggaaggcgtga

SEQ ID NO: 10427 - DNA, 36 bp, Artificial Sequence
  Synthetic oligonucleotide
cacaactaggctctgccgggtcaccgttacgactta

SEQ ID NO: 10428 - DNA, 36 bp, Artificial Sequence
  Synthetic oligonucleotide
ctttggctaggaacattgcagggacctaggctctaa

SEQ ID NO: 10429 - DNA, 37 bp, Artificial Sequence
  Synthetic oligonucleotide
gaatacccggatgtaatctatggccatgtcttcctga

SEQ ID NO: 10430 - DNA, 35 bp, Artificial Sequence
  Synthetic oligonucleotide
gaattacctatgagtctcggaagcgaattggcttc

SEQ ID NO: 10431 - DNA, 37 bp, Artificial Sequence
  Synthetic oligonucleotide
gaattccatagactaaaagtcgaggccgaaggggcga

SEQ ID NO: 10432 - DNA, 35 bp, Artificial Sequence
  Synthetic oligonucleotide
gacgtaagtacagtcagggcattgtgtttggtccc

SEQ ID NO: 10433 - DNA, 36 bp, Artificial Sequence
  Synthetic oligonucleotide
gcctgggaatccacgagagtggttgttgatactgga

SEQ ID NO: 10434 - DNA, 37 bp, Artificial Sequence
  Synthetic oligonucleotide
gctgcccggagagtcgacgctagcgactacagggcga

SEQ ID NO: 10435 - DNA, 35 bp, Artificial Sequence
  Synthetic oligonucleotide
ggtgttacgccgccttaacgctgcctgcataccag

SEQ ID NO: 10436 - DNA, 38 bp, Artificial Sequence
  Synthetic oligonucleotide
gttgagcccgcaagtggatctctttccgtgagtcgtga

SEQ ID NO: 10437 - DNA, 37 bp, Artificial Sequence
  Synthetic oligonucleotide
gtttgcccgcgaagcgtaaccgtgctgacagggcgga

SEQ ID NO: 10438 - DNA, 38 bp, Artificial Sequence
  Synthetic oligonucleotide
tagcgtactctgcggacatgatggtagatggaaactga

SEQ ID NO: 10439 - DNA, 38 bp, Artificial Sequence
  Synthetic oligonucleotide
tccgcctatggaacaaaaacggtaaacataagggttga

SEQ ID NO: 10440 - DNA, 35 bp, Artificial Sequence
  Synthetic oligonucleotide
tcgaaagtggttttggttgattgcgtacgatcctg

SEQ ID NO: 10441 - DNA, 35 bp, Artificial Sequence
  Synthetic oligonucleotide
tgctttatagcttgttcaataatggttaaagcaag

SEQ ID NO: 10442 - DNA, 38 bp, Artificial Sequence
  Synthetic oligonucleotide
ttaacttgaagagccgtgtcttaatcatatttggttga

SEQ ID NO: 10443 - DNA, 35 bp, Artificial Sequence
  Synthetic oligonucleotide
ttggggattgtcatgacccgcgcctttccgcaggg

SEQ ID NO: 10444 - DNA, 37 bp, Artificial Sequence
  Synthetic oligonucleotide
gatcacaagcatcgaataatgctattagggggtgcga

SEQ ID NO: 10445 - DNA, 36 bp, Artificial Sequence
  Synthetic oligonucleotide
aaccgcgggttcacagccaaccgaaaactccctaca

SEQ ID NO: 10446 - DNA, 38 bp, Artificial Sequence
  Synthetic oligonucleotide
aagtatagcgcacttcgatgttggggagccatgactga

SEQ ID NO: 10447 - DNA, 37 bp, Artificial Sequence
  Synthetic oligonucleotide
aattgccacgctgcttgcagtgggctcgctggaagga

SEQ ID NO: 10448 - DNA, 35 bp, Artificial Sequence
  Synthetic oligonucleotide
accattactgggtgttttgatcacacttattggac

SEQ ID NO: 10449 - DNA, 35 bp, Artificial Sequence
  Synthetic oligonucleotide
acctctatatgcttgtagtgccgctgcgtgcttcc

SEQ ID NO: 10450 - DNA, 36 bp, Artificial Sequence
  Synthetic oligonucleotide
acgacgctaaacagtgcactacacccaccgtgttta

SEQ ID NO: 10451 - DNA, 36 bp, Artificial Sequence
  Synthetic oligonucleotide
acgagaaataacggaacgcgtcctcatgttagtgga

SEQ ID NO: 10452 - DNA, 35 bp, Artificial Sequence
  Synthetic oligonucleotide
acggagactacaggtttccgtagtagacagtctat

SEQ ID NO: 10453 - DNA, 38 bp, Artificial Sequence
  Synthetic oligonucleotide
actggtggctcacacagagtggagcatggacgcactga

SEQ ID NO: 10454 - DNA, 38 bp, Artificial Sequence
  Synthetic oligonucleotide
agaacacacgtcaggttttttctccgtaagaagtatga

SEQ ID NO: 10455 - DNA, 37 bp, Artificial Sequence
  Synthetic oligonucleotide
agagctattacgtgtccaggacgaagagatgtatgga

SEQ ID NO: 10456 - DNA, 35 bp, Artificial Sequence
  Synthetic oligonucleotide
agcaaggcatactagtcgtttcgttcgtatccttg

SEQ ID NO: 10457 - DNA, 35 bp, Artificial Sequence
  Synthetic oligonucleotide
agcattcgcaatgatggctctgtggtatgcattac

SEQ ID NO: 10458 - DNA, 36 bp, Artificial Sequence
  Synthetic oligonucleotide
agcgcgactagggtccgtcccatctctcttgtgtga

SEQ ID NO: 10459 - DNA, 35 bp, Artificial Sequence
  Synthetic oligonucleotide
agtcaaatgcacggtatgcatgtaagttaatcaag

SEQ ID NO: 10460 - DNA, 35 bp, Artificial Sequence
  Synthetic oligonucleotide
ataaagtacacgggttaggtggtgaccaaccgttg

SEQ ID NO: 10461 - DNA, 36 bp, Artificial Sequence
  Synthetic oligonucleotide
ataatacagtcaaaggccgatattgtacagctacta

SEQ ID NO: 10462 - DNA, 37 bp, Artificial Sequence
  Synthetic oligonucleotide
ataggactccgaaatgtgaggtatttttcgtgtcaga

SEQ ID NO: 10463 - DNA, 36 bp, Artificial Sequence
  Synthetic oligonucleotide
atgggaccttaacgtgacagcctcttgagacgttta

SEQ ID NO: 10464 - DNA, 35 bp, Artificial Sequence
  Synthetic oligonucleotide
attccaccgggcactgagccttcgctttataatcg

SEQ ID NO: 10465 - DNA, 37 bp, Artificial Sequence
  Synthetic oligonucleotide
atttgtgtgaaaatgcgtgaacactggcacaaataga

SEQ ID NO: 10466 - DNA, 36 bp, Artificial Sequence
  Synthetic oligonucleotide
caaatataaacgtaggtattcgtcagagttgtccta

SEQ ID NO: 10467 - DNA, 35 bp, Artificial Sequence
  Synthetic oligonucleotide
ccacagaaaggaacttctcttcagcgcgtagtcca

SEQ ID NO: 10468 - DNA, 37 bp, Artificial Sequence
  Synthetic oligonucleotide
ccccctcgatccggctgtccgtaaagctcttcataga

SEQ ID NO: 10469 - DNA, 35 bp, Artificial Sequence
  Synthetic oligonucleotide
cgatagtcggaccttgtaatgttgaaactccccgt

SEQ ID NO: 10470 - DNA, 37 bp, Artificial Sequence
  Synthetic oligonucleotide
cgttatgcgacagtacgcagagtgtggcctggggaga

SEQ ID NO: 10471 - DNA, 35 bp, Artificial Sequence
  Synthetic oligonucleotide
cttcacgcgcatggaaagtcctgcggtatggtcgt

SEQ ID NO: 10472 - DNA, 38 bp, Artificial Sequence
  Synthetic oligonucleotide
cttgagtcttgctctttccgtgatgcggccatgattga

SEQ ID NO: 10473 - DNA, 38 bp, Artificial Sequence
  Synthetic oligonucleotide
gaacatgtccggcaattcgtgcggctcaccgtagatga

SEQ ID NO: 10474 - DNA, 38 bp, Artificial Sequence
  Synthetic oligonucleotide
gaagaatttagtggagcaagggaagttagttattatga

SEQ ID NO: 10475 - DNA, 36 bp, Artificial Sequence
  Synthetic oligonucleotide
gaagcgaaggtgcggattgcggttgtgatgacctga

SEQ ID NO: 10476 - DNA, 36 bp, Artificial Sequence
  Synthetic oligonucleotide
gaagtcctttcagtgcgggggctgtagtcttgcgta

SEQ ID NO: 10477 - DNA, 38 bp, Artificial Sequence
  Synthetic oligonucleotide
gaatcgtatcggtggtattttagacttgggaggaatga

SEQ ID NO: 10478 - DNA, 37 bp, Artificial Sequence
  Synthetic oligonucleotide
gacccgacgtacagattcgcggtcacattacttgtga

SEQ ID NO: 10479 - DNA, 37 bp, Artificial Sequence
  Synthetic oligonucleotide
gacgtcaccacttacacgcccgcctttctgaatgaga

SEQ ID NO: 10480 - DNA, 38 bp, Artificial Sequence
  Synthetic oligonucleotide
gactgcaatgcgatggcgtcacttacattttctaatga

SEQ ID NO: 10481 - DNA, 36 bp, Artificial Sequence
  Synthetic oligonucleotide
gataaagggaatacgattggcgagcctcgtctgcca

SEQ ID NO: 10482 - DNA, 36 bp, Artificial Sequence
  Synthetic oligonucleotide
gatggctctagcctcatcactctatagggttataaa

SEQ ID NO: 10483 - DNA, 38 bp, Artificial Sequence
  Synthetic oligonucleotide
gcaaaatactgtagcgcttctcagcagactgttggtga

SEQ ID NO: 10484 - DNA, 38 bp, Artificial Sequence
  Synthetic oligonucleotide
gcaatggaggttcagtcgccatgaaaggtcgttattga

SEQ ID NO: 10485 - DNA, 37 bp, Artificial Sequence
  Synthetic oligonucleotide
gcatccggatgcaaagctcgtgctaggatggccccga

SEQ ID NO: 10486 - DNA, 38 bp, Artificial Sequence
  Synthetic oligonucleotide
gcatggcccgttatagtcgttaactctatggacattga

SEQ ID NO: 10487 - DNA, 38 bp, Artificial Sequence
  Synthetic oligonucleotide
gccattctctggcctatttttggggcccgtttgggtga

SEQ ID NO: 10488 - DNA, 38 bp, Artificial Sequence
  Synthetic oligonucleotide
gcctgaatagtttgctagtcatcccgtgtccactgtga

SEQ ID NO: 10489 - DNA, 38 bp, Artificial Sequence
  Synthetic oligonucleotide
gcgcccaatctgagatcgcctgtttgggggcgctatga

SEQ ID NO: 10490 - DNA, 37 bp, Artificial Sequence
  Synthetic oligonucleotide
gcgtggcttggacctactaagtcaatctgcagttaga

SEQ ID NO: 10491 - DNA, 37 bp, Artificial Sequence
  Synthetic oligonucleotide
gctttttgatcagaacgtggtggttggctcactgaga

SEQ ID NO: 10492 - DNA, 36 bp, Artificial Sequence
  Synthetic oligonucleotide
ggactatgaactgcctttgtgaaccctgctgtctta

SEQ ID NO: 10493 - DNA, 37 bp, Artificial Sequence
  Synthetic oligonucleotide
ggcgacaatcttgaacgaacaggcggtttagcgggga

SEQ ID NO: 10494 - DNA, 36 bp, Artificial Sequence
  Synthetic oligonucleotide
ggtaggggacttcaaccggcaccggtggctcttcta

SEQ ID NO: 10495 - DNA, 38 bp, Artificial Sequence
  Synthetic oligonucleotide
ggttagagctccgatttagtttacctgagccggtatga

SEQ ID NO: 10496 - DNA, 37 bp, Artificial Sequence
  Synthetic oligonucleotide
gtatgctctacggacataagctgcgaatattgtacga

SEQ ID NO: 10497 - DNA, 36 bp, Artificial Sequence
  Synthetic oligonucleotide
gtcacggttattatggcgtacattgcggccatagca

SEQ ID NO: 10498 - DNA, 35 bp, Artificial Sequence
  Synthetic oligonucleotide
gtccgaggtcccaggagcaccggttgcacgccgtg

SEQ ID NO: 10499 - DNA, 37 bp, Artificial Sequence
  Synthetic oligonucleotide
gtctgcgcacggctagtcgacgtgcttatggcgggga

SEQ ID NO: 10500 - DNA, 35 bp, Artificial Sequence
  Synthetic oligonucleotide
gtctgggtgcaatcggtgtaggttcttattaacta

SEQ ID NO: 10501 - DNA, 38 bp, Artificial Sequence
  Synthetic oligonucleotide
gtgccataaaactttaacgccatctcatagggacgtga

SEQ ID NO: 10502 - DNA, 31 bp, Artificial Sequence
  Synthetic oligonucleotide
gtggatcacacttcacgaaatagtattaaag

SEQ ID NO: 10503 - DNA, 35 bp, Artificial Sequence
  Synthetic oligonucleotide
taacagtactgccatgcaagtgttagcgcgaccgt

SEQ ID NO: 10504 - DNA, 36 bp, Artificial Sequence
  Synthetic oligonucleotide
taacgctgactgttggtcacgaagggttgcactgaa

SEQ ID NO: 10505 - DNA, 38 bp, Artificial Sequence
  Synthetic oligonucleotide
taatggccgtacgtacgatgtgcgttgtgataggtcga

SEQ ID NO: 10506 - DNA, 36 bp, Artificial Sequence
  Synthetic oligonucleotide
tacagcagtacgtttggtgattcgagtcatcgtcaa

SEQ ID NO: 10507 - DNA, 37 bp, Artificial Sequence
  Synthetic oligonucleotide
tacgacgtggcgtaagtatatactccattctacatga

SEQ ID NO: 10508 - DNA, 35 bp, Artificial Sequence
  Synthetic oligonucleotide
tagaagcataacagtgatgtgagcgctgggtcatg

SEQ ID NO: 10509 - DNA, 36 bp, Artificial Sequence
  Synthetic oligonucleotide
tagagcagacatcgtagtttgaaccaggcttgagta

SEQ ID NO: 10510 - DNA, 36 bp, Artificial Sequence
  Synthetic oligonucleotide
taggggtggagtgaatcgaccgcgagaacacaacga

SEQ ID NO: 10511 - DNA, 38 bp, Artificial Sequence
  Synthetic oligonucleotide
tagttcacggctaatttgctgatcccgcttccaggtga

SEQ ID NO: 10512 - DNA, 35 bp, Artificial Sequence
  Synthetic oligonucleotide
tatgaccatccactgggcatcaagaatctgtggtg

SEQ ID NO: 10513 - DNA, 35 bp, Artificial Sequence
  Synthetic oligonucleotide
tctaacacgcactgtagtaggagacagtccgcggt

SEQ ID NO: 10514 - DNA, 35 bp, Artificial Sequence
  Synthetic oligonucleotide
tgaaaaggtgcttttacagccacaactgaaggtcg

SEQ ID NO: 10515 - DNA, 37 bp, Artificial Sequence
  Synthetic oligonucleotide
tgaccgtgatacagttggaagggttatacatggccga

SEQ ID NO: 10516 - DNA, 36 bp, Artificial Sequence
  Synthetic oligonucleotide
tgagtcactgcagaatcacggtgctttcacgaggca

SEQ ID NO: 10517 - DNA, 37 bp, Artificial Sequence
  Synthetic oligonucleotide
tgcgggcttgaattattgtatgaagacaagccttaga

SEQ ID NO: 10518 - DNA, 35 bp, Artificial Sequence
  Synthetic oligonucleotide
tgctctggcaatcagggcggatacgtaggtgttgg

SEQ ID NO: 10519 - DNA, 35 bp, Artificial Sequence
  Synthetic oligonucleotide
tgcttgagggcgctcctcaagcccacggtaagtac

SEQ ID NO: 10520 - DNA, 36 bp, Artificial Sequence
  Synthetic oligonucleotide
tggtctgaagtcttggaagatgaggtccacgccgga

SEQ ID NO: 10521 - DNA, 36 bp, Artificial Sequence
  Synthetic oligonucleotide
tgtacggcttggaattaggagacaattggcgtcgta

SEQ ID NO: 10522 - DNA, 37 bp, Artificial Sequence
  Synthetic oligonucleotide
ttagtaggggagtcttgactatcaggtgcatattcga

SEQ ID NO: 10523 - DNA, 35 bp, Artificial Sequence
  Synthetic oligonucleotide
ttcactacaacttaacattaatttctgagcatgcg

SEQ ID NO: 10524 - DNA, 35 bp, Artificial Sequence
  Synthetic oligonucleotide
ttccacgaggggagacgtaaatcggcgttaagaag

SEQ ID NO: 10525 - DNA, 38 bp, Artificial Sequence
  Synthetic oligonucleotide
ttcccttgagtcgtagagaatatgaggagtaatgctga

SEQ ID NO: 10526 - DNA, 37 bp, Artificial Sequence
  Synthetic oligonucleotide
tttcaatgcggatgattgtatctatacgcccaccaga

SEQ ID NO: 10527 - DNA, 35 bp, Artificial Sequence
  Synthetic oligonucleotide
tttgcgagcctgcccgaagtcgtacgcggggcgta

SEQ ID NO: 10528 - DNA, 36 bp, Artificial Sequence
  Synthetic oligonucleotide
tttggcgcttgagcagtacctaatttcgctcgagta

SEQ ID NO: 10529 - DNA, 35 bp, Artificial Sequence
  Synthetic oligonucleotide
tttgtgcaacagatgcggtggttatgcttacgaac

SEQ ID NO: 10530 - DNA, 38 bp, Artificial Sequence
  Synthetic oligonucleotide
gcttaatacactgctgagcaggcataaagattgcgtga

SEQ ID NO: 10531 - DNA, 37 bp, Artificial Sequence
  Synthetic oligonucleotide
ggttagatgcatgtatgcgccgcatggtgggttggca

SEQ ID NO: 10532 - DNA, 37 bp, Artificial Sequence
  Synthetic oligonucleotide
agggaacggacgtggaaatggtgtgagatgcaaggga

SEQ ID NO: 10533 - DNA, 36 bp, Artificial Sequence
  Synthetic oligonucleotide
gttgtgctacaatagcactatgtataacacgaggta

SEQ ID NO: 10534 - DNA, 38 bp, Artificial Sequence
  Synthetic oligonucleotide
aactgcttatatcggttagtccctgtataagaacctga

SEQ ID NO: 10535 - DNA, 37 bp, Artificial Sequence
  Synthetic oligonucleotide
accaacctcttaactaagcaggtgtggtcatcgacga

SEQ ID NO: 10536 - DNA, 35 bp, Artificial Sequence
  Synthetic oligonucleotide
acctagtcaacagtcacaaaggtcccaattcctgc

SEQ ID NO: 10537 - DNA, 36 bp, Artificial Sequence
  Synthetic oligonucleotide
acgcaatcagtcgtatgtcaagaggtagttgttcta

SEQ ID NO: 10538 - DNA, 35 bp, Artificial Sequence
  Synthetic oligonucleotide
agaacacgtaatgaatagccggccacatccgaagg

SEQ ID NO: 10539 - DNA, 35 bp, Artificial Sequence
  Synthetic oligonucleotide
agtcgttgaaggacaaggacctccctgtacggggt

SEQ ID NO: 10540 - DNA, 37 bp, Artificial Sequence
  Synthetic oligonucleotide
agtgtatcgaaagcgcgcacacgaagccatgtaagga

SEQ ID NO: 10541 - DNA, 36 bp, Artificial Sequence
  Synthetic oligonucleotide
atacagccgtacggcactacaggtaattattgcgga

SEQ ID NO: 10542 - DNA, 38 bp, Artificial Sequence
  Synthetic oligonucleotide
atactgcgccaagtaattccacagcgcttatatactga

SEQ ID NO: 10543 - DNA, 36 bp, Artificial Sequence
  Synthetic oligonucleotide
atcaggttccacttacgtctgtaactgagcgtagca

SEQ ID NO: 10544 - DNA, 36 bp, Artificial Sequence
  Synthetic oligonucleotide
atgacatgaactgggtcatgtggttgtagaaagaga

SEQ ID NO: 10545 - DNA, 36 bp, Artificial Sequence
  Synthetic oligonucleotide
attcatatcgaggtacacaagcggttgctctaggca

SEQ ID NO: 10546 - DNA, 37 bp, Artificial Sequence
  Synthetic oligonucleotide
caacagggtacatcccgatgtaaccgtgtaggattga

SEQ ID NO: 10547 - DNA, 37 bp, Artificial Sequence
  Synthetic oligonucleotide
ctcggggccgagacgtccacgggctagaataatgaga

SEQ ID NO: 10548 - DNA, 35 bp, Artificial Sequence
  Synthetic oligonucleotide
gaacctccgggcttgtgggatgtgtacgtactgcg

SEQ ID NO: 10549 - DNA, 37 bp, Artificial Sequence
  Synthetic oligonucleotide
gagctcatggttggttggttctcagtaggaaggacga

SEQ ID NO: 10550 - DNA, 36 bp, Artificial Sequence
  Synthetic oligonucleotide
gcccacaaactcgaaggaatcggatcgtaaacgtga

SEQ ID NO: 10551 - DNA, 36 bp, Artificial Sequence
  Synthetic oligonucleotide
gcccaccggttctaccgcgtgggggctgactggtaa

SEQ ID NO: 10552 - DNA, 36 bp, Artificial Sequence
  Synthetic oligonucleotide
ggacacccgaccagtgtgtgcgcacaggcccgtaga

SEQ ID NO: 10553 - DNA, 37 bp, Artificial Sequence
  Synthetic oligonucleotide
ggactgggcgaatgggcatgaatgcctgaatccaaga

SEQ ID NO: 10554 - DNA, 37 bp, Artificial Sequence
  Synthetic oligonucleotide
ggataagcagtgcagtcgtgactcgaatcagttttga

SEQ ID NO: 10555 - DNA, 37 bp, Artificial Sequence
  Synthetic oligonucleotide
ggcgtgattcacatgtcagcatacacgaaaaatacga

SEQ ID NO: 10556 - DNA, 35 bp, Artificial Sequence
  Synthetic oligonucleotide
ggggttggaagaacattattagtgtctatgcgaaa

SEQ ID NO: 10557 - DNA, 35 bp, Artificial Sequence
  Synthetic oligonucleotide
gtaatgtagcgccctgtaggactgcgtttcaagcg

SEQ ID NO: 10558 - DNA, 38 bp, Artificial Sequence
  Synthetic oligonucleotide
gtcatcaattaggtggtgatgtgctcgcgctataatga

SEQ ID NO: 10559 - DNA, 37 bp, Artificial Sequence
  Synthetic oligonucleotide
gttacgcgtaaagcgcatgactggaaaatacgggcga

SEQ ID NO: 10560 - DNA, 36 bp, Artificial Sequence
  Synthetic oligonucleotide
taattgcggtcggaggtgccgcgaatccaaacagta

SEQ ID NO: 10561 - DNA, 36 bp, Artificial Sequence
  Synthetic oligonucleotide
tcaacgtgtgtaccgtgcacgctctctggtgatcga

SEQ ID NO: 10562 - DNA, 38 bp, Artificial Sequence
  Synthetic oligonucleotide
tcaaggccaagaaacgccgaccgtatgaacgtgcctga

SEQ ID NO: 10563 - DNA, 36 bp, Artificial Sequence
  Synthetic oligonucleotide
tcatgactaacgggctaccgctggacatcttacgaa

SEQ ID NO: 10564 - DNA, 36 bp, Artificial Sequence
  Synthetic oligonucleotide
tccaccaccaaatagcgactcgtgactacctgtgca

SEQ ID NO: 10565 - DNA, 36 bp, Artificial Sequence
  Synthetic oligonucleotide
tcttgctgagctcacgtgaaccattggcacaaggca

SEQ ID NO: 10566 - DNA, 38 bp, Artificial Sequence
  Synthetic oligonucleotide
tgaattgtgccaaagcggaggttttgatagtggcttga

SEQ ID NO: 10567 - DNA, 37 bp, Artificial Sequence
  Synthetic oligonucleotide
tgcggtgtcatgccggacggggtctactaaagctgga

SEQ ID NO: 10568 - DNA, 35 bp, Artificial Sequence
  Synthetic oligonucleotide
ttgtgccataattaggtaccaaggttacgtgcgaa

SEQ ID NO: 10569 - DNA, 36 bp, Artificial Sequence
  Synthetic oligonucleotide
atacgccaagggaggcgtagaacggtcttagtcaaa

SEQ ID NO: 10570 - DNA, 35 bp, Artificial Sequence
  Synthetic oligonucleotide
gcatggctaagtgtggcgtcacatggccgcacccc

SEQ ID NO: 10571 - DNA, 36 bp, Artificial Sequence
  Synthetic oligonucleotide
gaatagcacccactcgaggaattgggctaacatgta

SEQ ID NO: 10572 - DNA, 36 bp, Artificial Sequence
  Synthetic oligonucleotide
gcccaatgttcacgtgttaggtggtgtgtgagcaaa

SEQ ID NO: 10573 - DNA, 37 bp, Artificial Sequence
  Synthetic oligonucleotide
actgggttcggcccttaggtctgtttgagaagattga

SEQ ID NO: 10574 - DNA, 35 bp, Artificial Sequence
  Synthetic oligonucleotide
atagtgccgcatagccgcgtttcttatagtaaaca

SEQ ID NO: 10575 - DNA, 35 bp, Artificial Sequence
  Synthetic oligonucleotide
caagcataggaagcggatatcataagacgaaccgc

SEQ ID NO: 10576 - DNA, 36 bp, Artificial Sequence
  Synthetic oligonucleotide
gacacctccagtcagggtggtagacaggtcctcgaa

SEQ ID NO: 10577 - DNA, 36 bp, Artificial Sequence
  Synthetic oligonucleotide
gagtcacgatagggtaagatcgaatgattaacgcaa

SEQ ID NO: 10578 - DNA, 37 bp, Artificial Sequence
  Synthetic oligonucleotide
gatcattttcaaagaggtgaattgctataatgcggga

SEQ ID NO: 10579 - DNA, 37 bp, Artificial Sequence
  Synthetic oligonucleotide
gatccatgctcagggtacaatcactcatgagattgga

SEQ ID NO: 10580 - DNA, 36 bp, Artificial Sequence
  Synthetic oligonucleotide
ggccaggattattttgtgttagaggcctttctgtaa

SEQ ID NO: 10581 - DNA, 37 bp, Artificial Sequence
  Synthetic oligonucleotide
agtgaacgcgcaaggacataggtgagactggtgggga

SEQ ID NO: 10582 - DNA, 35 bp, Artificial Sequence
  Synthetic oligonucleotide
agtaggttggattgacataaatcccgtgcgttatt

SEQ ID NO: 10583 - DNA, 36 bp, Artificial Sequence
  Synthetic oligonucleotide
atgatccagtcaacggggaaaggggcgaccaatgca

SEQ ID NO: 10584 - DNA, 36 bp, Artificial Sequence
  Synthetic oligonucleotide
gaagtcttggccgggcgaccataaagaacgtggcca

SEQ ID NO: 10585 - DNA, 37 bp, Artificial Sequence
  Synthetic oligonucleotide
gccctagactagtgcactctcacctctggtgcgccga

SEQ ID NO: 10586 - DNA, 37 bp, Artificial Sequence
  Synthetic oligonucleotide
gcttgctccgcacgtagacccatgtattgcgtgtaga

SEQ ID NO: 10587 - DNA, 36 bp, Artificial Sequence
  Synthetic oligonucleotide
tagcccgtaataggcgacgaagggtgggtacctcga

SEQ ID NO: 10588 - DNA, 37 bp, Artificial Sequence
  Synthetic oligonucleotide
tcagcgaatgaacccttgctgcagttttgaagcacga

SEQ ID NO: 10589 - DNA, 35 bp, Artificial Sequence
  Synthetic oligonucleotide
tgactaagcaacccgttagaccggttagtcgttaa

SEQ ID NO: 10590 - DNA, 38 bp, Artificial Sequence
  Synthetic oligonucleotide
ggagtcgactggtgtctgaatataccccggctacatga

SEQ ID NO: 10591 - DNA, 35 bp, Artificial Sequence
  Synthetic oligonucleotide
gtctcagccatgatcgtagtaatcccaaccatatg

SEQ ID NO: 10592 - DNA, 35 bp, Artificial Sequence
  Synthetic oligonucleotide
aaccgggggggaactatacaggagatgcgggattg

SEQ ID NO: 10593 - DNA, 37 bp, Artificial Sequence
  Synthetic oligonucleotide
aatgggaacaagtatctcgccaaggagcatgccagga

SEQ ID NO: 10594 - DNA, 35 bp, Artificial Sequence
  Synthetic oligonucleotide
acccgttagaggtttcaacctaccgggtcgcccgc

SEQ ID NO: 10595 - DNA, 37 bp, Artificial Sequence
  Synthetic oligonucleotide
agcccctgtaacactcacacccacctagatagctcga

SEQ ID NO: 10596 - DNA, 35 bp, Artificial Sequence
  Synthetic oligonucleotide
agcgcaacttggtccgtacaggttatcacaggggg

SEQ ID NO: 10597 - DNA, 38 bp, Artificial Sequence
  Synthetic oligonucleotide
aggagagcgcattgccgtccgccggggatacaaagtga

SEQ ID NO: 10598 - DNA, 36 bp, Artificial Sequence
  Synthetic oligonucleotide
atgaacggggcttacttgtgtaaggcgccttctgga

SEQ ID NO: 10599 - DNA, 37 bp, Artificial Sequence
  Synthetic oligonucleotide
cagagccattaacgattttagagttggctctaactga

SEQ ID NO: 10600 - DNA, 36 bp, Artificial Sequence
  Synthetic oligonucleotide
cccccggtacgagatcatccgtccagtgggagccaa

SEQ ID NO: 10601 - DNA, 35 bp, Artificial Sequence
  Synthetic oligonucleotide
gaagaacgacgaaatcgttcggtatgccgtgctct

SEQ ID NO: 10602 - DNA, 37 bp, Artificial Sequence
  Synthetic oligonucleotide
gaagctctcaattgtatgttcagcattcccaacagga

SEQ ID NO: 10603 - DNA, 35 bp, Artificial Sequence
  Synthetic oligonucleotide
gaccggagagagtcgataggtaatcagtaaccggg

SEQ ID NO: 10604 - DNA, 37 bp, Artificial Sequence
  Synthetic oligonucleotide
gacgaagccaacgctgaacatcactatggagggccga

SEQ ID NO: 10605 - DNA, 36 bp, Artificial Sequence
  Synthetic oligonucleotide
gactaagtagggacccggacgttgctgaatatctca

SEQ ID NO: 10606 - DNA, 35 bp, Artificial Sequence
  Synthetic oligonucleotide
gactgcgctaacggcgtaccagtaacggggtgagc

SEQ ID NO: 10607 - DNA, 38 bp, Artificial Sequence
  Synthetic oligonucleotide
gcaagtatcaggggctcgccataagcgttaaggcttga

SEQ ID NO: 10608 - DNA, 36 bp, Artificial Sequence
  Synthetic oligonucleotide
gcaatctgggaaaagggttaccgcctgctaggacta

SEQ ID NO: 10609 - DNA, 37 bp, Artificial Sequence
  Synthetic oligonucleotide
gcacaatgaacgtgaaggttgcaggctcataataaga

SEQ ID NO: 10610 - DNA, 37 bp, Artificial Sequence
  Synthetic oligonucleotide
gcaccgcgggttacaatcacgtggtaagggtatttga

SEQ ID NO: 10611 - DNA, 38 bp, Artificial Sequence
  Synthetic oligonucleotide
gcagagtgcgcactatgaagtcctgcggaagtgggtga

SEQ ID NO: 10612 - DNA, 36 bp, Artificial Sequence
  Synthetic oligonucleotide
gcgactccggcttgacgttcgcccaaatgaccgtga

SEQ ID NO: 10613 - DNA, 37 bp, Artificial Sequence
  Synthetic oligonucleotide
gcgatagcctaaattgttgccggagacaatatgtaga

SEQ ID NO: 10614 - DNA, 37 bp, Artificial Sequence
  Synthetic oligonucleotide
gctcccacatgatcggacttgtagttggtaggtgtga

SEQ ID NO: 10615 - DNA, 36 bp, Artificial Sequence
  Synthetic oligonucleotide
gtaacgccaatgcgaaattccccgaaagctcagcaa

SEQ ID NO: 10616 - DNA, 35 bp, Artificial Sequence
  Synthetic oligonucleotide
gtccgtgactgactagtaagtgcaggagcctactt

SEQ ID NO: 10617 - DNA, 37 bp, Artificial Sequence
  Synthetic oligonucleotide
gtgctaggatgtataagataaatagagcaggtttgga

SEQ ID NO: 10618 - DNA, 37 bp, Artificial Sequence
  Synthetic oligonucleotide
gtggaattataatacctcacagtaaagccggtgttga

SEQ ID NO: 10619 - DNA, 35 bp, Artificial Sequence
  Synthetic oligonucleotide
tgagctcccgactcagccgttacgtacgcattagc

SEQ ID NO: 10620 - DNA, 35 bp, Artificial Sequence
  Synthetic oligonucleotide
tgcaacttgacctgcttcatgaggtaacctactaa

SEQ ID NO: 10621 - DNA, 37 bp, Artificial Sequence
  Synthetic oligonucleotide
tgcctaacgcagctcgagaagaggcgcccccaccgga

SEQ ID NO: 10622 - DNA, 35 bp, Artificial Sequence
  Synthetic oligonucleotide
tgctcgctgggagcggttatgcggtcaggccattg

SEQ ID NO: 10623 - DNA, 38 bp, Artificial Sequence
  Synthetic oligonucleotide
tgtacgctatggatgatggactatggggataaacctga

SEQ ID NO: 10624 - DNA, 35 bp, Artificial Sequence
  Synthetic oligonucleotide
tgttatcatgctttagggctgaaatttggaacggt

SEQ ID NO: 10625 - DNA, 35 bp, Artificial Sequence
  Synthetic oligonucleotide
tttgcactgccagttaaccacggcacggagtgcga

SEQ ID NO: 10626 - DNA, 37 bp, Artificial Sequence
  Synthetic oligonucleotide
tagggtcactagcacttgttgatttgcctatctggga

SEQ ID NO: 10627 - DNA, 37 bp, Artificial Sequence
  Synthetic oligonucleotide
aagacgggcaaacggttgcgaggccgataatccggga

SEQ ID NO: 10628 - DNA, 38 bp, Artificial Sequence
  Synthetic oligonucleotide
acaaaacgatacagcggactttgtttatattgcgatga

SEQ ID NO: 10629 - DNA, 35 bp, Artificial Sequence
  Synthetic oligonucleotide
accgtacgtgtgtcggaactaaaggcagattttta

SEQ ID NO: 10630 - DNA, 37 bp, Artificial Sequence
  Synthetic oligonucleotide
acgcctagcagaaactatgtgtagtgctgactattga

SEQ ID NO: 10631 - DNA, 38 bp, Artificial Sequence
  Synthetic oligonucleotide
agcgacctctcatgaggtccactgttagcagtacatga

SEQ ID NO: 10632 - DNA, 35 bp, Artificial Sequence
  Synthetic oligonucleotide
atcagtccgagcataaggatagcgtggtgatacta

SEQ ID NO: 10633 - DNA, 37 bp, Artificial Sequence
  Synthetic oligonucleotide
gaatcaagaacccggtgaatgacgtaaggaagtgtga

SEQ ID NO: 10634 - DNA, 38 bp, Artificial Sequence
  Synthetic oligonucleotide
gacaggtctttggtgagctatcctgtccatctaagtga

SEQ ID NO: 10635 - DNA, 35 bp, Artificial Sequence
  Synthetic oligonucleotide
gacgtacccttagagactcacagttcgacttcgga

SEQ ID NO: 10636 - DNA, 36 bp, Artificial Sequence
  Synthetic oligonucleotide
gatgtggcatggttggcgcaatttaaaagcgccgta

SEQ ID NO: 10637 - DNA, 35 bp, Artificial Sequence
  Synthetic oligonucleotide
gcccctcagcaacaagcatgtaatggagctatcgc

SEQ ID NO: 10638 - DNA, 36 bp, Artificial Sequence
  Synthetic oligonucleotide
gcccgttaggctgcctgcacagaaggctcaaggcta

SEQ ID NO: 10639 - DNA, 37 bp, Artificial Sequence
  Synthetic oligonucleotide
gccgttgaaggtctatacaatctcccgttagagcgga

SEQ ID NO: 10640 - DNA, 36 bp, Artificial Sequence
  Synthetic oligonucleotide
ggagggtgtgacgtacggatcagtaatcccgtacaa

SEQ ID NO: 10641 - DNA, 36 bp, Artificial Sequence
  Synthetic oligonucleotide
gggatacgaagtgtgccgacatccgaaagcggatta

SEQ ID NO: 10642 - DNA, 37 bp, Artificial Sequence
  Synthetic oligonucleotide
gttccactggtgaagcgtactagcgtacggttagaga

SEQ ID NO: 10643 - DNA, 37 bp, Artificial Sequence
  Synthetic oligonucleotide
tagtgaggcgtaaccaccagggctccgtgcgtacgga

SEQ ID NO: 10644 - DNA, 38 bp, Artificial Sequence
  Synthetic oligonucleotide
tgtgaacggaaaggtcatgagtagtatttcgacattga

SEQ ID NO: 10645 - DNA, 38 bp, Artificial Sequence
  Synthetic oligonucleotide
ttcgactgaaatagccttgcaaaaggcttgtggcttga

SEQ ID NO: 10646 - DNA, 37 bp, Artificial Sequence
  Synthetic oligonucleotide
tacacggggtcaggcgtggcgggcatgttacgcgaga

SEQ ID NO: 10647 - DNA, 36 bp, Artificial Sequence
  Synthetic oligonucleotide
tcatggtgccagtgtttatggaagcttagctgggga

SEQ ID NO: 10648 - DNA, 37 bp, Artificial Sequence
  Synthetic oligonucleotide
gaacggtgcctcggtccgcttcggagtatgaccacga

SEQ ID NO: 10649 - DNA, 36 bp, Artificial Sequence
  Synthetic oligonucleotide
gataaatcctcagtaggacagtgaacacctaatgca

SEQ ID NO: 10650 - DNA, 35 bp, Artificial Sequence
  Synthetic oligonucleotide
gatttcccctagacgtgtccctgttaggcataacg

SEQ ID NO: 10651 - DNA, 35 bp, Artificial Sequence
  Synthetic oligonucleotide
tgtttggtgttggtccaaggttctaaagtggtgct

SEQ ID NO: 10652 - DNA, 35 bp, Artificial Sequence
  Synthetic oligonucleotide
tatcggaaatggggtgtcggatggtcttgcttcta

SEQ ID NO: 10653 - DNA, 36 bp, Artificial Sequence
  Synthetic oligonucleotide
gcctatagtcctgataacctcgcgagacccatggca

SEQ ID NO: 10654 - DNA, 38 bp, Artificial Sequence
  Synthetic oligonucleotide
tacatcgcaatgcatgggcaatttttcaggacgagtga

SEQ ID NO: 10655 - DNA, 35 bp, Artificial Sequence
  Synthetic oligonucleotide
tcttcgtacccagtaatggattaaacatgttgtca

SEQ ID NO: 10656 - DNA, 38 bp, Artificial Sequence
  Synthetic oligonucleotide
tccgctcgtaaaacgcaagcggaatcgtccctgaatga

SEQ ID NO: 10657 - DNA, 38 bp, Artificial Sequence
  Synthetic oligonucleotide
gaccccggttagatgcgtttaacttacgtcatttgtga

SEQ ID NO: 10658 - DNA, 38 bp, Artificial Sequence
  Synthetic oligonucleotide
gacgaatgtctcgtccagggttaactgtgtgagagtga

SEQ ID NO: 10659 - DNA, 37 bp, Artificial Sequence
  Synthetic oligonucleotide
gcactgctccggggtagtgatagactgaacgtagaga

SEQ ID NO: 10660 - DNA, 35 bp, Artificial Sequence
  Synthetic oligonucleotide
gtaccacgtgctcgcttctgtgattcgacgaggct

SEQ ID NO: 10661 - DNA, 38 bp, Artificial Sequence
  Synthetic oligonucleotide
taggatgttttccatcctataacaacaatgaatgctga

SEQ ID NO: 10662 - DNA, 36 bp, Artificial Sequence
  Synthetic oligonucleotide
tcgtacgtgagggactttgcgagactttttactaca

SEQ ID NO: 10663 - DNA, 37 bp, Artificial Sequence
  Synthetic oligonucleotide
tgaacgtctggtggataacattagtaatgagtaaaga

SEQ ID NO: 10664 - DNA, 36 bp, Artificial Sequence
  Synthetic oligonucleotide
tgcgtacgcggtcaagcgcgctacccccgggtacga

SEQ ID NO: 10665 - DNA, 35 bp, Artificial Sequence
  Synthetic oligonucleotide
aaaacgccggagaagacggagtctaaacagacggg

SEQ ID NO: 10666 - DNA, 37 bp, Artificial Sequence
  Synthetic oligonucleotide
aacatcgagatggatggtccatttgagatcagtggga

SEQ ID NO: 10667 - DNA, 38 bp, Artificial Sequence
  Synthetic oligonucleotide
aactgagcgggacggtgctaagtagtactaagctctga

SEQ ID NO: 10668 - DNA, 36 bp, Artificial Sequence
  Synthetic oligonucleotide
aataaggcctgtcctgtcagggctcccgcttgtata

SEQ ID NO: 10669 - DNA, 35 bp, Artificial Sequence
  Synthetic oligonucleotide
aattgaccggttgcgaaagttacgtcaatgtgagg

SEQ ID NO: 10670 - DNA, 35 bp, Artificial Sequence
  Synthetic oligonucleotide
acaagagaaagcaagttgggtagaaggcacatgat

SEQ ID NO: 10671 - DNA, 38 bp, Artificial Sequence
  Synthetic oligonucleotide
acagtggtagtcagacactccgagacggatatgactga

SEQ ID NO: 10672 - DNA, 36 bp, Artificial Sequence
  Synthetic oligonucleotide
acagttcgagtatcgtacacgtaccgcatcaatcca

SEQ ID NO: 10673 - DNA, 35 bp, Artificial Sequence
  Synthetic oligonucleotide
actatcaaggtaagggatctacgtaggtcattgtg

SEQ ID NO: 10674 - DNA, 36 bp, Artificial Sequence
  Synthetic oligonucleotide
actccccgccgggttaagctgtctggtgctctctga

SEQ ID NO: 10675 - DNA, 37 bp, Artificial Sequence
  Synthetic oligonucleotide
actcgtaattaccaacactttacgacgagagacggga

SEQ ID NO: 10676 - DNA, 35 bp, Artificial Sequence
  Synthetic oligonucleotide
actgctcgatgtcgggatatcgaaaaatcgccgac

SEQ ID NO: 10677 - DNA, 37 bp, Artificial Sequence
  Synthetic oligonucleotide
actgtctggcggctcggcatgatatcacagccgccga

SEQ ID NO: 10678 - DNA, 38 bp, Artificial Sequence
  Synthetic oligonucleotide
agaacgccgcggacatacctacagcggtacggtcttga

SEQ ID NO: 10679 - DNA, 38 bp, Artificial Sequence
  Synthetic oligonucleotide
agactgttgccggacgtgctgccattcctgatgcgtga

SEQ ID NO: 10680 - DNA, 36 bp, Artificial Sequence
  Synthetic oligonucleotide
atagttgaactcggtttcagcgacgccttcgttctg

SEQ ID NO: 10681 - DNA, 35 bp, Artificial Sequence
  Synthetic oligonucleotide
atgagggttcatagtacgcattgcgggtggtcatc

SEQ ID NO: 10682 - DNA, 36 bp, Artificial Sequence
  Synthetic oligonucleotide
atggaagatacaatgtgcgatcctccatttccgcaa

SEQ ID NO: 10683 - DNA, 36 bp, Artificial Sequence
  Synthetic oligonucleotide
atgtgacgggcacggtaggctggggcatccacgata

SEQ ID NO: 10684 - DNA, 35 bp, Artificial Sequence
  Synthetic oligonucleotide
atttggtccccaattcgtggtgggacagtgtcgtc

SEQ ID NO: 10685 - DNA, 38 bp, Artificial Sequence
  Synthetic oligonucleotide
caataacacgcgaaagtgggtaggctctctgggtgtga

SEQ ID NO: 10686 - DNA, 37 bp, Artificial Sequence
  Synthetic oligonucleotide
ccaaagttcgggcaatgttagatggacgtacattcga

SEQ ID NO: 10687 - DNA, 36 bp, Artificial Sequence
  Synthetic oligonucleotide
cgcacaacgataagtctagatatgagggtaggacaa

SEQ ID NO: 10688 - DNA, 36 bp, Artificial Sequence
  Synthetic oligonucleotide
ctaggacgaacttgtcccttaggggaacagagtgga

SEQ ID NO: 10689 - DNA, 36 bp, Artificial Sequence
  Synthetic oligonucleotide
gaaggtttagagcaattcatgatatgtaagcattca

SEQ ID NO: 10690 - DNA, 36 bp, Artificial Sequence
  Synthetic oligonucleotide
gacaagggggtactggtacttcaggtctttgcatta

SEQ ID NO: 10691 - DNA, 37 bp, Artificial Sequence
  Synthetic oligonucleotide
gaccgtacaagaaccgctgcgctagtgtccttcaaga

SEQ ID NO: 10692 - DNA, 36 bp, Artificial Sequence
  Synthetic oligonucleotide
gagcatctttgcatgaagtgtacacggctaagcaaa

SEQ ID NO: 10693 - DNA, 38 bp, Artificial Sequence
  Synthetic oligonucleotide
gagctggaacgtgtgtgatagaagtgggttgccagtga

SEQ ID NO: 10694 - DNA, 38 bp, Artificial Sequence
  Synthetic oligonucleotide
gaggttggtctgaagataagcaacacttttgattgtga

SEQ ID NO: 10695 - DNA, 37 bp, Artificial Sequence
  Synthetic oligonucleotide
gatccgcaaatggtctttgcagtcttatcaggcggga

SEQ ID NO: 10696 - DNA, 35 bp, Artificial Sequence
  Synthetic oligonucleotide
gccaggtaggacgatggcatgtctgaattgaaggg

SEQ ID NO: 10697 - DNA, 37 bp, Artificial Sequence
  Synthetic oligonucleotide
gccgaaagggtaacagagaataggtcagtcttatgga

SEQ ID NO: 10698 - DNA, 36 bp, Artificial Sequence
  Synthetic oligonucleotide
gccttacgctgaaagaaatgtggctttcgaggtatt

SEQ ID NO: 10699 - DNA, 38 bp, Artificial Sequence
  Synthetic oligonucleotide
gctagaaatgggcccggataggacaaatagcgtagtga

SEQ ID NO: 10700 - DNA, 35 bp, Artificial Sequence
  Synthetic oligonucleotide
gctggccgcccaattcaaggcgtacaagggaaggt

SEQ ID NO: 10701 - DNA, 38 bp, Artificial Sequence
  Synthetic oligonucleotide
ggacatgtctagaggattggggcattttacttcggtga

SEQ ID NO: 10702 - DNA, 35 bp, Artificial Sequence
  Synthetic oligonucleotide
ggacattcactttgtagtgcggaaactacgacgac

SEQ ID NO: 10703 - DNA, 37 bp, Artificial Sequence
  Synthetic oligonucleotide
ggacgtgctacttgcaactaggtggtcattgtggcga

SEQ ID NO: 10704 - DNA, 35 bp, Artificial Sequence
  Synthetic oligonucleotide
ggaggtacgtactttatgcaagatgtaaatcaggt

SEQ ID NO: 10705 - DNA, 37 bp, Artificial Sequence
  Synthetic oligonucleotide
ggcatagctcgttctgaagcacttgttagaaatgcga

SEQ ID NO: 10706 - DNA, 38 bp, Artificial Sequence
  Synthetic oligonucleotide
ggcctatggacgcgtaacctgtaacgtgctagttatga

SEQ ID NO: 10707 - DNA, 35 bp, Artificial Sequence
  Synthetic oligonucleotide
gggagattatacgtagggcggaatagtagcacggt

SEQ ID NO: 10708 - DNA, 36 bp, Artificial Sequence
  Synthetic oligonucleotide
ggggaatatgatttaaagtgcaggctatgcggcttc

SEQ ID NO: 10709 - DNA, 38 bp, Artificial Sequence
  Synthetic oligonucleotide
gggggtactgagggtccctcaataagggaagtgcatga

SEQ ID NO: 10710 - DNA, 36 bp, Artificial Sequence
  Synthetic oligonucleotide
gggtgcacgattagcaatccgttgcgcaatgttata

SEQ ID NO: 10711 - DNA, 35 bp, Artificial Sequence
  Synthetic oligonucleotide
ggtacgactttgcatttgaccgcccgcttcacatt

SEQ ID NO: 10712 - DNA, 35 bp, Artificial Sequence
  Synthetic oligonucleotide
ggtatgacaccaactatgagcaatattgtgtgtat

SEQ ID NO: 10713 - DNA, 36 bp, Artificial Sequence
  Synthetic oligonucleotide
ggtcgcaggaatgcggcttaaatattattagaggta

SEQ ID NO: 10714 - DNA, 38 bp, Artificial Sequence
  Synthetic oligonucleotide
ggtgaaccgtggtgcaccgcgtcttagtacgggtttga

SEQ ID NO: 10715 - DNA, 35 bp, Artificial Sequence
  Synthetic oligonucleotide
gtaaggggtaatgcgaatttaactagggacgctaa

SEQ ID NO: 10716 - DNA, 36 bp, Artificial Sequence
  Synthetic oligonucleotide
gtagacgtcattacacgatgctcaccattctttaaa

SEQ ID NO: 10717 - DNA, 38 bp, Artificial Sequence
  Synthetic oligonucleotide
gtagtctgcattcttgggtcaggtcgcataagcgatga

SEQ ID NO: 10718 - DNA, 37 bp, Artificial Sequence
  Synthetic oligonucleotide
gtcccaggtaatacgtttcggcgggacaatgattaga

SEQ ID NO: 10719 - DNA, 36 bp, Artificial Sequence
  Synthetic oligonucleotide
gtccgtgcgcaagtatctttactcataggggcggga

SEQ ID NO: 10720 - DNA, 37 bp, Artificial Sequence
  Synthetic oligonucleotide
gtgaggagtaccagtataccttgggaccatggaacga

SEQ ID NO: 10721 - DNA, 35 bp, Artificial Sequence
  Synthetic oligonucleotide
gtgtaaaagacacctaattgctcctaaccgccttc

SEQ ID NO: 10722 - DNA, 36 bp, Artificial Sequence
  Synthetic oligonucleotide
gtgtactatgctttcttaaagtcgagacgttgacta

SEQ ID NO: 10723 - DNA, 36 bp, Artificial Sequence
  Synthetic oligonucleotide
gttgaatcacgtgccgctaatattgacgtcatggga

SEQ ID NO: 10724 - DNA, 35 bp, Artificial Sequence
  Synthetic oligonucleotide
taacagcagccatgcgattactcaaattggcaaac

SEQ ID NO: 10725 - DNA, 35 bp, Artificial Sequence
  Synthetic oligonucleotide
taagcccccacgttaaaaggaatcgcgccgagctg

SEQ ID NO: 10726 - DNA, 35 bp, Artificial Sequence
  Synthetic oligonucleotide
tacacgactgaggttgctgcccccacaacttagtt

SEQ ID NO: 10727 - DNA, 38 bp, Artificial Sequence
  Synthetic oligonucleotide
taccaaccgttctagggtgctatgtccaatactagtga

SEQ ID NO: 10728 - DNA, 37 bp, Artificial Sequence
  Synthetic oligonucleotide
tacctaggtaacgacagatgaatggcatgtggtaaga

SEQ ID NO: 10729 - DNA, 38 bp, Artificial Sequence
  Synthetic oligonucleotide
tactgggaggtttgattttcggtttctatgcaccgtga

SEQ ID NO: 10730 - DNA, 35 bp, Artificial Sequence
  Synthetic oligonucleotide
tagcccgtggtgctggggagcttagggatggacaa

SEQ ID NO: 10731 - DNA, 36 bp, Artificial Sequence
  Synthetic oligonucleotide
tagcgcacaagggtggaatatgtgagaatgatcgta

SEQ ID NO: 10732 - DNA, 37 bp, Artificial Sequence
  Synthetic oligonucleotide
tagggcgtgtgctagtaacgctggccgccattcgtgg

SEQ ID NO: 10733 - DNA, 35 bp, Artificial Sequence
  Synthetic oligonucleotide
taggtttccgagagcatgccgaaggccgcgggaaa

SEQ ID NO: 10734 - DNA, 35 bp, Artificial Sequence
  Synthetic oligonucleotide
tatagtcccgcgcgaggcacgcaaataaaagcgta

SEQ ID NO: 10735 - DNA, 36 bp, Artificial Sequence
  Synthetic oligonucleotide
tcatggtatgactagaccgtgacgtaccgccggata

SEQ ID NO: 10736 - DNA, 37 bp, Artificial Sequence
  Synthetic oligonucleotide
tcgtccaccgctctaactgggaactgtaccgtatcga

SEQ ID NO: 10737 - DNA, 37 bp, Artificial Sequence
  Synthetic oligonucleotide
tgcattctctcgagtcaagagcttccgttccccccga

SEQ ID NO: 10738 - DNA, 36 bp, Artificial Sequence
  Synthetic oligonucleotide
tgttggtcggaggtccggtttgagccactggagata

SEQ ID NO: 10739 - DNA, 36 bp, Artificial Sequence
  Synthetic oligonucleotide
tttcaacaaactgtagtggggtctccaggagaaaga

SEQ ID NO: 10740 - DNA, 35 bp, Artificial Sequence
  Synthetic oligonucleotide
tttccggagtcaacgcattctgagacgaccctttt

SEQ ID NO: 10741 - DNA, 36 bp, Artificial Sequence
  Synthetic oligonucleotide
gtacaggttgggacgtaaggttgtgatagatgcatc

SEQ ID NO: 10742 - DNA, 35 bp, Artificial Sequence
  Synthetic oligonucleotide
agagttgcaggggggtgatttgttaccgggcatag

SEQ ID NO: 10743 - DNA, 37 bp, Artificial Sequence
  Synthetic oligonucleotide
ggaatccacgtacagctccggacataccgagtaccga

SEQ ID NO: 10744 - DNA, 37 bp, Artificial Sequence
  Synthetic oligonucleotide
gagtggcctaggatcatttaggagtaggtctaatcga

SEQ ID NO: 10745 - DNA, 37 bp, Artificial Sequence
  Synthetic oligonucleotide
gatcggggaatgggagcgcgcactgcacccagacgga

SEQ ID NO: 10746 - DNA, 35 bp, Artificial Sequence
  Synthetic oligonucleotide
gtaatccagcgaggagccactggggtcttgacttg

SEQ ID NO: 10747 - DNA, 38 bp, Artificial Sequence
  Synthetic oligonucleotide
ataacgacatctattcccccgctacgtgatcgtactga

SEQ ID NO: 10748 - DNA, 38 bp, Artificial Sequence
  Synthetic oligonucleotide
gccactgcaagaaagaatttttgttggtctggacatga

SEQ ID NO: 10749 - DNA, 35 bp, Artificial Sequence
  Synthetic oligonucleotide
taccctagacaagtgtaggtgatgcgaagataagg

SEQ ID NO: 10750 - DNA, 37 bp, Artificial Sequence
  Synthetic oligonucleotide
taggtggactcaaattagtcgtgctggttgggtcgga

SEQ ID NO: 10751 - DNA, 36 bp, Artificial Sequence
  Synthetic oligonucleotide
tgacaccaggagatggatgccctggagcaactccga

SEQ ID NO: 10752 - DNA, 35 bp, Artificial Sequence
  Synthetic oligonucleotide
ttgggtttatagcgcggctgagttcgaacatactt

SEQ ID NO: 10753 - DNA, 38 bp, Artificial Sequence
  Synthetic oligonucleotide
aacctggcaatttagtattgggacttagggggctttga

SEQ ID NO: 10754 - DNA, 36 bp, Artificial Sequence
  Synthetic oligonucleotide
aatgtcagcatcgttattgtagcctagtactcgcga

SEQ ID NO: 10755 - DNA, 38 bp, Artificial Sequence
  Synthetic oligonucleotide
accggtctcgacgatgtcgcccggttaggaatgattga

SEQ ID NO: 10756 - DNA, 36 bp, Artificial Sequence
  Synthetic oligonucleotide
accggtgcgggtctatgagattctaagttggctgaa

SEQ ID NO: 10757 - DNA, 38 bp, Artificial Sequence
  Synthetic oligonucleotide
acgtatggaagggagaaagcgatcgagtgcactcatga

SEQ ID NO: 10758 - DNA, 36 bp, Artificial Sequence
  Synthetic oligonucleotide
agaccaaagtgaacgtgtagcgtatttttcgatgaa

SEQ ID NO: 10759 - DNA, 36 bp, Artificial Sequence
  Synthetic oligonucleotide
agcctgaagccaaaaggatgaaagttagattcgata

SEQ ID NO: 10760 - DNA, 37 bp, Artificial Sequence
  Synthetic oligonucleotide
agtaccgcgagactgatcaaatgaagatgtgtcctga

SEQ ID NO: 10761 - DNA, 35 bp, Artificial Sequence
  Synthetic oligonucleotide
atacggtatgttctgtgtcgtgtaccctgttgcct

SEQ ID NO: 10762 - DNA, 38 bp, Artificial Sequence
  Synthetic oligonucleotide
ctgaacgaacatgggtcatccgagagttcgcggagtga

SEQ ID NO: 10763 - DNA, 36 bp, Artificial Sequence
  Synthetic oligonucleotide
gactaattgcgcgtccgtactcgaatgtaaaggcgt

SEQ ID NO: 10764 - DNA, 36 bp, Artificial Sequence
  Synthetic oligonucleotide
gattcacatcagggagctgtgtgtcttcccgctgct

SEQ ID NO: 10765 - DNA, 35 bp, Artificial Sequence
  Synthetic oligonucleotide
gcgaagaatcaaagttaaaatacggcctatgggaa

SEQ ID NO: 10766 - DNA, 37 bp, Artificial Sequence
  Synthetic oligonucleotide
ggagtatcgtggattcccagttgagactctaggcata

SEQ ID NO: 10767 - DNA, 36 bp, Artificial Sequence
  Synthetic oligonucleotide
gtcacttaagaagcttggcacgaaagtatgaaatga

SEQ ID NO: 10768 - DNA, 36 bp, Artificial Sequence
  Synthetic oligonucleotide
gtctctagggatcctatcgccagtctgccgtaggta

SEQ ID NO: 10769 - DNA, 36 bp, Artificial Sequence
  Synthetic oligonucleotide
gtgatgcccgtattagtggacggtaataaatgcaga

SEQ ID NO: 10770 - DNA, 35 bp, Artificial Sequence
  Synthetic oligonucleotide
tacattgacttcaatgtgcttatggtatccatgta

SEQ ID NO: 10771 - DNA, 37 bp, Artificial Sequence
  Synthetic oligonucleotide
tcaacaatcgttgttcgtttagcaatgctcgcataga

SEQ ID NO: 10772 - DNA, 38 bp, Artificial Sequence
  Synthetic oligonucleotide
tgtggttgccaatgtggaagggtatgttcacaatgtga

SEQ ID NO: 10773 - DNA, 36 bp, Artificial Sequence
  Synthetic oligonucleotide
tgttcgggactatgattgtattctaaagggggggaa

SEQ ID NO: 10774 - DNA, 35 bp, Artificial Sequence
  Synthetic oligonucleotide
ttactctaccggctgaattagtgctgtcctgaacc

SEQ ID NO: 10775 - DNA, 35 bp, Artificial Sequence
  Synthetic oligonucleotide
ttagctgaagtctggatgcggttgtaacctgatag

SEQ ID NO: 10776 - DNA, 37 bp, Artificial Sequence
  Synthetic oligonucleotide
gacaacggcgagaagcctgccacctgctgcactttga

SEQ ID NO: 10777 - DNA, 36 bp, Artificial Sequence
  Synthetic oligonucleotide
aaacaagggaatacggctctcaatggtagcaccata

SEQ ID NO: 10778 - DNA, 37 bp, Artificial Sequence
  Synthetic oligonucleotide
aaacggtactgtaggcataagtacaaaaatgatccga

SEQ ID NO: 10779 - DNA, 35 bp, Artificial Sequence
  Synthetic oligonucleotide
aaataccattctcgttgtgctgaataccagggctt

SEQ ID NO: 10780 - DNA, 36 bp, Artificial Sequence
  Synthetic oligonucleotide
aacagttcgaggtacagagttcgctcgccgggcaaa

SEQ ID NO: 10781 - DNA, 36 bp, Artificial Sequence
  Synthetic oligonucleotide
aacgcttttggatggggtccatgagtagggtttagt

SEQ ID NO: 10782 - DNA, 35 bp, Artificial Sequence
  Synthetic oligonucleotide
aaggtaccgacgatattttccgaatgtttctttgg

SEQ ID NO: 10783 - DNA, 34 bp, Artificial Sequence
  Synthetic oligonucleotide
acgagaacggcctgaatacgttgtagtggtgcat

SEQ ID NO: 10784 - DNA, 37 bp, Artificial Sequence
  Synthetic oligonucleotide
actgtaggactccagaagatagaggaatgtcgtatga

SEQ ID NO: 10785 - DNA, 37 bp, Artificial Sequence
  Synthetic oligonucleotide
agatagacggctggttaaggtgtccctgtggacttga

SEQ ID NO: 10786 - DNA, 35 bp, Artificial Sequence
  Synthetic oligonucleotide
aggaaccatgtttcacttgctttgggagtatgtac

SEQ ID NO: 10787 - DNA, 37 bp, Artificial Sequence
  Synthetic oligonucleotide
aggcctgagtggcttgggtgcaaatatttggggacga

SEQ ID NO: 10788 - DNA, 35 bp, Artificial Sequence
  Synthetic oligonucleotide
agtagcttctcgtcagtgacatagcccgcggctac

SEQ ID NO: 10789 - DNA, 38 bp, Artificial Sequence
  Synthetic oligonucleotide
agtcagtctcgggtgtcccgataaagtttccgtactga

SEQ ID NO: 10790 - DNA, 35 bp, Artificial Sequence
  Synthetic oligonucleotide
atcggtttgttactctccttggaatgtgctctagt

SEQ ID NO: 10791 - DNA, 38 bp, Artificial Sequence
  Synthetic oligonucleotide
atctgcgtcctctagaggaaggatgggcgtgcatgtga

SEQ ID NO: 10792 - DNA, 38 bp, Artificial Sequence
  Synthetic oligonucleotide
atggacggacaacgtccatagttatagaaaaatcatga

SEQ ID NO: 10793 - DNA, 35 bp, Artificial Sequence
  Synthetic oligonucleotide
atttgtgggtggccttgtatcatggccacacttac

SEQ ID NO: 10794 - DNA, 36 bp, Artificial Sequence
  Synthetic oligonucleotide
cattcgtcgaagggtttattcgttatgcgcatggta

SEQ ID NO: 10795 - DNA, 37 bp, Artificial Sequence
  Synthetic oligonucleotide
cccataaacggggagcttgggccccggggccttctga

SEQ ID NO: 10796 - DNA, 37 bp, Artificial Sequence
  Synthetic oligonucleotide
cctaggtctggtactgctatgagtcagcctagattga

SEQ ID NO: 10797 - DNA, 34 bp, Artificial Sequence
  Synthetic oligonucleotide
cgtatttgctacgtgccaaacacgccgaaggcaa

SEQ ID NO: 10798 - DNA, 37 bp, Artificial Sequence
  Synthetic oligonucleotide
ctacttctgaagtgcgcttacgactgttttcggatga

SEQ ID NO: 10799 - DNA, 37 bp, Artificial Sequence
  Synthetic oligonucleotide
gaatagcagtccattagtgagaccggagacccactga

SEQ ID NO: 10800 - DNA, 35 bp, Artificial Sequence
  Synthetic oligonucleotide
gacactgtgttggtttgaacgttcaacgggtcgcg

SEQ ID NO: 10801 - DNA, 35 bp, Artificial Sequence
  Synthetic oligonucleotide
gacttgatcacgcacgagaaataggtggaaatata

SEQ ID NO: 10802 - DNA, 35 bp, Artificial Sequence
  Synthetic oligonucleotide
gagatagttgaaaccttgcattctgactagcctaa

SEQ ID NO: 10803 - DNA, 35 bp, Artificial Sequence
  Synthetic oligonucleotide
gagatcgttatgtgtgtggtctggggacgtgacgg

SEQ ID NO: 10804 - DNA, 35 bp, Artificial Sequence
  Synthetic oligonucleotide
gagatgtgattgttcgtaagtgtataaactccagg

SEQ ID NO: 10805 - DNA, 37 bp, Artificial Sequence
  Synthetic oligonucleotide
gaggggctagtacagcattaagtgttccatctatgga

SEQ ID NO: 10806 - DNA, 36 bp, Artificial Sequence
  Synthetic oligonucleotide
gagtgggtgcttttagcgagaacgagactgggctca

SEQ ID NO: 10807 - DNA, 38 bp, Artificial Sequence
  Synthetic oligonucleotide
gattacgaggcaaggcacatgtataggcacttaggtga

SEQ ID NO: 10808 - DNA, 34 bp, Artificial Sequence
  Synthetic oligonucleotide
gcaaaagtcatgttcagttaagctctgggtgtta

SEQ ID NO: 10809 - DNA, 38 bp, Artificial Sequence
  Synthetic oligonucleotide
gcagggaggtcgggtaaagcctacggtcaaccttttga

SEQ ID NO: 10810 - DNA, 35 bp, Artificial Sequence
  Synthetic oligonucleotide
gccaggccgcccgcggttcacaatattccgcagac

SEQ ID NO: 10811 - DNA, 36 bp, Artificial Sequence
  Synthetic oligonucleotide
gcgagggcatgcaggatagcgcgcctcgcctactaa

SEQ ID NO: 10812 - DNA, 36 bp, Artificial Sequence
  Synthetic oligonucleotide
gcgccgaaataagcggtggctgcacttttaaatgta

SEQ ID NO: 10813 - DNA, 38 bp, Artificial Sequence
  Synthetic oligonucleotide
gctctgactgcaagggattctgttgggttgactgctga

SEQ ID NO: 10814 - DNA, 35 bp, Artificial Sequence
  Synthetic oligonucleotide
ggtcgacatatgccttaagctgcactcgctatgtc

SEQ ID NO: 10815 - DNA, 35 bp, Artificial Sequence
  Synthetic oligonucleotide
ggtgctcagcgaacctgttcaagcttggagctccg

SEQ ID NO: 10816 - DNA, 38 bp, Artificial Sequence
  Synthetic oligonucleotide
gtaccgggatttgcaactccgttgtatctctggagtga

SEQ ID NO: 10817 - DNA, 38 bp, Artificial Sequence
  Synthetic oligonucleotide
gtactcggctggtccagcctgcatcgctacaacggtga

SEQ ID NO: 10818 - DNA, 35 bp, Artificial Sequence
  Synthetic oligonucleotide
gtacttcccagtcgtgttggaaacaaggctgagaa

SEQ ID NO: 10819 - DNA, 38 bp, Artificial Sequence
  Synthetic oligonucleotide
gtccgaggtttgactgtggtgaggccgggtgattttga

SEQ ID NO: 10820 - DNA, 38 bp, Artificial Sequence
  Synthetic oligonucleotide
gtcgtatgtaggcgatgactgttgcaaactgaatatga

SEQ ID NO: 10821 - DNA, 36 bp, Artificial Sequence
  Synthetic oligonucleotide
gtgtcgacatgtactcgccgtggtgtttcggagcta

SEQ ID NO: 10822 - DNA, 38 bp, Artificial Sequence
  Synthetic oligonucleotide
gttcctatgcaaccgtagccgtatgaaatgtcgactga

SEQ ID NO: 10823 - DNA, 37 bp, Artificial Sequence
  Synthetic oligonucleotide
taaatgcacaaggtaggccatggctgcctagagacga

SEQ ID NO: 10824 - DNA, 37 bp, Artificial Sequence
  Synthetic oligonucleotide
tacagttactactggccatgcgaggtagttagcaaga

SEQ ID NO: 10825 - DNA, 35 bp, Artificial Sequence
  Synthetic oligonucleotide
taccaaaagtagagtgagactgaacaagcaggtac

SEQ ID NO: 10826 - DNA, 38 bp, Artificial Sequence
  Synthetic oligonucleotide
tacccgacgcgggacggtcctggagaatcatggtgtga

SEQ ID NO: 10827 - DNA, 35 bp, Artificial Sequence
  Synthetic oligonucleotide
tacgcgtacgcggtcgcgagaatccccgtcctagg

SEQ ID NO: 10828 - DNA, 36 bp, Artificial Sequence
  Synthetic oligonucleotide
tagtacgcgtgggtgcataatgtgatgggagaacca

SEQ ID NO: 10829 - DNA, 36 bp, Artificial Sequence
  Synthetic oligonucleotide
tcctgcgtcgtggataggtacatgggtacgccgaaa

SEQ ID NO: 10830 - DNA, 38 bp, Artificial Sequence
  Synthetic oligonucleotide
tctaattgcgaagacgtacatgtaaacaggacgggtga

SEQ ID NO: 10831 - DNA, 35 bp, Artificial Sequence
  Synthetic oligonucleotide
tgaaaggttaagtttttctttgggacccacttagc

SEQ ID NO: 10832 - DNA, 37 bp, Artificial Sequence
  Synthetic oligonucleotide
tgatagtgccgtgcatgaacaccaaattttgttagga

SEQ ID NO: 10833 - DNA, 35 bp, Artificial Sequence
  Synthetic oligonucleotide
tgcccaactccttggttgtggcatatcattgctct

SEQ ID NO: 10834 - DNA, 35 bp, Artificial Sequence
  Synthetic oligonucleotide
tgctggatccaacttaatgttggacaagagctact

SEQ ID NO: 10835 - DNA, 37 bp, Artificial Sequence
  Synthetic oligonucleotide
tggaccgtaagtggtgtggatttctaaaacgcgtaga

SEQ ID NO: 10836 - DNA, 35 bp, Artificial Sequence
  Synthetic oligonucleotide
tgggagctgagcgagtttcagatggaaaatgtact

SEQ ID NO: 10837 - DNA, 36 bp, Artificial Sequence
  Synthetic oligonucleotide
tgtccccggaaacggaacagtaggtagttaatgaga

SEQ ID NO: 10838 - DNA, 35 bp, Artificial Sequence
  Synthetic oligonucleotide
tgttggtccgccgaagccctgcccccccccgcaca

SEQ ID NO: 10839 - DNA, 35 bp, Artificial Sequence
  Synthetic oligonucleotide
ttatgagcagatccgtggtcatgcggacgttatgt

SEQ ID NO: 10840 - DNA, 37 bp, Artificial Sequence
  Synthetic oligonucleotide
ttctccttctctatgtttgcaagtgcgtgttaacgga

SEQ ID NO: 10841 - DNA, 36 bp, Artificial Sequence
  Synthetic oligonucleotide
gaagaacacggtagcccggcctggccttaaagaaca

SEQ ID NO: 10842 - DNA, 37 bp, Artificial Sequence
  Synthetic oligonucleotide
acttgacttcgcgaccggggacgtctggtcgacacga

SEQ ID NO: 10843 - DNA, 37 bp, Artificial Sequence
  Synthetic oligonucleotide
agagctgcacgtgttatcatatccgggatacatcaga

SEQ ID NO: 10844 - DNA, 36 bp, Artificial Sequence
  Synthetic oligonucleotide
gtcaattgatgtcgcgagctcgaaggggttaatgaa

SEQ ID NO: 10845 - DNA, 37 bp, Artificial Sequence
  Synthetic oligonucleotide
gtcgccaatagtatagcgttggcacacgtctacggga

SEQ ID NO: 10846 - DNA, 36 bp, Artificial Sequence
  Synthetic oligonucleotide
gtgagctattttggctcttcacgtcgggaattctga

SEQ ID NO: 10847 - DNA, 38 bp, Artificial Sequence
  Synthetic oligonucleotide
aagacaggtacgtacatacaggaacaagaacgaagtga

SEQ ID NO: 10848 - DNA, 38 bp, Artificial Sequence
  Synthetic oligonucleotide
atctcatgatggtaactctttacagggggtcgcactga

SEQ ID NO: 10849 - DNA, 37 bp, Artificial Sequence
  Synthetic oligonucleotide
tctccttgtcagaacgtccgggaatcatgaacgacga

SEQ ID NO: 10850 - DNA, 36 bp, Artificial Sequence
  Synthetic oligonucleotide
ttggaacgacaccctcggattcttctccgactagta

SEQ ID NO: 10851 - DNA, 35 bp, Artificial Sequence
  Synthetic oligonucleotide
aaaagtgggcgaacgtccatgtcgtgctgtcaggg

SEQ ID NO: 10852 - DNA, 35 bp, Artificial Sequence
  Synthetic oligonucleotide
acgtacccatagctggtgatatattttttactacg

SEQ ID NO: 10853 - DNA, 36 bp, Artificial Sequence
  Synthetic oligonucleotide
agccactataaggctggtataaagcagtttacggga

SEQ ID NO: 10854 - DNA, 36 bp, Artificial Sequence
  Synthetic oligonucleotide
gagggtaataaagtcggattccataaccatgctgta

SEQ ID NO: 10855 - DNA, 35 bp, Artificial Sequence
  Synthetic oligonucleotide
gcacttttgagttggtgtaacgcctttcctgttat

SEQ ID NO: 10856 - DNA, 36 bp, Artificial Sequence
  Synthetic oligonucleotide
gccgttgaaagatggcctcgctgtgtgttcaacgaa

SEQ ID NO: 10857 - DNA, 37 bp, Artificial Sequence
  Synthetic oligonucleotide
ggaaaccctacaagggtagggtatgaaggggtggtga

SEQ ID NO: 10858 - DNA, 35 bp, Artificial Sequence
  Synthetic oligonucleotide
ggcacccggggtggtgatcggtacttggcattcga

SEQ ID NO: 10859 - DNA, 38 bp, Artificial Sequence
  Synthetic oligonucleotide
gtcatgaacgttagtaccatgtggagtaatctggctga

SEQ ID NO: 10860 - DNA, 37 bp, Artificial Sequence
  Synthetic oligonucleotide
gtgaagggctttcatacaagaagcctgtcgctccgga

SEQ ID NO: 10861 - DNA, 37 bp, Artificial Sequence
  Synthetic oligonucleotide
tcaaccaaagcttggatcgtagtggaggcataggcga

SEQ ID NO: 10862 - DNA, 37 bp, Artificial Sequence
  Synthetic oligonucleotide
tccacgtgcagttcgttgtttcatctttgataattga

SEQ ID NO: 10863 - DNA, 38 bp, Artificial Sequence
  Synthetic oligonucleotide
tgaagtactggggggggtagatgctggacgagctttga

SEQ ID NO: 10864 - DNA, 37 bp, Artificial Sequence
  Synthetic oligonucleotide
tgtcgctatttggtatacctccggcacgcaaatctga

SEQ ID NO: 10865 - DNA, 36 bp, Artificial Sequence
  Synthetic oligonucleotide
aacagagtaggtggtgagtgtgagaagaccacagga

SEQ ID NO: 10866 - DNA, 36 bp, Artificial Sequence
  Synthetic oligonucleotide
aacgcggtggtaatgagaaacgagccgggcagtcta

SEQ ID NO: 10867 - DNA, 35 bp, Artificial Sequence
  Synthetic oligonucleotide
aacttcggaagggacggaaaggagcggagcattcg

SEQ ID NO: 10868 - DNA, 37 bp, Artificial Sequence
  Synthetic oligonucleotide
acaggtaccaagggggtatacacggcttaggtgtaga

SEQ ID NO: 10869 - DNA, 37 bp, Artificial Sequence
  Synthetic oligonucleotide
acatcgcggcggtcatgaaaagccatgggttttttga

SEQ ID NO: 10870 - DNA, 37 bp, Artificial Sequence
  Synthetic oligonucleotide
actcgctcaccgcttcgatagactggtcattgacgga

SEQ ID NO: 10871 - DNA, 35 bp, Artificial Sequence
  Synthetic oligonucleotide
agcccacagcgggtacgacgctggctggataaagt

SEQ ID NO: 10872 - DNA, 37 bp, Artificial Sequence
  Synthetic oligonucleotide
agtactagcataagtctggtcagtcttctcaggcgga

SEQ ID NO: 10873 - DNA, 35 bp, Artificial Sequence
  Synthetic oligonucleotide
agtgagcgacttagtctacctcatggggagtgttg

SEQ ID NO: 10874 - DNA, 35 bp, Artificial Sequence
  Synthetic oligonucleotide
atacgcgtacagtaacaggggtctacctgaaacat

SEQ ID NO: 10875 - DNA, 35 bp, Artificial Sequence
  Synthetic oligonucleotide
atccgcgggcgacagcaatggactttgagcgcagt

SEQ ID NO: 10876 - DNA, 38 bp, Artificial Sequence
  Synthetic oligonucleotide
atgtacagcccgtaaatgcatccttaactggtacctga

SEQ ID NO: 10877 - DNA, 36 bp, Artificial Sequence
  Synthetic oligonucleotide
attaccggactggcgctcatggggcaattaaaagca

SEQ ID NO: 10878 - DNA, 38 bp, Artificial Sequence
  Synthetic oligonucleotide
attgctgaacatgttaagaaccttctacgagggtgtga

SEQ ID NO: 10879 - DNA, 38 bp, Artificial Sequence
  Synthetic oligonucleotide
catgtggcgtttattcataggagtgaaggtcgacttga

SEQ ID NO: 10880 - DNA, 35 bp, Artificial Sequence
  Synthetic oligonucleotide
ctcgcaatggagaccagttagagttgcgggaaagg

SEQ ID NO: 10881 - DNA, 38 bp, Artificial Sequence
  Synthetic oligonucleotide
gaacctgaatgctggggcaagggtcaattttgcgctga

SEQ ID NO: 10882 - DNA, 36 bp, Artificial Sequence
  Synthetic oligonucleotide
gagccgccaatccaccgtgttctgctttgtctagga

SEQ ID NO: 10883 - DNA, 35 bp, Artificial Sequence
  Synthetic oligonucleotide
gcaacttccgttacgcccaacgcgtgtaatcgcac

SEQ ID NO: 10884 - DNA, 35 bp, Artificial Sequence
  Synthetic oligonucleotide
gcattaattgcccgctggttggttaccgcaggcaa

SEQ ID NO: 10885 - DNA, 36 bp, Artificial Sequence
  Synthetic oligonucleotide
gcccagaagaagcatggccggagtaacagcagtcca

SEQ ID NO: 10886 - DNA, 35 bp, Artificial Sequence
  Synthetic oligonucleotide
ggcggggaaagaatttttgttggcatcgtaacggt

SEQ ID NO: 10887 - DNA, 38 bp, Artificial Sequence
  Synthetic oligonucleotide
gggcgcactactcagtatatgttcgcacccgaggctga

SEQ ID NO: 10888 - DNA, 38 bp, Artificial Sequence
  Synthetic oligonucleotide
gtaccggtcgcagatactgttactaatgaacatactga

SEQ ID NO: 10889 - DNA, 38 bp, Artificial Sequence
  Synthetic oligonucleotide
gtacgggagtgggtgccgggtcctacggggccgtatga

SEQ ID NO: 10890 - DNA, 35 bp, Artificial Sequence
  Synthetic oligonucleotide
gtccagcagatatggtacggctatatccaactaga

SEQ ID NO: 10891 - DNA, 36 bp, Artificial Sequence
  Synthetic oligonucleotide
gtcgctggacactctgcacactgggaccaaccacga

SEQ ID NO: 10892 - DNA, 35 bp, Artificial Sequence
  Synthetic oligonucleotide
gtgtgttccgccgctgttcttggcagttaggcgtg

SEQ ID NO: 10893 - DNA, 37 bp, Artificial Sequence
  Synthetic oligonucleotide
taacctcacggggctgttaacctatgcgggattaaga

SEQ ID NO: 10894 - DNA, 35 bp, Artificial Sequence
  Synthetic oligonucleotide
taccctgccatttagtgatgggtagaggacgcagg

SEQ ID NO: 10895 - DNA, 35 bp, Artificial Sequence
  Synthetic oligonucleotide
tatgagcgaagggtattatgttaagtcacggctgt

SEQ ID NO: 10896 - DNA, 36 bp, Artificial Sequence
  Synthetic oligonucleotide
tattccacgctggtgctcataagtggtgtgattgaa

SEQ ID NO: 10897 - DNA, 37 bp, Artificial Sequence
  Synthetic oligonucleotide
tgaaaagacgtactgcgatggtactctgtgtgaaaga

SEQ ID NO: 10898 - DNA, 37 bp, Artificial Sequence
  Synthetic oligonucleotide
tgtacgtatcgtaggttagttaatagtgagactctga

SEQ ID NO: 10899 - DNA, 36 bp, Artificial Sequence
  Synthetic oligonucleotide
tgtcctccgagcctggcttgctttcacgagtgtgta

SEQ ID NO: 10900 - DNA, 36 bp, Artificial Sequence
  Synthetic oligonucleotide
tgtgtcactacagtttgactagttgggcgttgggga

SEQ ID NO: 10901 - DNA, 36 bp, Artificial Sequence
  Synthetic oligonucleotide
ttggtcggcccaagagtgttctaaggggctcgaaaa

SEQ ID NO: 10902 - DNA, 35 bp, Artificial Sequence
  Synthetic oligonucleotide
catcaacgttagaggcaaaaggcctaggaattaag

SEQ ID NO: 10903 - DNA, 38 bp, Artificial Sequence
  Synthetic oligonucleotide
gtatggtcgtgctgcacgattaagagctgacggataga

SEQ ID NO: 10904 - DNA, 36 bp, Artificial Sequence
  Synthetic oligonucleotide
tacctcgaatcgaaaggttcacctactacgtgcgga

SEQ ID NO: 10905 - DNA, 35 bp, Artificial Sequence
  Synthetic oligonucleotide
acatcgttactacgtcgagtaggatacggccgagc

SEQ ID NO: 10906 - DNA, 36 bp, Artificial Sequence
  Synthetic oligonucleotide
gattacgacatgaagtggttatagcttggtcgttaa

SEQ ID NO: 10907 - DNA, 37 bp, Artificial Sequence
  Synthetic oligonucleotide
ggttgcattggatgagagtacctttgtacattattga

SEQ ID NO: 10908 - DNA, 36 bp, Artificial Sequence
  Synthetic oligonucleotide
gttagtgtaggacatgctgcgcttaagctcacagta

SEQ ID NO: 10909 - DNA, 35 bp, Artificial Sequence
  Synthetic oligonucleotide
gttcttcacgaaattcatgcagtaaacgggttcat

SEQ ID NO: 10910 - DNA, 36 bp, Artificial Sequence
  Synthetic oligonucleotide
tccgtacttctatgccgggcatgatagggtacctca

SEQ ID NO: 10911 - DNA, 35 bp, Artificial Sequence
  Synthetic oligonucleotide
ttacgatggcgcgtgtagcatcatgggggtaacgg

SEQ ID NO: 10912 - DNA, 38 bp, Artificial Sequence
  Synthetic oligonucleotide
ttcatgctggatgtcctgagtggttgggcttgttttga

SEQ ID NO: 10913 - DNA, 35 bp, Artificial Sequence
  Synthetic oligonucleotide
gactcctgcaacggtcgtgttccggtaataatgtc

SEQ ID NO: 10914 - DNA, 38 bp, Artificial Sequence
  Synthetic oligonucleotide
aacaacgttgaacgctggttacatgccgataaggttga

SEQ ID NO: 10915 - DNA, 36 bp, Artificial Sequence
  Synthetic oligonucleotide
aaccgatggttccagctggttttaggtcctggggta

SEQ ID NO: 10916 - DNA, 35 bp, Artificial Sequence
  Synthetic oligonucleotide
aacggttcgtttcgttaaccattgataaggcagaa

SEQ ID NO: 10917 - DNA, 36 bp, Artificial Sequence
  Synthetic oligonucleotide
aagcttcacacaacttgatggggtactgccccagga

SEQ ID NO: 10918 - DNA, 37 bp, Artificial Sequence
  Synthetic oligonucleotide
aaggagcgatgctggagcttagacgtataaatttgga

SEQ ID NO: 10919 - DNA, 36 bp, Artificial Sequence
  Synthetic oligonucleotide
aagtcgtactagttgcgccgataagctttttagcga

SEQ ID NO: 10920 - DNA, 35 bp, Artificial Sequence
  Synthetic oligonucleotide
aatcgtcctcagtaagtcgtagtctggaccgtata

SEQ ID NO: 10921 - DNA, 35 bp, Artificial Sequence
  Synthetic oligonucleotide
aatgggccagtgtatactcggcaaggaacggactc

SEQ ID NO: 10922 - DNA, 38 bp, Artificial Sequence
  Synthetic oligonucleotide
acacgggcctttgcgtaaatcacttcctctcggtctga

SEQ ID NO: 10923 - DNA, 37 bp, Artificial Sequence
  Synthetic oligonucleotide
acacgtgatcaagttctaaacagggaaagggtgcaga

SEQ ID NO: 10924 - DNA, 37 bp, Artificial Sequence
  Synthetic oligonucleotide
acatggttctcaggaccctcctttgaagtgactttga

SEQ ID NO: 10925 - DNA, 38 bp, Artificial Sequence
  Synthetic oligonucleotide
accacccatgtacaccttcgacgctcgggagttagtga

SEQ ID NO: 10926 - DNA, 36 bp, Artificial Sequence
  Synthetic oligonucleotide
acccgtaagattggtgtcatacaatacgtagccgaa

SEQ ID NO: 10927 - DNA, 35 bp, Artificial Sequence
  Synthetic oligonucleotide
acctcgcataaggtgcgtacgtatgccgcgtggtt

SEQ ID NO: 10928 - DNA, 36 bp, Artificial Sequence
  Synthetic oligonucleotide
acggcgctagtactatgggtcagttgtgcaattgta

SEQ ID NO: 10929 - DNA, 37 bp, Artificial Sequence
  Synthetic oligonucleotide
actcggtgtcaaggtatatcaattggtacctgctgga

SEQ ID NO: 10930 - DNA, 36 bp, Artificial Sequence
  Synthetic oligonucleotide
acttccggtagtctctgacggccgttgcatacgaga

SEQ ID NO: 10931 - DNA, 37 bp, Artificial Sequence
  Synthetic oligonucleotide
agcatcatgactgagatttgagcgccctattgttgga

SEQ ID NO: 10932 - DNA, 35 bp, Artificial Sequence
  Synthetic oligonucleotide
agcttaagttaatatagagtaggctttagtctgta

SEQ ID NO: 10933 - DNA, 37 bp, Artificial Sequence
  Synthetic oligonucleotide
atagagtaatcatcccccctcccgacgacaggtaaga

SEQ ID NO: 10934 - DNA, 36 bp, Artificial Sequence
  Synthetic oligonucleotide
atataggcctcagccacgcttcgctagataggagca

SEQ ID NO: 10935 - DNA, 35 bp, Artificial Sequence
  Synthetic oligonucleotide
atcactccccagtctcgaggtgattagcgctttgg

SEQ ID NO: 10936 - DNA, 36 bp, Artificial Sequence
  Synthetic oligonucleotide
atcgtttgttgaggacctgtttgcagaatgtaatta

SEQ ID NO: 10937 - DNA, 35 bp, Artificial Sequence
  Synthetic oligonucleotide
atctagctcggtccatgaatctaagtccctcccca

SEQ ID NO: 10938 - DNA, 36 bp, Artificial Sequence
  Synthetic oligonucleotide
atctgtaaacgtgcttgctgtggataccatagtata

SEQ ID NO: 10939 - DNA, 36 bp, Artificial Sequence
  Synthetic oligonucleotide
atggttgctcacaacatccaggtggagagtgccata

SEQ ID NO: 10940 - DNA, 38 bp, Artificial Sequence
  Synthetic oligonucleotide
caacccgggctagtgcttatatgctcattacaacttga

SEQ ID NO: 10941 - DNA, 37 bp, Artificial Sequence
  Synthetic oligonucleotide
cattaagtgtacgtaggtttcgctctgtagtatgaga

SEQ ID NO: 10942 - DNA, 36 bp, Artificial Sequence
  Synthetic oligonucleotide
cattgctttcgacctcgtgtaaccagagtccagtaa

SEQ ID NO: 10943 - DNA, 37 bp, Artificial Sequence
  Synthetic oligonucleotide
ccgagatgcatcactgggtgtaatcggtcgatactga

SEQ ID NO: 10944 - DNA, 35 bp, Artificial Sequence
  Synthetic oligonucleotide
ccgctgggccgtacacagtcctcgcgaggtttaac

SEQ ID NO: 10945 - DNA, 37 bp, Artificial Sequence
  Synthetic oligonucleotide
cctggtgctagtttaaaacacgtgttcggtcagagga

SEQ ID NO: 10946 - DNA, 35 bp, Artificial Sequence
  Synthetic oligonucleotide
ctaacctgcgctgtcggacgaatgggttcagattt

SEQ ID NO: 10947 - DNA, 37 bp, Artificial Sequence
  Synthetic oligonucleotide
ctaacgaaggctagggcatcaaatgcagtaactggga

SEQ ID NO: 10948 - DNA, 35 bp, Artificial Sequence
  Synthetic oligonucleotide
ctatgaaacttacgattttaagtggcttgtactgg

SEQ ID NO: 10949 - DNA, 36 bp, Artificial Sequence
  Synthetic oligonucleotide
cttgctaaattggtcctgttggtccgttaggagcga

SEQ ID NO: 10950 - DNA, 38 bp, Artificial Sequence
  Synthetic oligonucleotide
gaaccgacaactgcctggtcatgcgttctcgtaattga

SEQ ID NO: 10951 - DNA, 38 bp, Artificial Sequence
  Synthetic oligonucleotide
gacaatgtatagcaccaccggactagcatagatgctga

SEQ ID NO: 10952 - DNA, 35 bp, Artificial Sequence
  Synthetic oligonucleotide
gacatccgggtttgcaggactgagtaattatcaac

SEQ ID NO: 10953 - DNA, 38 bp, Artificial Sequence
  Synthetic oligonucleotide
gcaaacgcaaggggataatcccaagagctttcttctga

SEQ ID NO: 10954 - DNA, 38 bp, Artificial Sequence
  Synthetic oligonucleotide
gcaatgacggagttgagaagggtggctggatttgttga

SEQ ID NO: 10955 - DNA, 38 bp, Artificial Sequence
  Synthetic oligonucleotide
gcacggtcatccctaggccgataatcgtttctgcttga

SEQ ID NO: 10956 - DNA, 35 bp, Artificial Sequence
  Synthetic oligonucleotide
gcagtcgcgcacttgaagggcaaaatgggatactc

SEQ ID NO: 10957 - DNA, 35 bp, Artificial Sequence
  Synthetic oligonucleotide
gccacaactcggctaacgtacggggaataactgtc

SEQ ID NO: 10958 - DNA, 35 bp, Artificial Sequence
  Synthetic oligonucleotide
gccagctgcttcaaacgggaacgcttgatacgtac

SEQ ID NO: 10959 - DNA, 38 bp, Artificial Sequence
  Synthetic oligonucleotide
gccatgcggagaatactgagggaaactgtggggttgga

SEQ ID NO: 10960 - DNA, 35 bp, Artificial Sequence
  Synthetic oligonucleotide
gcctcgagagggcggaacgttagataagactcggg

SEQ ID NO: 10961 - DNA, 35 bp, Artificial Sequence
  Synthetic oligonucleotide
gccttgcagtaagcccgcctctggtggctgttgca

SEQ ID NO: 10962 - DNA, 35 bp, Artificial Sequence
  Synthetic oligonucleotide
gcgaatggactaggttagtcggactaaagaaggac

SEQ ID NO: 10963 - DNA, 35 bp, Artificial Sequence
  Synthetic oligonucleotide
gcgatataccgcctagctctttcgcatgactggtt

SEQ ID NO: 10964 - DNA, 36 bp, Artificial Sequence
  Synthetic oligonucleotide
ggatgcactgggttgtactgtggaagcgggacggaa

SEQ ID NO: 10965 - DNA, 37 bp, Artificial Sequence
  Synthetic oligonucleotide
ggcactgtcgtgcttctcagtacatcaaattggtaga

SEQ ID NO: 10966 - DNA, 35 bp, Artificial Sequence
  Synthetic oligonucleotide
ggggacgtatggaaacgcattccatgctaaattga

SEQ ID NO: 10967 - DNA, 36 bp, Artificial Sequence
  Synthetic oligonucleotide
gggtcggggggtcgacctatataaccaacgatgata

SEQ ID NO: 10968 - DNA, 38 bp, Artificial Sequence
  Synthetic oligonucleotide
ggtaaaagctggaaggaccccgccgcccccgcaactga

SEQ ID NO: 10969 - DNA, 35 bp, Artificial Sequence
  Synthetic oligonucleotide
ggtttcctatcattagaggcctggttgccagtaga

SEQ ID NO: 10970 - DNA, 35 bp, Artificial Sequence
  Synthetic oligonucleotide
gtaccgcgggaaccatgcggttttgggcccaatgt

SEQ ID NO: 10971 - DNA, 36 bp, Artificial Sequence
  Synthetic oligonucleotide
gtagccaagaccgtttaagcggtaacgaactgggaa

SEQ ID NO: 10972 - DNA, 37 bp, Artificial Sequence
  Synthetic oligonucleotide
gtagtttcgtgctttgtggaattgcccccttgcgtga

SEQ ID NO: 10973 - DNA, 36 bp, Artificial Sequence
  Synthetic oligonucleotide
gtgaggccgcatattggcctactcgagttatcatca

SEQ ID NO: 10974 - DNA, 38 bp, Artificial Sequence
  Synthetic oligonucleotide
gtgatcgtagacctgaaggtgtctctcatgcgtactga

SEQ ID NO: 10975 - DNA, 38 bp, Artificial Sequence
  Synthetic oligonucleotide
gtgggtatacactcgtgctagacaagccacaaatgcga

SEQ ID NO: 10976 - DNA, 38 bp, Artificial Sequence
  Synthetic oligonucleotide
gttcccaatggtaattatacatagattggctggcttga

SEQ ID NO: 10977 - DNA, 35 bp, Artificial Sequence
  Synthetic oligonucleotide
gttgtccaatcggcacacttaggccaagtaaagtg

SEQ ID NO: 10978 - DNA, 35 bp, Artificial Sequence
  Synthetic oligonucleotide
gtttcacacgcgttagcattaggatctgaagcggg

SEQ ID NO: 10979 - DNA, 38 bp, Artificial Sequence
  Synthetic oligonucleotide
gtttctgcggggcaccttgaatgggctcaatgacgtga

SEQ ID NO: 10980 - DNA, 35 bp, Artificial Sequence
  Synthetic oligonucleotide
taaattcatgcagaggcgacactgcgagtgtaagt

SEQ ID NO: 10981 - DNA, 35 bp, Artificial Sequence
  Synthetic oligonucleotide
taaggtatacatgacgtatggcatcatttttgcga

SEQ ID NO: 10982 - DNA, 35 bp, Artificial Sequence
  Synthetic oligonucleotide
taataatacttgtgggggaagggtattcatttctg

SEQ ID NO: 10983 - DNA, 37 bp, Artificial Sequence
  Synthetic oligonucleotide
taatgcgtccgatccggccgcctatactccggtagga

SEQ ID NO: 10984 - DNA, 36 bp, Artificial Sequence
  Synthetic oligonucleotide
tactctgtactgggtcctcattgacagatgcttgga

SEQ ID NO: 10985 - DNA, 36 bp, Artificial Sequence
  Synthetic oligonucleotide
tagcatctggccaagaaggctatatattgcctcaga

SEQ ID NO: 10986 - DNA, 35 bp, Artificial Sequence
  Synthetic oligonucleotide
tagctctgctaaagatctgtggtatttgcaaatgg

SEQ ID NO: 10987 - DNA, 36 bp, Artificial Sequence
  Synthetic oligonucleotide
taggataacggttctattgtatcgaacgcttccgaa

SEQ ID NO: 10988 - DNA, 38 bp, Artificial Sequence
  Synthetic oligonucleotide
taggccacagcccatgtagaatctagtctcggatttga

SEQ ID NO: 10989 - DNA, 37 bp, Artificial Sequence
  Synthetic oligonucleotide
tagttgggtgctgaatagtagctgttaacgttgcgga

SEQ ID NO: 10990 - DNA, 36 bp, Artificial Sequence
  Synthetic oligonucleotide
tatagcacggtacatactcagcctttgggggcccca

SEQ ID NO: 10991 - DNA, 36 bp, Artificial Sequence
  Synthetic oligonucleotide
tcaatgcgctcccaaaaagtacgccgagtctaggta

SEQ ID NO: 10992 - DNA, 38 bp, Artificial Sequence
  Synthetic oligonucleotide
tcagttcgcaaccgcccccttgccatgaaattgcgtga

SEQ ID NO: 10993 - DNA, 37 bp, Artificial Sequence
  Synthetic oligonucleotide
tccatatctgcatcaagggggagttagaatcgttgga

SEQ ID NO: 10994 - DNA, 36 bp, Artificial Sequence
  Synthetic oligonucleotide
tcgcgataatagtcaggatgctatcagcattacgga

SEQ ID NO: 10995 - DNA, 35 bp, Artificial Sequence
  Synthetic oligonucleotide
tgaattaatctacctttcgcctcgctggtgttggg

SEQ ID NO: 10996 - DNA, 37 bp, Artificial Sequence
  Synthetic oligonucleotide
ttacagagcatgtgagttcgatggcatggaaccaaga

SEQ ID NO: 10997 - DNA, 36 bp, Artificial Sequence
  Synthetic oligonucleotide
ttacataacgtcatcggtcatggtgtcgacatttga

SEQ ID NO: 10998 - DNA, 36 bp, Artificial Sequence
  Synthetic oligonucleotide
ttacgaaatacctgtgctgtatgttaacgggctcga

SEQ ID NO: 10999 - DNA, 35 bp, Artificial Sequence
  Synthetic oligonucleotide
ttatcgcatctgggtacacatcggaatgtatcgat

SEQ ID NO: 11000 - DNA, 35 bp, Artificial Sequence
  Synthetic oligonucleotide
ttcacacgcggggagtagtgcagggggctattatg

SEQ ID NO: 11001 - DNA, 37 bp, Artificial Sequence
  Synthetic oligonucleotide
ttccttgcccaagcggagaaggtacaacgtccttgga

SEQ ID NO: 11002 - DNA, 36 bp, Artificial Sequence
  Synthetic oligonucleotide
ttcgcctactgtaatcgtctggtgatcaaaacctga

SEQ ID NO: 11003 - DNA, 35 bp, Artificial Sequence
  Synthetic oligonucleotide
ttgactctatcacgccaagtagatagttggtaggt

SEQ ID NO: 11004 - DNA, 37 bp, Artificial Sequence
  Synthetic oligonucleotide
gtctaaattgatgaaacgtaggtatggtcggttctga

SEQ ID NO: 11005 - DNA, 35 bp, Artificial Sequence
  Synthetic oligonucleotide
gaagcccatcagttaaggatgacgagtttcaccta

SEQ ID NO: 11006 - DNA, 38 bp, Artificial Sequence
  Synthetic oligonucleotide
aacgcacaggcccaagtgccggaacccggctatcttga

SEQ ID NO: 11007 - DNA, 36 bp, Artificial Sequence
  Synthetic oligonucleotide
aatgcgatggagttcaggcgcgcgtactgcagttca

SEQ ID NO: 11008 - DNA, 36 bp, Artificial Sequence
  Synthetic oligonucleotide
aatggttgcccgtatggcctattgggatgttttaaa

SEQ ID NO: 11009 - DNA, 38 bp, Artificial Sequence
  Synthetic oligonucleotide
accattgcataatggtcaactactaatcagtaatgtga

SEQ ID NO: 11010 - DNA, 37 bp, Artificial Sequence
  Synthetic oligonucleotide
acccatattgtgcgtgagttaatatgttaggggacga

SEQ ID NO: 11011 - DNA, 37 bp, Artificial Sequence
  Synthetic oligonucleotide
agtcctgcattgttttgaatctggaagaaagggcgga

SEQ ID NO: 11012 - DNA, 36 bp, Artificial Sequence
  Synthetic oligonucleotide
atgttcgtctaaaggaagtgatcacaggtaacgata

SEQ ID NO: 11013 - DNA, 38 bp, Artificial Sequence
  Synthetic oligonucleotide
gactgcggagggctgagggactgcaatttaaaaagtga

SEQ ID NO: 11014 - DNA, 38 bp, Artificial Sequence
  Synthetic oligonucleotide
gcaaccaatgcggagtcgcagttgaccacgcggggtga

SEQ ID NO: 11015 - DNA, 37 bp, Artificial Sequence
  Synthetic oligonucleotide
gcaagcatacacagggtcatttaaacgggcatgctga

SEQ ID NO: 11016 - DNA, 37 bp, Artificial Sequence
  Synthetic oligonucleotide
gcacgcgtacgaatacccttttagactggctacgtga

SEQ ID NO: 11017 - DNA, 38 bp, Artificial Sequence
  Synthetic oligonucleotide
gcgagatcacgtataattcaccgtgatcagtatggtga

SEQ ID NO: 11018 - DNA, 37 bp, Artificial Sequence
  Synthetic oligonucleotide
gcgcagaacgcactgcaacgtcgtttgatctacatga

SEQ ID NO: 11019 - DNA, 35 bp, Artificial Sequence
  Synthetic oligonucleotide
ggcctgtttgcgttaacacggtgcaggtaatgcga

SEQ ID NO: 11020 - DNA, 37 bp, Artificial Sequence
  Synthetic oligonucleotide
gttacgtcactgactgtgaggtcacgtcttgggtgga

SEQ ID NO: 11021 - DNA, 35 bp, Artificial Sequence
  Synthetic oligonucleotide
tataagaaacaataggggggcatgggatatgcgcg

SEQ ID NO: 11022 - DNA, 36 bp, Artificial Sequence
  Synthetic oligonucleotide
tcgatctgggatgttctctgcatgcgggctatgata

SEQ ID NO: 11023 - DNA, 38 bp, Artificial Sequence
  Synthetic oligonucleotide
tgcacgtaattgacgtgcaagttaagtgactgctatga

SEQ ID NO: 11024 - DNA, 35 bp, Artificial Sequence
  Synthetic oligonucleotide
tggaccataacgcgtgttgacgatgaaccgagaag

SEQ ID NO: 11025 - DNA, 37 bp, Artificial Sequence
  Synthetic oligonucleotide
tggggtataggcatgatttaagtgcattgcggtaaga

SEQ ID NO: 11026 - DNA, 38 bp, Artificial Sequence
  Synthetic oligonucleotide
tgtgccactaatctagcagcatgactgtacgattttga

SEQ ID NO: 11027 - DNA, 36 bp, Artificial Sequence
  Synthetic oligonucleotide
tttgtggcgtgcgataacacgaccgcatgtggagta

SEQ ID NO: 11028 - DNA, 36 bp, Artificial Sequence
  Synthetic oligonucleotide
aggtcgcgcaagcgccccgcgagtacatatttgaga

SEQ ID NO: 11029 - DNA, 37 bp, Artificial Sequence
  Synthetic oligonucleotide
gacaactgtcacagggaagccacggccgagaccggga

SEQ ID NO: 11030 - DNA, 37 bp, Artificial Sequence
  Synthetic oligonucleotide
gatccatacatggctcggacttgacatcgacaaacga

SEQ ID NO: 11031 - DNA, 37 bp, Artificial Sequence
  Synthetic oligonucleotide
gtagacgatagtccgtggactgggagaacctaaacga

SEQ ID NO: 11032 - DNA, 36 bp, Artificial Sequence
  Synthetic oligonucleotide
gtccgccaagtacgattcgttacatgccgatatgta

SEQ ID NO: 11033 - DNA, 36 bp, Artificial Sequence
  Synthetic oligonucleotide
gaagcttccagaagcggtttgcaggccattgattta

SEQ ID NO: 11034 - DNA, 37 bp, Artificial Sequence
  Synthetic oligonucleotide
gcttacccacattagattgttaatgcgtagcaagtga

SEQ ID NO: 11035 - DNA, 38 bp, Artificial Sequence
  Synthetic oligonucleotide
gttacgtgggttaatgcacaggccacagttgaggctga

SEQ ID NO: 11036 - DNA, 37 bp, Artificial Sequence
  Synthetic oligonucleotide
gttcatgatttagtgcagttctctcatgaacggcgga

SEQ ID NO: 11037 - DNA, 37 bp, Artificial Sequence
  Synthetic oligonucleotide
tcatgcgacatgggttgtttctaaagtacagaaagga

SEQ ID NO: 11038 - DNA, 36 bp, Artificial Sequence
  Synthetic oligonucleotide
aacggcgcatgttgttagttggacttttcttcttga

SEQ ID NO: 11039 - DNA, 34 bp, Artificial Sequence
  Synthetic oligonucleotide
aactggaggtaggccaaatgaggcccgggtcggc

SEQ ID NO: 11040 - DNA, 37 bp, Artificial Sequence
  Synthetic oligonucleotide
aagtctagcgggtacgcggcctgggtcctcttggtga

SEQ ID NO: 11041 - DNA, 36 bp, Artificial Sequence
  Synthetic oligonucleotide
acaactgaacctagacataagggcaacaccgtagga

SEQ ID NO: 11042 - DNA, 37 bp, Artificial Sequence
  Synthetic oligonucleotide
acagccaggccggcttgaagacagtcagggttgccga

SEQ ID NO: 11043 - DNA, 38 bp, Artificial Sequence
  Synthetic oligonucleotide
acccatcacgacaagtggagtcttgaaatttggcttga

SEQ ID NO: 11044 - DNA, 38 bp, Artificial Sequence
  Synthetic oligonucleotide
acctgcaggaggaggacttttgtgacacagaaagatga

SEQ ID NO: 11045 - DNA, 36 bp, Artificial Sequence
  Synthetic oligonucleotide
acgtgtgtgctacaatgaacacccgtgtctagggta

SEQ ID NO: 11046 - DNA, 36 bp, Artificial Sequence
  Synthetic oligonucleotide
actgtgggtccatgggttaccggggtgataatggaa

SEQ ID NO: 11047 - DNA, 36 bp, Artificial Sequence
  Synthetic oligonucleotide
agaagcgcgtgtaagtagttggtggtatggagacaa

SEQ ID NO: 11048 - DNA, 36 bp, Artificial Sequence
  Synthetic oligonucleotide
agcatcctgcacgttagagacgtggtgacacttcga

SEQ ID NO: 11049 - DNA, 36 bp, Artificial Sequence
  Synthetic oligonucleotide
agtacacactatcaggtgcatgatagtattacaaga

SEQ ID NO: 11050 - DNA, 38 bp, Artificial Sequence
  Synthetic oligonucleotide
agtgaagcgatcagtttcacctggagcgtgcgtcttga

SEQ ID NO: 11051 - DNA, 37 bp, Artificial Sequence
  Synthetic oligonucleotide
atagggcttgcatggaatatacttgccgtttggagga

SEQ ID NO: 11052 - DNA, 36 bp, Artificial Sequence
  Synthetic oligonucleotide
atatagcgacatctcgggtacgagtggcatcgtgta

SEQ ID NO: 11053 - DNA, 36 bp, Artificial Sequence
  Synthetic oligonucleotide
atgtggacacctgaccattaactgaagaaccgacta

SEQ ID NO: 11054 - DNA, 36 bp, Artificial Sequence
  Synthetic oligonucleotide
caaatgctactgacgttcgactgttattagaatcga

SEQ ID NO: 11055 - DNA, 38 bp, Artificial Sequence
  Synthetic oligonucleotide
catgccatcacagggggacgaggagcggttctgttgga

SEQ ID NO: 11056 - DNA, 36 bp, Artificial Sequence
  Synthetic oligonucleotide
catgtatcagagaggcataagccgttctctttctta

SEQ ID NO: 11057 - DNA, 38 bp, Artificial Sequence
  Synthetic oligonucleotide
gaaccgaataagtatgaagtccgcggccgaattagtga

SEQ ID NO: 11058 - DNA, 36 bp, Artificial Sequence
  Synthetic oligonucleotide
gaggtttagttagatcgcgccactcgtcacccgcta

SEQ ID NO: 11059 - DNA, 36 bp, Artificial Sequence
  Synthetic oligonucleotide
gatttacggacgagttcgtgttgctggtacgtgtga

SEQ ID NO: 11060 - DNA, 37 bp, Artificial Sequence
  Synthetic oligonucleotide
gcaatagtttatgcgtcctgcgttggagtacttgcga

SEQ ID NO: 11061 - DNA, 38 bp, Artificial Sequence
  Synthetic oligonucleotide
gcacatgcatgtgccctaatgcggtttaaggtttgtga

SEQ ID NO: 11062 - DNA, 37 bp, Artificial Sequence
  Synthetic oligonucleotide
gccatagtgtcgaatggctaaccacggagatgtctga

SEQ ID NO: 11063 - DNA, 36 bp, Artificial Sequence
  Synthetic oligonucleotide
gcgagtcaaggacgatgggcggcttgtaacggggaa

SEQ ID NO: 11064 - DNA, 35 bp, Artificial Sequence
  Synthetic oligonucleotide
ggattagtcttaccacgggttgggcgcaacagata

SEQ ID NO: 11065 - DNA, 36 bp, Artificial Sequence
  Synthetic oligonucleotide
ggtactaccttgacttcgggataccggttattgcga

SEQ ID NO: 11066 - DNA, 37 bp, Artificial Sequence
  Synthetic oligonucleotide
ggtcccgtccaataagaatcagccccgggagatacga

SEQ ID NO: 11067 - DNA, 38 bp, Artificial Sequence
  Synthetic oligonucleotide
gtaacataaccgccaatgttgaatgtgggacactttga

SEQ ID NO: 11068 - DNA, 38 bp, Artificial Sequence
  Synthetic oligonucleotide
gtcattgacttgacacgcgaaaacttgggcgggactga

SEQ ID NO: 11069 - DNA, 37 bp, Artificial Sequence
  Synthetic oligonucleotide
gtcgctggtgtcagtctacgttaccgccagagtaaga

SEQ ID NO: 11070 - DNA, 36 bp, Artificial Sequence
  Synthetic oligonucleotide
gtcttataagcctgcaggttccgtaaagaaccgcta

SEQ ID NO: 11071 - DNA, 35 bp, Artificial Sequence
  Synthetic oligonucleotide
gtgcgtacaatcacaagtttgtcatcgaaagggga

SEQ ID NO: 11072 - DNA, 36 bp, Artificial Sequence
  Synthetic oligonucleotide
taagtgttctaagatggcgtaatcgagacatgcaga

SEQ ID NO: 11073 - DNA, 36 bp, Artificial Sequence
  Synthetic oligonucleotide
taggggtcctgatgataatcaatcgggttacgcgaa

SEQ ID NO: 11074 - DNA, 35 bp, Artificial Sequence
  Synthetic oligonucleotide
tatcggaactctgtagtacatacgggggacaggac

SEQ ID NO: 11075 - DNA, 35 bp, Artificial Sequence
  Synthetic oligonucleotide
tcctcacgtcaatctgggaatagacgttgtcactt

SEQ ID NO: 11076 - DNA, 35 bp, Artificial Sequence
  Synthetic oligonucleotide
tcgtgggggaatgaggggtccggcctcatgtatac

SEQ ID NO: 11077 - DNA, 35 bp, Artificial Sequence
  Synthetic oligonucleotide
tgaagtgtgagcgccgaaactctgcatcaacgaat

SEQ ID NO: 11078 - DNA, 35 bp, Artificial Sequence
  Synthetic oligonucleotide
tgaatcgaagacgtgttgagtcaaatgcgccgccc

SEQ ID NO: 11079 - DNA, 36 bp, Artificial Sequence
  Synthetic oligonucleotide
tgcgagtgcgcatagtttttcggcaagagttggcaa

SEQ ID NO: 11080 - DNA, 35 bp, Artificial Sequence
  Synthetic oligonucleotide
tgcgctccactgcccggacgatgctgcctactgtc

SEQ ID NO: 11081 - DNA, 35 bp, Artificial Sequence
  Synthetic oligonucleotide
tgtagttcttgcctacgacaggactcaatgtgacg

SEQ ID NO: 11082 - DNA, 36 bp, Artificial Sequence
  Synthetic oligonucleotide
tgtgcgactattggattcgataactataggcgggta

SEQ ID NO: 11083 - DNA, 36 bp, Artificial Sequence
  Synthetic oligonucleotide
agagtttgtgcagtcctgggtgccgagcctctagta

SEQ ID NO: 11084 - DNA, 36 bp, Artificial Sequence
  Synthetic oligonucleotide
tttatgcctggtttggcctacaagtttcggaggata

SEQ ID NO: 11085 - DNA, 36 bp, Artificial Sequence
  Synthetic oligonucleotide
acgactcccacccgtttagtcacggccgataacgta

SEQ ID NO: 11086 - DNA, 35 bp, Artificial Sequence
  Synthetic oligonucleotide
ctcacatgtgcggtctaactgctagaagttcctgg

SEQ ID NO: 11087 - DNA, 36 bp, Artificial Sequence
  Synthetic oligonucleotide
ctgaactgtggccagtcaaggggacgggggctaata

SEQ ID NO: 11088 - DNA, 35 bp, Artificial Sequence
  Synthetic oligonucleotide
gcatgcatcggtggttaggaccgttgccacgaagt

SEQ ID NO: 11089 - DNA, 38 bp, Artificial Sequence
  Synthetic oligonucleotide
ggtgtgacttggggtggtaaagttgccgtgacatatga

SEQ ID NO: 11090 - DNA, 36 bp, Artificial Sequence
  Synthetic oligonucleotide
tgcactgtaggcatttatgttgtcgactgaagtgta

SEQ ID NO: 11091 - DNA, 37 bp, Artificial Sequence
  Synthetic oligonucleotide
aagtccgtgtccagccgctttccacgtgaatggttga

SEQ ID NO: 11092 - DNA, 37 bp, Artificial Sequence
  Synthetic oligonucleotide
aatgtcacatcaagagtatatcacgcatccactgcga

SEQ ID NO: 11093 - DNA, 37 bp, Artificial Sequence
  Synthetic oligonucleotide
accgctagtcctcggatgtacgataaacggagtccga

SEQ ID NO: 11094 - DNA, 37 bp, Artificial Sequence
  Synthetic oligonucleotide
accgggggttccgcaagtttgtcgtctgtggattaga

SEQ ID NO: 11095 - DNA, 38 bp, Artificial Sequence
  Synthetic oligonucleotide
actaggctaccgaccagtcaagcttagtaaacgagtga

SEQ ID NO: 11096 - DNA, 38 bp, Artificial Sequence
  Synthetic oligonucleotide
actgccgaggtatatcggcacggacaactgcagagtga

SEQ ID NO: 11097 - DNA, 37 bp, Artificial Sequence
  Synthetic oligonucleotide
agtcctgagcaatgtgcatgggttataatctcaccga

SEQ ID NO: 11098 - DNA, 37 bp, Artificial Sequence
  Synthetic oligonucleotide
agttcgcgcggaatgagtccctagcgtggcccttcga

SEQ ID NO: 11099 - DNA, 36 bp, Artificial Sequence
  Synthetic oligonucleotide
ataccagggggtcctgagccagtggggaagaaaaca

SEQ ID NO: 11100 - DNA, 36 bp, Artificial Sequence
  Synthetic oligonucleotide
ataggagcccgtactaactgcggcccacctggctaa

SEQ ID NO: 11101 - DNA, 35 bp, Artificial Sequence
  Synthetic oligonucleotide
atcagcagttaacgtggtctttcaggactacctaa

SEQ ID NO: 11102 - DNA, 35 bp, Artificial Sequence
  Synthetic oligonucleotide
attgtatccatggattaggtctgttttacggactg

SEQ ID NO: 11103 - DNA, 36 bp, Artificial Sequence
  Synthetic oligonucleotide
catccagccgaagagtcttatttatagtcgtataca

SEQ ID NO: 11104 - DNA, 37 bp, Artificial Sequence
  Synthetic oligonucleotide
gcatggcatgcctcggatttaaaggttttgaaataga

SEQ ID NO: 11105 - DNA, 36 bp, Artificial Sequence
  Synthetic oligonucleotide
gcgtgtatggtggatgatcctgaaatggagatgcaa

SEQ ID NO: 11106 - DNA, 36 bp, Artificial Sequence
  Synthetic oligonucleotide
gctacagaagacgttgagcgcgtagatacgcagaca

SEQ ID NO: 11107 - DNA, 35 bp, Artificial Sequence
  Synthetic oligonucleotide
gctgtcctccctccgtgtgcaagacggggttccac

SEQ ID NO: 11108 - DNA, 37 bp, Artificial Sequence
  Synthetic oligonucleotide
ggattgggtaatgtccgcgacgacgggcaattggcga

SEQ ID NO: 11109 - DNA, 37 bp, Artificial Sequence
  Synthetic oligonucleotide
ggtaacactggtagtccatgacggtaggcaccttgga

SEQ ID NO: 11110 - DNA, 37 bp, Artificial Sequence
  Synthetic oligonucleotide
gtcattagaccgctggcctgatacgtgagcggggcga

SEQ ID NO: 11111 - DNA, 35 bp, Artificial Sequence
  Synthetic oligonucleotide
gtcggggggggcgaggtattatctttggggtccat

SEQ ID NO: 11112 - DNA, 38 bp, Artificial Sequence
  Synthetic oligonucleotide
gtggcaagggtaccgtagtcggactggtaccgaattga

SEQ ID NO: 11113 - DNA, 38 bp, Artificial Sequence
  Synthetic oligonucleotide
tcgaagtgcagaactacgagctaccttcatggccatga

SEQ ID NO: 11114 - DNA, 35 bp, Artificial Sequence
  Synthetic oligonucleotide
ttgaatgacgacggacttaggcggtctaggataag

SEQ ID NO: 11115 - DNA, 37 bp, Artificial Sequence
  Synthetic oligonucleotide
ttggtactggtcctaagtcaaccggcggtaatttaga

SEQ ID NO: 11116 - DNA, 35 bp, Artificial Sequence
  Synthetic oligonucleotide
atagctaactgtgttaaatatgtcgctggggtata

SEQ ID NO: 11117 - DNA, 35 bp, Artificial Sequence
  Synthetic oligonucleotide
acgtcatacgtaagggttagcccctgatattcgag

SEQ ID NO: 11118 - DNA, 37 bp, Artificial Sequence
  Synthetic oligonucleotide
ggacgcatccgggactttccatcaggagggtactcga

SEQ ID NO: 11119 - DNA, 35 bp, Artificial Sequence
  Synthetic oligonucleotide
gatgcgtagtcatgggtttacaggacagtcctcag

SEQ ID NO: 11120 - DNA, 36 bp, Artificial Sequence
  Synthetic oligonucleotide
acctgctgtcaggtcacggaggggtgttaacagcaa

SEQ ID NO: 11121 - DNA, 37 bp, Artificial Sequence
  Synthetic oligonucleotide
actgtaggctcacatgttaacctttattccgccctga

SEQ ID NO: 11122 - DNA, 35 bp, Artificial Sequence
  Synthetic oligonucleotide
agaccttaggtgcatggtggattagggaggctttg

SEQ ID NO: 11123 - DNA, 37 bp, Artificial Sequence
  Synthetic oligonucleotide
agagcgagaggctctgctttgacccatcttatgtgga

SEQ ID NO: 11124 - DNA, 35 bp, Artificial Sequence
  Synthetic oligonucleotide
gactgcctcacacgaagttaggtatatgtatgcga

SEQ ID NO: 11125 - DNA, 36 bp, Artificial Sequence
  Synthetic oligonucleotide
gactggagatggttcgtgctgcctattgctagataa

SEQ ID NO: 11126 - DNA, 35 bp, Artificial Sequence
  Synthetic oligonucleotide
gctttgcctcataaccccaacgactttcgccacca

SEQ ID NO: 11127 - DNA, 37 bp, Artificial Sequence
  Synthetic oligonucleotide
attaggaaacgaggaccggcccggtcatagcgacgga

SEQ ID NO: 11128 - DNA, 35 bp, Artificial Sequence
  Synthetic oligonucleotide
ggtaccaagagggtcccacgtcgtggaaaagttat

SEQ ID NO: 11129 - DNA, 36 bp, Artificial Sequence
  Synthetic oligonucleotide
aatcggactgcgtgttgacatgcacttgccaccgta

SEQ ID NO: 11130 - DNA, 37 bp, Artificial Sequence
  Synthetic oligonucleotide
aatttcgtgaggctgattttcaggaattcagggtaga

SEQ ID NO: 11131 - DNA, 35 bp, Artificial Sequence
  Synthetic oligonucleotide
accggggtgaaccgggaaatattagcagctggatc

SEQ ID NO: 11132 - DNA, 35 bp, Artificial Sequence
  Synthetic oligonucleotide
acgctttgtggagggtaatgcgtggagacttggcc

SEQ ID NO: 11133 - DNA, 37 bp, Artificial Sequence
  Synthetic oligonucleotide
actgttgtaatgatctacaactgtatggctaccagga

SEQ ID NO: 11134 - DNA, 37 bp, Artificial Sequence
  Synthetic oligonucleotide
agaacatgtggttgccccgcctatggatactgtgcga

SEQ ID NO: 11135 - DNA, 38 bp, Artificial Sequence
  Synthetic oligonucleotide
agccaacagacatggggggtggaatggacaggccgtga

SEQ ID NO: 11136 - DNA, 36 bp, Artificial Sequence
  Synthetic oligonucleotide
aggaacgcagttagaaggctttggttgctacgaaaa

SEQ ID NO: 11137 - DNA, 37 bp, Artificial Sequence
  Synthetic oligonucleotide
agggtccctgccgtcatgtgatggacagaagtgctga

SEQ ID NO: 11138 - DNA, 36 bp, Artificial Sequence
  Synthetic oligonucleotide
aggtgaaatttgccacgagacagtctgtttggtcga

SEQ ID NO: 11139 - DNA, 35 bp, Artificial Sequence
  Synthetic oligonucleotide
atgggcattcgccacaggcagaataacgtctctca

SEQ ID NO: 11140 - DNA, 36 bp, Artificial Sequence
  Synthetic oligonucleotide
attaagcacttaacacgactgttaattcatagttta

SEQ ID NO: 11141 - DNA, 35 bp, Artificial Sequence
  Synthetic oligonucleotide
cagtcatggtcctggtagtatccagggggcggtat

SEQ ID NO: 11142 - DNA, 35 bp, Artificial Sequence
  Synthetic oligonucleotide
cctaccgagtagtcccccctcttcctgtagggtgt

SEQ ID NO: 11143 - DNA, 35 bp, Artificial Sequence
  Synthetic oligonucleotide
cctcgagcacctcagtatgagattgaggtgggaga

SEQ ID NO: 11144 - DNA, 35 bp, Artificial Sequence
  Synthetic oligonucleotide
gaatttcagctgtcgttcggaggcttacctaccct

SEQ ID NO: 11145 - DNA, 37 bp, Artificial Sequence
  Synthetic oligonucleotide
gagtctagaaagacgggatgtttatcattgtgcttga

SEQ ID NO: 11146 - DNA, 37 bp, Artificial Sequence
  Synthetic oligonucleotide
gagttcagtcataagaggttttagagctgtttgctga

SEQ ID NO: 11147 - DNA, 35 bp, Artificial Sequence
  Synthetic oligonucleotide
gatgattaagtcacacttcgggcgctaagtaatag

SEQ ID NO: 11148 - DNA, 36 bp, Artificial Sequence
  Synthetic oligonucleotide
gcacagggcattaagtgtcttgcttggtcaagcata

SEQ ID NO: 11149 - DNA, 36 bp, Artificial Sequence
  Synthetic oligonucleotide
gcatcactccgtactacgttaagagctcgggaccta

SEQ ID NO: 11150 - DNA, 38 bp, Artificial Sequence
  Synthetic oligonucleotide
gccccgtcggtcggctaagctgttagacgtggccttga

SEQ ID NO: 11151 - DNA, 36 bp, Artificial Sequence
  Synthetic oligonucleotide
gcgttccttctacgtcatgggccttttgtgacgcaa

SEQ ID NO: 11152 - DNA, 36 bp, Artificial Sequence
  Synthetic oligonucleotide
gctacccccgtcgaggccttatatatgcaggaacga

SEQ ID NO: 11153 - DNA, 38 bp, Artificial Sequence
  Synthetic oligonucleotide
ggaaaagcttccgagcccagagcgtgtagtcaaaatga

SEQ ID NO: 11154 - DNA, 36 bp, Artificial Sequence
  Synthetic oligonucleotide
ggaactggcattgggaccgccggggggggcgggata

SEQ ID NO: 11155 - DNA, 35 bp, Artificial Sequence
  Synthetic oligonucleotide
ggctcgcaggtgacgctagtgaggacatactggtt

SEQ ID NO: 11156 - DNA, 35 bp, Artificial Sequence
  Synthetic oligonucleotide
gggtactacgtgtatcatatgagtcttgcggatag

SEQ ID NO: 11157 - DNA, 36 bp, Artificial Sequence
  Synthetic oligonucleotide
ggtcattaccagttagacaagatggacttggaccaa

SEQ ID NO: 11158 - DNA, 37 bp, Artificial Sequence
  Synthetic oligonucleotide
ggtgatacgtctcttaaatagagtggtttcacaccga

SEQ ID NO: 11159 - DNA, 36 bp, Artificial Sequence
  Synthetic oligonucleotide
gtatactcaattacgttccgtatgtcgtatatcgga

SEQ ID NO: 11160 - DNA, 38 bp, Artificial Sequence
  Synthetic oligonucleotide
gtcatgcatttgcgacaggatgggactagggttactga

SEQ ID NO: 11161 - DNA, 37 bp, Artificial Sequence
  Synthetic oligonucleotide
gttgacccattggttatcccccaacgacacacaggga

SEQ ID NO: 11162 - DNA, 37 bp, Artificial Sequence
  Synthetic oligonucleotide
taagcgcgagctatggggcccaccgccataatataga

SEQ ID NO: 11163 - DNA, 38 bp, Artificial Sequence
  Synthetic oligonucleotide
taatgtaacagatgggttatatgcgggtgatacgatga

SEQ ID NO: 11164 - DNA, 35 bp, Artificial Sequence
  Synthetic oligonucleotide
tcccggaacgtcacaccgaccaatacgtaactcgc

SEQ ID NO: 11165 - DNA, 35 bp, Artificial Sequence
  Synthetic oligonucleotide
tcgtgtttgaacgtctttgaagtggcttatgataa

SEQ ID NO: 11166 - DNA, 35 bp, Artificial Sequence
  Synthetic oligonucleotide
tgactggcccgatatatattcacagggcacactac

SEQ ID NO: 11167 - DNA, 36 bp, Artificial Sequence
  Synthetic oligonucleotide
tgacttcttggaacctggagttttattgactgtaga

SEQ ID NO: 11168 - DNA, 37 bp, Artificial Sequence
  Synthetic oligonucleotide
tgacttgtcattgtttataatagaaaaagtctgcgga

SEQ ID NO: 11169 - DNA, 36 bp, Artificial Sequence
  Synthetic oligonucleotide
tgataatcgccgtgtatacaggaatctttgacgcta

SEQ ID NO: 11170 - DNA, 36 bp, Artificial Sequence
  Synthetic oligonucleotide
tgctggtgcgcgtttcgagaggttcgagcccgtcta

SEQ ID NO: 11171 - DNA, 38 bp, Artificial Sequence
  Synthetic oligonucleotide
ttatcatgcaaaaggttgctgtagactctctgacatga

SEQ ID NO: 11172 - DNA, 38 bp, Artificial Sequence
  Synthetic oligonucleotide
ttcgctagtaagggtactgtaaatgtatggattattga

SEQ ID NO: 11173 - DNA, 35 bp, Artificial Sequence
  Synthetic oligonucleotide
ttgaagttttgaggtagttgtatgcggtatggttg

SEQ ID NO: 11174 - DNA, 36 bp, Artificial Sequence
  Synthetic oligonucleotide
gatagacgtatctacggtggttttgcaagcacaaca

SEQ ID NO: 11175 - DNA, 38 bp, Artificial Sequence
  Synthetic oligonucleotide
ccttcctacaaggtcaatgccgtaccatagccgtgtga

SEQ ID NO: 11176 - DNA, 37 bp, Artificial Sequence
  Synthetic oligonucleotide
tggactcacgagggtaagggcggactcgtgagacgga

SEQ ID NO: 11177 - DNA, 36 bp, Artificial Sequence
  Synthetic oligonucleotide
aacgggtcaattgagtgctaattcacccccatctca

SEQ ID NO: 11178 - DNA, 38 bp, Artificial Sequence
  Synthetic oligonucleotide
acctaacgaagttagggctcacagtcatggaatattga

SEQ ID NO: 11179 - DNA, 36 bp, Artificial Sequence
  Synthetic oligonucleotide
accttccccgccccctggtaggcgagatggccccaa

SEQ ID NO: 11180 - DNA, 35 bp, Artificial Sequence
  Synthetic oligonucleotide
actggctaggactctcggagcccctatgctacgaa

SEQ ID NO: 11181 - DNA, 37 bp, Artificial Sequence
  Synthetic oligonucleotide
aggagcaacaacactacatatagcggactgactgcga

SEQ ID NO: 11182 - DNA, 36 bp, Artificial Sequence
  Synthetic oligonucleotide
agtgagcttcatacgggttgtaattagacccagcca

SEQ ID NO: 11183 - DNA, 37 bp, Artificial Sequence
  Synthetic oligonucleotide
atcgccatacatggtgctctacgctccttcgcgaaga

SEQ ID NO: 11184 - DNA, 38 bp, Artificial Sequence
  Synthetic oligonucleotide
atgagaatgacaccagcatctcagtggggatgggttga

SEQ ID NO: 11185 - DNA, 37 bp, Artificial Sequence
  Synthetic oligonucleotide
atgcattcatgactaggcatgaagcacaaatgacgga

SEQ ID NO: 11186 - DNA, 37 bp, Artificial Sequence
  Synthetic oligonucleotide
caaaaggccaggctggttaggtggttggccgggcgga

SEQ ID NO: 11187 - DNA, 37 bp, Artificial Sequence
  Synthetic oligonucleotide
gaaacgagggactgtcctggtctaggactgcggacga

SEQ ID NO: 11188 - DNA, 36 bp, Artificial Sequence
  Synthetic oligonucleotide
gaacatcatgtacgtagtagaagtttggggtgcaca

SEQ ID NO: 11189 - DNA, 36 bp, Artificial Sequence
  Synthetic oligonucleotide
gacgttcgatgccttgttggttggtattccattaga

SEQ ID NO: 11190 - DNA, 37 bp, Artificial Sequence
  Synthetic oligonucleotide
gcactaattggtcgatgggacaatggattttaacgga

SEQ ID NO: 11191 - DNA, 37 bp, Artificial Sequence
  Synthetic oligonucleotide
gctatcccggggatagcgcacctaagcagtagagtga

SEQ ID NO: 11192 - DNA, 38 bp, Artificial Sequence
  Synthetic oligonucleotide
gtactgaagttgtaacaagtcacgcgtagttcacctga

SEQ ID NO: 11193 - DNA, 34 bp, Artificial Sequence
  Synthetic oligonucleotide
gtcaagcgtgctgctaaggacattttagaaacgg

SEQ ID NO: 11194 - DNA, 35 bp, Artificial Sequence
  Synthetic oligonucleotide
gttccttgtcacggatgggcattcacggttgattc

SEQ ID NO: 11195 - DNA, 37 bp, Artificial Sequence
  Synthetic oligonucleotide
tacgctaagttctctgtaggtagtatcaggggactga

SEQ ID NO: 11196 - DNA, 36 bp, Artificial Sequence
  Synthetic oligonucleotide
tagcacgtcctggttttgtgcgccggaaactagcga

SEQ ID NO: 11197 - DNA, 36 bp, Artificial Sequence
  Synthetic oligonucleotide
taggtttgtcatgccaacggaggggcaaactacgta

SEQ ID NO: 11198 - DNA, 36 bp, Artificial Sequence
  Synthetic oligonucleotide
tatcgcgacggggcgtattctcacgttgtcgggtca

SEQ ID NO: 11199 - DNA, 37 bp, Artificial Sequence
  Synthetic oligonucleotide
tatgcatggccaaagtaaagattttgagctttgacga

SEQ ID NO: 11200 - DNA, 36 bp, Artificial Sequence
  Synthetic oligonucleotide
tgaagaatagagccagggtgtcgttactcatgagta

SEQ ID NO: 11201 - DNA, 36 bp, Artificial Sequence
  Synthetic oligonucleotide
tgcacaacctgtcgagcgttgttcatagcctaggga

SEQ ID NO: 11202 - DNA, 37 bp, Artificial Sequence
  Synthetic oligonucleotide
tgtggagttgcacaacacggtctatcggagttcatga

SEQ ID NO: 11203 - DNA, 36 bp, Artificial Sequence
  Synthetic oligonucleotide
gtctgatgatcggacacgtactaccggtattctgga

SEQ ID NO: 11204 - DNA, 36 bp, Artificial Sequence
  Synthetic oligonucleotide
gtgctacgtaacgaacagtgcaggtctcattacaga

SEQ ID NO: 11205 - DNA, 38 bp, Artificial Sequence
  Synthetic oligonucleotide
gttagtggcaacagcggtgacggagcatcaccgggtga

SEQ ID NO: 11206 - DNA, 35 bp, Artificial Sequence
  Synthetic oligonucleotide
actcgaccaggactggtttaataggcatatgcatc

SEQ ID NO: 11207 - DNA, 36 bp, Artificial Sequence
  Synthetic oligonucleotide
actttgtcaaatacggggcgtggctgtctgtggcca

SEQ ID NO: 11208 - DNA, 35 bp, Artificial Sequence
  Synthetic oligonucleotide
agaccaataagtaatcggtttatgtcacgcgttca

SEQ ID NO: 11209 - DNA, 35 bp, Artificial Sequence
  Synthetic oligonucleotide
agggggtcgacgtggacgtggcaccgtacgtctgg

SEQ ID NO: 11210 - DNA, 37 bp, Artificial Sequence
  Synthetic oligonucleotide
agtgcatgtcaaagggtgttctgggtcaaatggtcga

SEQ ID NO: 11211 - DNA, 37 bp, Artificial Sequence
  Synthetic oligonucleotide
attagtaaggtcggggggaagccagttgatttcatga

SEQ ID NO: 11212 - DNA, 37 bp, Artificial Sequence
  Synthetic oligonucleotide
ccctgtagcattttaaccgagaggtagacgagtttga

SEQ ID NO: 11213 - DNA, 35 bp, Artificial Sequence
  Synthetic oligonucleotide
ctatccatcgtagaccggagtcaaccaggtcttgc

SEQ ID NO: 11214 - DNA, 36 bp, Artificial Sequence
  Synthetic oligonucleotide
gagtcctgagcattgtataggactgggtaatttaaa

SEQ ID NO: 11215 - DNA, 36 bp, Artificial Sequence
  Synthetic oligonucleotide
gtgttaggggggcgaaagtcgtggtgaagattgtaa

SEQ ID NO: 11216 - DNA, 37 bp, Artificial Sequence
  Synthetic oligonucleotide
tagggccagtggaataaaccacgcgactgttcgaaga

SEQ ID NO: 11217 - DNA, 35 bp, Artificial Sequence
  Synthetic oligonucleotide
tcgaaattgctgttggctgggccacatattgattg

SEQ ID NO: 11218 - DNA, 36 bp, Artificial Sequence
  Synthetic oligonucleotide
tgtgggacaccgtggctcggtgcggttccgagtata

SEQ ID NO: 11219 - DNA, 35 bp, Artificial Sequence
  Synthetic oligonucleotide
ttaaggcctccctccgccacagacctgccggactg

SEQ ID NO: 11220 - DNA, 35 bp, Artificial Sequence
  Synthetic oligonucleotide
atgcattcccatagcatggtgggccgcaacttctg

SEQ ID NO: 11221 - DNA, 35 bp, Artificial Sequence
  Synthetic oligonucleotide
acttacgtcctatggccatctggccccacgggggt

SEQ ID NO: 11222 - DNA, 36 bp, Artificial Sequence
  Synthetic oligonucleotide
agcaaaacggaacggatgagtgtttaggcccgtgta

SEQ ID NO: 11223 - DNA, 36 bp, Artificial Sequence
  Synthetic oligonucleotide
gggtcggagtggatcgaatgtatccacgtaggggta

SEQ ID NO: 11224 - DNA, 37 bp, Artificial Sequence
  Synthetic oligonucleotide
tagcggatagccgagtttgcttgatatgtaagcacga

SEQ ID NO: 11225 - DNA, 35 bp, Artificial Sequence
  Synthetic oligonucleotide
tgaactgctacaggaaacgaatgttctattatcgc

SEQ ID NO: 11226 - DNA, 35 bp, Artificial Sequence
  Synthetic oligonucleotide
ttacgctataacgctattcactggcgaaggtggtt

SEQ ID NO: 11227 - DNA, 36 bp, Artificial Sequence
  Synthetic oligonucleotide
ttgtctacaagggaacgcggtaaaggctggatacca

SEQ ID NO: 11228 - DNA, 38 bp, Artificial Sequence
  Synthetic oligonucleotide
aagtcatgatgcggctggcgctacgaccgggatattga

SEQ ID NO: 11229 - DNA, 35 bp, Artificial Sequence
  Synthetic oligonucleotide
taatgcaagaatgcaagtggagcccgaattatttt

SEQ ID NO: 11230 - DNA, 37 bp, Artificial Sequence
  Synthetic oligonucleotide
gccctacgcaaggcacggattcgttgtgcgtgggtga

SEQ ID NO: 11231 - DNA, 37 bp, Artificial Sequence
  Synthetic oligonucleotide
tgttgccctcgccaatgcagtttttgcggactttaga

SEQ ID NO: 11232 - DNA, 37 bp, Artificial Sequence
  Synthetic oligonucleotide
gacttgaacgcggtcgccgcccgctattccaatctga

SEQ ID NO: 11233 - DNA, 36 bp, Artificial Sequence
  Synthetic oligonucleotide
aaactaacagccgcgcttcggggctccctgcggata

SEQ ID NO: 11234 - DNA, 37 bp, Artificial Sequence
  Synthetic oligonucleotide
aaactgactccagggcgtaatgcgtaccttgctggga

SEQ ID NO: 11235 - DNA, 36 bp, Artificial Sequence
  Synthetic oligonucleotide
aaatagccgggcggcatattgggttctactttcgga

SEQ ID NO: 11236 - DNA, 38 bp, Artificial Sequence
  Synthetic oligonucleotide
aaatcagtgagcatgagcaaaagtggatgtgttactga

SEQ ID NO: 11237 - DNA, 36 bp, Artificial Sequence
  Synthetic oligonucleotide
aaccaggatacgccgtacctgtactatatggaagga

SEQ ID NO: 11238 - DNA, 38 bp, Artificial Sequence
  Synthetic oligonucleotide
aaccgcaagtccgataggccatgacaggtatgatctga

SEQ ID NO: 11239 - DNA, 37 bp, Artificial Sequence
  Synthetic oligonucleotide
aacgatcgaaatcgagtgtactacacgggatgtaaga

SEQ ID NO: 11240 - DNA, 35 bp, Artificial Sequence
  Synthetic oligonucleotide
aatagctaagcatacgagtcagaagctcatgcaca

SEQ ID NO: 11241 - DNA, 37 bp, Artificial Sequence
  Synthetic oligonucleotide
aatccaagacacaagtttggacataaagcctgccgga

SEQ ID NO: 11242 - DNA, 35 bp, Artificial Sequence
  Synthetic oligonucleotide
aatggtgcagaccccattgcacaaatgtacctagt

SEQ ID NO: 11243 - DNA, 38 bp, Artificial Sequence
  Synthetic oligonucleotide
aattgagtacataaaaagggacggaacggtaagagtga

SEQ ID NO: 11244 - DNA, 37 bp, Artificial Sequence
  Synthetic oligonucleotide
acaatagtactgagggacagttcatggttgggacaga

SEQ ID NO: 11245 - DNA, 36 bp, Artificial Sequence
  Synthetic oligonucleotide
acacatcatatatttaagtaagaccctgcaggggta

SEQ ID NO: 11246 - DNA, 36 bp, Artificial Sequence
  Synthetic oligonucleotide
acagcctcgcaggaatagggtagagttcccgtatca

SEQ ID NO: 11247 - DNA, 36 bp, Artificial Sequence
  Synthetic oligonucleotide
acattgtccgtggggattctctggaggtggacctga

SEQ ID NO: 11248 - DNA, 37 bp, Artificial Sequence
  Synthetic oligonucleotide
accagtctcagtagatgttactggtggacaccgcaca

SEQ ID NO: 11249 - DNA, 37 bp, Artificial Sequence
  Synthetic oligonucleotide
acccagtgggtacataggcgcgaacgaagctgaggga

SEQ ID NO: 11250 - DNA, 37 bp, Artificial Sequence
  Synthetic oligonucleotide
acgcctggcattggtttcgaagtggtcctcaggttga

SEQ ID NO: 11251 - DNA, 38 bp, Artificial Sequence
  Synthetic oligonucleotide
acgcgcatggtttgtcaggttatgtagagtgttgttga

SEQ ID NO: 11252 - DNA, 36 bp, Artificial Sequence
  Synthetic oligonucleotide
acttagcgacgttgcaggattggggggacgcatata

SEQ ID NO: 11253 - DNA, 35 bp, Artificial Sequence
  Synthetic oligonucleotide
agcatccgaggggctgcctctggtggcgagggccg

SEQ ID NO: 11254 - DNA, 35 bp, Artificial Sequence
  Synthetic oligonucleotide
agccgtgcaagaagtcaccggaaagtcaggttata

SEQ ID NO: 11255 - DNA, 37 bp, Artificial Sequence
  Synthetic oligonucleotide
aggccacagggagggggtttctgtgctttctatcaga

SEQ ID NO: 11256 - DNA, 35 bp, Artificial Sequence
  Synthetic oligonucleotide
aggtcccctccgctgttggctttgcgaaatttaag

SEQ ID NO: 11257 - DNA, 37 bp, Artificial Sequence
  Synthetic oligonucleotide
agtacaatccccgttcagtaatgctggtctttcagga

SEQ ID NO: 11258 - DNA, 35 bp, Artificial Sequence
  Synthetic oligonucleotide
agttagaagctgtttcatcagctcgacacgagcgt

SEQ ID NO: 11259 - DNA, 36 bp, Artificial Sequence
  Synthetic oligonucleotide
atgggtttactcatactaaagctgtatgttgtgcta

SEQ ID NO: 11260 - DNA, 36 bp, Artificial Sequence
  Synthetic oligonucleotide
atgtacagtagcttgacatggttaaagtacacatga

SEQ ID NO: 11261 - DNA, 38 bp, Artificial Sequence
  Synthetic oligonucleotide
atttgtggagcctcgaccacagtacggagactggctga

SEQ ID NO: 11262 - DNA, 38 bp, Artificial Sequence
  Synthetic oligonucleotide
catgcgtaccaacgttccaagttgcataacgtccctga

SEQ ID NO: 11263 - DNA, 35 bp, Artificial Sequence
  Synthetic oligonucleotide
cgcaggttcgtaagttccagaccgggatggtcatt

SEQ ID NO: 11264 - DNA, 35 bp, Artificial Sequence
  Synthetic oligonucleotide
cgttgacgcactagtattactggcgggagaaaact

SEQ ID NO: 11265 - DNA, 35 bp, Artificial Sequence
  Synthetic oligonucleotide
ctgagaggtatgaaggctcgacgaaacgaatttag

SEQ ID NO: 11266 - DNA, 35 bp, Artificial Sequence
  Synthetic oligonucleotide
gaacgtttagtgcggcttttgcgcattaggcttgg

SEQ ID NO: 11267 - DNA, 37 bp, Artificial Sequence
  Synthetic oligonucleotide
gaccatcacgtatcgtgccgcaaagtcaagccatgga

SEQ ID NO: 11268 - DNA, 38 bp, Artificial Sequence
  Synthetic oligonucleotide
gactgcgaccttgcgggggagagtcactaagcggttga

SEQ ID NO: 11269 - DNA, 35 bp, Artificial Sequence
  Synthetic oligonucleotide
gaggagctatgcaggcacgggacggacgtagtgtc

SEQ ID NO: 11270 - DNA, 37 bp, Artificial Sequence
  Synthetic oligonucleotide
gaggtgctagttatccacggggtaccgttatgtacga

SEQ ID NO: 11271 - DNA, 37 bp, Artificial Sequence
  Synthetic oligonucleotide
gatacgtaaaggcaccaccagattgggattcttatga

SEQ ID NO: 11272 - DNA, 37 bp, Artificial Sequence
  Synthetic oligonucleotide
gcaatgctgcaccattaggggtggtaagtaactgtga

SEQ ID NO: 11273 - DNA, 37 bp, Artificial Sequence
  Synthetic oligonucleotide
gcacgaacctattccgcacataccgccgtaagtccga

SEQ ID NO: 11274 - DNA, 37 bp, Artificial Sequence
  Synthetic oligonucleotide
gcatccgaacagtggactgcggtcatacatcatccga

SEQ ID NO: 11275 - DNA, 37 bp, Artificial Sequence
  Synthetic oligonucleotide
gccgatggctgtgtcgcgcgatcggtctgggacgtga

SEQ ID NO: 11276 - DNA, 38 bp, Artificial Sequence
  Synthetic oligonucleotide
gcctgcgcggatattttagatgttgaaaactggggtga

SEQ ID NO: 11277 - DNA, 38 bp, Artificial Sequence
  Synthetic oligonucleotide
gcgcgggtgtagatcttgtgaagaatgtgttattttga

SEQ ID NO: 11278 - DNA, 38 bp, Artificial Sequence
  Synthetic oligonucleotide
gcgtcgtagttggacctgtgtttcggattgggctatga

SEQ ID NO: 11279 - DNA, 37 bp, Artificial Sequence
  Synthetic oligonucleotide
gctcttgaacgtaccctcctgtcccctcgccaagaga

SEQ ID NO: 11280 - DNA, 36 bp, Artificial Sequence
  Synthetic oligonucleotide
ggccggttagtcgcgcccgtacggagggtggggtaa

SEQ ID NO: 11281 - DNA, 38 bp, Artificial Sequence
  Synthetic oligonucleotide
ggggacggtggggattttgggatctaatgatttattga

SEQ ID NO: 11282 - DNA, 36 bp, Artificial Sequence
  Synthetic oligonucleotide
gggtcgactaatttatcatggttggaaacgtgtcga

SEQ ID NO: 11283 - DNA, 38 bp, Artificial Sequence
  Synthetic oligonucleotide
ggtcggggccagtgagcgggacacgactgatttgatga

SEQ ID NO: 11284 - DNA, 35 bp, Artificial Sequence
  Synthetic oligonucleotide
ggtggtgaacagatcatgggaagggttcctatttg

SEQ ID NO: 11285 - DNA, 35 bp, Artificial Sequence
  Synthetic oligonucleotide
ggttctataagagccctatcgccactgtcgtttaa

SEQ ID NO: 11286 - DNA, 35 bp, Artificial Sequence
  Synthetic oligonucleotide
gtaagcatgttatgacttgcattgctagtttgtgc

SEQ ID NO: 11287 - DNA, 35 bp, Artificial Sequence
  Synthetic oligonucleotide
gtaagcctgcgtggtaaggagtgatttggttgcgc

SEQ ID NO: 11288 - DNA, 37 bp, Artificial Sequence
  Synthetic oligonucleotide
gtaggacgataagagcatagtcccgaataaggcccga

SEQ ID NO: 11289 - DNA, 35 bp, Artificial Sequence
  Synthetic oligonucleotide
gtcccagggtaccgccaaggaaacaccaaagtatc

SEQ ID NO: 11290 - DNA, 37 bp, Artificial Sequence
  Synthetic oligonucleotide
gtcccctcgtcgatagccgcacagcattgttttcgga

SEQ ID NO: 11291 - DNA, 38 bp, Artificial Sequence
  Synthetic oligonucleotide
gtcccttactcttgcacgggactacggatatctgctga

SEQ ID NO: 11292 - DNA, 37 bp, Artificial Sequence
  Synthetic oligonucleotide
gtccgcaaatatatcagtaggggttataggtgtacga

SEQ ID NO: 11293 - DNA, 35 bp, Artificial Sequence
  Synthetic oligonucleotide
gtgaaagaaagaagcgctgcaccaaggacggattg

SEQ ID NO: 11294 - DNA, 38 bp, Artificial Sequence
  Synthetic oligonucleotide
gtggagaaagttcacacccacgtacgaaggaaatgtga

SEQ ID NO: 11295 - DNA, 38 bp, Artificial Sequence
  Synthetic oligonucleotide
gttcaaacggagcaagttttggtacgaagaagtcttga

SEQ ID NO: 11296 - DNA, 37 bp, Artificial Sequence
  Synthetic oligonucleotide
taccgagtaacctaaccggtactgaagtgcgtaacga

SEQ ID NO: 11297 - DNA, 38 bp, Artificial Sequence
  Synthetic oligonucleotide
tacgagcgcaaaatgagtgcacatcatctatagtctga

SEQ ID NO: 11298 - DNA, 37 bp, Artificial Sequence
  Synthetic oligonucleotide
tactaaccgtgtcatctaactgaacaagacgggtgga

SEQ ID NO: 11299 - DNA, 35 bp, Artificial Sequence
  Synthetic oligonucleotide
tactattggcttgtgtccaatgttcctttcggacg

SEQ ID NO: 11300 - DNA, 36 bp, Artificial Sequence
  Synthetic oligonucleotide
tagtccgttgggcatatacatctggactacctgcga

SEQ ID NO: 11301 - DNA, 35 bp, Artificial Sequence
  Synthetic oligonucleotide
tcagcatgctcaattcaacgtcgtgcacgaactac

SEQ ID NO: 11302 - DNA, 37 bp, Artificial Sequence
  Synthetic oligonucleotide
tcatactggcagattgagagtgctgggggattggaga

SEQ ID NO: 11303 - DNA, 35 bp, Artificial Sequence
  Synthetic oligonucleotide
tcatgctacgaatgcatgggatagcgtgtaccatg

SEQ ID NO: 11304 - DNA, 37 bp, Artificial Sequence
  Synthetic oligonucleotide
tcgattcatagcttccgggggtcgggatattggatga

SEQ ID NO: 11305 - DNA, 37 bp, Artificial Sequence
  Synthetic oligonucleotide
tctaagactacaaagacgggtctccttcggagtctga

SEQ ID NO: 11306 - DNA, 38 bp, Artificial Sequence
  Synthetic oligonucleotide
tctgagttatgtaccaacagggccatataatgtcctga

SEQ ID NO: 11307 - DNA, 35 bp, Artificial Sequence
  Synthetic oligonucleotide
tgacgcatggcgcgaccactccaagtcacaacata

SEQ ID NO: 11308 - DNA, 37 bp, Artificial Sequence
  Synthetic oligonucleotide
tgatcgactaggattacgtcgtgagcgcgtgcttgga

SEQ ID NO: 11309 - DNA, 34 bp, Artificial Sequence
  Synthetic oligonucleotide
tggcaattgccaatattataggcgttcacgttta

SEQ ID NO: 11310 - DNA, 38 bp, Artificial Sequence
  Synthetic oligonucleotide
tggtgatcggatgtgaactaaaccttacaagggcttga

SEQ ID NO: 11311 - DNA, 36 bp, Artificial Sequence
  Synthetic oligonucleotide
tgtaaccttgcggtttgggccctaggagtcttagga

SEQ ID NO: 11312 - DNA, 35 bp, Artificial Sequence
  Synthetic oligonucleotide
ttactgagtcgttacgtatagcttgcactccggta

SEQ ID NO: 11313 - DNA, 35 bp, Artificial Sequence
  Synthetic oligonucleotide
ttggacgcgctgtactgggatctatggtctggtta

SEQ ID NO: 11314 - DNA, 38 bp, Artificial Sequence
  Synthetic oligonucleotide
tttacgcaggacggcatttgcccgggcctggccaatga

SEQ ID NO: 11315 - DNA, 35 bp, Artificial Sequence
  Synthetic oligonucleotide
tttggttaaagaaagtaatgaagtgcgaagaagat

SEQ ID NO: 11316 - DNA, 36 bp, Artificial Sequence
  Synthetic oligonucleotide
gtggaacgctagcgtattatcaacgtttattcgtta

SEQ ID NO: 11317 - DNA, 37 bp, Artificial Sequence
  Synthetic oligonucleotide
acacccgcggaatgctccacgctcaggcccctatcga

SEQ ID NO: 11318 - DNA, 38 bp, Artificial Sequence
  Synthetic oligonucleotide
acttgggtgcagtctaaagatcgcgaagaatgtagtga

SEQ ID NO: 11319 - DNA, 35 bp, Artificial Sequence
  Synthetic oligonucleotide
agagactggggatcgagagacttgtcctacacttg

SEQ ID NO: 11320 - DNA, 35 bp, Artificial Sequence
  Synthetic oligonucleotide
agagtgagtctccgtacgggctccctgaccgatac

SEQ ID NO: 11321 - DNA, 37 bp, Artificial Sequence
  Synthetic oligonucleotide
agctagtcttttgggaaaagggggtagaagacaggga

SEQ ID NO: 11322 - DNA, 36 bp, Artificial Sequence
  Synthetic oligonucleotide
agggaactggagggatttcgtctccgaccctgcgga

SEQ ID NO: 11323 - DNA, 36 bp, Artificial Sequence
  Synthetic oligonucleotide
agtgacggggagtgtacgtgcatcagtaaggaaaaa

SEQ ID NO: 11324 - DNA, 35 bp, Artificial Sequence
  Synthetic oligonucleotide
agttgtcacccggtgggggctacactgaacacgta

SEQ ID NO: 11325 - DNA, 37 bp, Artificial Sequence
  Synthetic oligonucleotide
atcactcggcactgtaagctacgcgagccacataaga

SEQ ID NO: 11326 - DNA, 37 bp, Artificial Sequence
  Synthetic oligonucleotide
caagccagttagagggcgggtaacatcggcttgacga

SEQ ID NO: 11327 - DNA, 36 bp, Artificial Sequence
  Synthetic oligonucleotide
cccgttcgagagtggctcacgtttggacgaggtcga

SEQ ID NO: 11328 - DNA, 38 bp, Artificial Sequence
  Synthetic oligonucleotide
ccgttctctagctttctgtcatgcctgacggctcatga

SEQ ID NO: 11329 - DNA, 36 bp, Artificial Sequence
  Synthetic oligonucleotide
gaacgggtctccacgtatgaccgcccggatcgtgga

SEQ ID NO: 11330 - DNA, 37 bp, Artificial Sequence
  Synthetic oligonucleotide
gacgtagtacgcagttgcaggcttctatttaagacga

SEQ ID NO: 11331 - DNA, 37 bp, Artificial Sequence
  Synthetic oligonucleotide
gacgtgcgaggtgcaagactagttctgaataagtcga

SEQ ID NO: 11332 - DNA, 38 bp, Artificial Sequence
  Synthetic oligonucleotide
gacgtgcgctagatcacgatgcagtatccttcccctga

SEQ ID NO: 11333 - DNA, 36 bp, Artificial Sequence
  Synthetic oligonucleotide
gagaggctaagaaagctcaggatacctcatctagga

SEQ ID NO: 11334 - DNA, 36 bp, Artificial Sequence
  Synthetic oligonucleotide
gagccaaaaatcatatgcctagcaagggccccgtaa

SEQ ID NO: 11335 - DNA, 37 bp, Artificial Sequence
  Synthetic oligonucleotide
gagggctcgccattacagccatgacttttttggttga

SEQ ID NO: 11336 - DNA, 37 bp, Artificial Sequence
  Synthetic oligonucleotide
gattggtggactgcaagatcgtgagcccttgcatcga

SEQ ID NO: 11337 - DNA, 38 bp, Artificial Sequence
  Synthetic oligonucleotide
gcaatatagggcgatttatcaccttacgcgcaagatga

SEQ ID NO: 11338 - DNA, 35 bp, Artificial Sequence
  Synthetic oligonucleotide
gctggatgctgtgagtgtgtaagtaatttcgcccc

SEQ ID NO: 11339 - DNA, 36 bp, Artificial Sequence
  Synthetic oligonucleotide
gctgttaatagcgtctttgggacgtacccgcaaaga

SEQ ID NO: 11340 - DNA, 37 bp, Artificial Sequence
  Synthetic oligonucleotide
ggaaacaaaggccgagatgattaaaaaccaggcgtga

SEQ ID NO: 11341 - DNA, 35 bp, Artificial Sequence
  Synthetic oligonucleotide
ggaatgctcttactctggaggccacgtaccgcgta

SEQ ID NO: 11342 - DNA, 38 bp, Artificial Sequence
  Synthetic oligonucleotide
ggtgtcgttacatatgagaggtccctggggttgattga

SEQ ID NO: 11343 - DNA, 36 bp, Artificial Sequence
  Synthetic oligonucleotide
gtaggggggtaatggctactgtttgagggccgacaa

SEQ ID NO: 11344 - DNA, 35 bp, Artificial Sequence
  Synthetic oligonucleotide
gtgtgcgtaggacgttcacccgaacgctgacatgc

SEQ ID NO: 11345 - DNA, 35 bp, Artificial Sequence
  Synthetic oligonucleotide
taacgacgcatagggtcaggtacgcactgctcgta

SEQ ID NO: 11346 - DNA, 35 bp, Artificial Sequence
  Synthetic oligonucleotide
taactgtactagattatcggtcgacggtttggtct

SEQ ID NO: 11347 - DNA, 35 bp, Artificial Sequence
  Synthetic oligonucleotide
taaggggggtggaattggtgtttcagtatcatagg

SEQ ID NO: 11348 - DNA, 35 bp, Artificial Sequence
  Synthetic oligonucleotide
tatgtcgtagtcatataaggtcaacgaagaatcgg

SEQ ID NO: 11349 - DNA, 38 bp, Artificial Sequence
  Synthetic oligonucleotide
tccctacgagtaggtgagaaggatatgcggtcaggtga

SEQ ID NO: 11350 - DNA, 37 bp, Artificial Sequence
  Synthetic oligonucleotide
tgagacggattacgaacgggaagggtaaagggtatga

SEQ ID NO: 11351 - DNA, 37 bp, Artificial Sequence
  Synthetic oligonucleotide
tgatagcaactggagacaagggctggaagtcaacaga

SEQ ID NO: 11352 - DNA, 35 bp, Artificial Sequence
  Synthetic oligonucleotide
tgtcctctatcagatagtttaaacgagtccattca

SEQ ID NO: 11353 - DNA, 35 bp, Artificial Sequence
  Synthetic oligonucleotide
tgtggatcgttaatcggtccgttgtctggctcccc

SEQ ID NO: 11354 - DNA, 35 bp, Artificial Sequence
  Synthetic oligonucleotide
ttagtgtgcatcggagtgtcatcggtactaacata

SEQ ID NO: 11355 - DNA, 36 bp, Artificial Sequence
  Synthetic oligonucleotide
aacgcgtacttgccgttagtagaatgaccatcacca

SEQ ID NO: 11356 - DNA, 36 bp, Artificial Sequence
  Synthetic oligonucleotide
tgcggttaaagagagaaatccccggtcgatcacgta

SEQ ID NO: 11357 - DNA, 38 bp, Artificial Sequence
  Synthetic oligonucleotide
aacaacagactgaagtaaacggctgtctcctaccctga

SEQ ID NO: 11358 - DNA, 35 bp, Artificial Sequence
  Synthetic oligonucleotide
aacgaccttttgcgtacgggtagatcgtacagtgg

SEQ ID NO: 11359 - DNA, 36 bp, Artificial Sequence
  Synthetic oligonucleotide
aatacgtaggcactactgcgcagcttgctctgcgca

SEQ ID NO: 11360 - DNA, 35 bp, Artificial Sequence
  Synthetic oligonucleotide
aatgctgtcaaggtgtcccgacggagcatgaacgg

SEQ ID NO: 11361 - DNA, 38 bp, Artificial Sequence
  Synthetic oligonucleotide
agacgcggaatacattctattgaccgcgaacgggttga

SEQ ID NO: 11362 - DNA, 38 bp, Artificial Sequence
  Synthetic oligonucleotide
agatcaaggtaatgggaagacggaagagaaatgcctga

SEQ ID NO: 11363 - DNA, 37 bp, Artificial Sequence
  Synthetic oligonucleotide
agattgggtcagtcgtgactaataggacttcctgtga

SEQ ID NO: 11364 - DNA, 37 bp, Artificial Sequence
  Synthetic oligonucleotide
atgtcaaggaggggcgggaggcgacattgcccggaga

SEQ ID NO: 11365 - DNA, 37 bp, Artificial Sequence
  Synthetic oligonucleotide
atgttgaagcagggataccggttggctaagcaaagga

SEQ ID NO: 11366 - DNA, 37 bp, Artificial Sequence
  Synthetic oligonucleotide
cactgtccggaagggaataataagcacaagcctcaga

SEQ ID NO: 11367 - DNA, 37 bp, Artificial Sequence
  Synthetic oligonucleotide
ccttgtttccctcgtgcggtcgtgcaatctagaggga

SEQ ID NO: 11368 - DNA, 35 bp, Artificial Sequence
  Synthetic oligonucleotide
gaattctagagcttaacgggcgtaggagaatcata

SEQ ID NO: 11369 - DNA, 37 bp, Artificial Sequence
  Synthetic oligonucleotide
gcagtgactcacgtctggatgaagcgggacgccaaga

SEQ ID NO: 11370 - DNA, 32 bp, Artificial Sequence
  Synthetic oligonucleotide
gccaacggtttggtttaaaccgggggcacata

SEQ ID NO: 11371 - DNA, 36 bp, Artificial Sequence
  Synthetic oligonucleotide
gggggcttttacagcgggagttcagccgttatgcta

SEQ ID NO: 11372 - DNA, 35 bp, Artificial Sequence
  Synthetic oligonucleotide
gggtaaacttgcatcgactccaacagcttgttgat

SEQ ID NO: 11373 - DNA, 36 bp, Artificial Sequence
  Synthetic oligonucleotide
ggtttgcagaacttcggtgagggtccaacaaccaca

SEQ ID NO: 11374 - DNA, 37 bp, Artificial Sequence
  Synthetic oligonucleotide
gtattgaacagtgagtcatagatactaggcgagacga

SEQ ID NO: 11375 - DNA, 36 bp, Artificial Sequence
  Synthetic oligonucleotide
gtgaaggcgatgcttaagtaactgccattcactcga

SEQ ID NO: 11376 - DNA, 37 bp, Artificial Sequence
  Synthetic oligonucleotide
taccgaaagcgacttccgggaattgtaacagcttcga

SEQ ID NO: 11377 - DNA, 35 bp, Artificial Sequence
  Synthetic oligonucleotide
tactaagcaatgaatgcggtaactgacatcgcttc

SEQ ID NO: 11378 - DNA, 38 bp, Artificial Sequence
  Synthetic oligonucleotide
tagcctaccttccccccgatcgcgtgtcaaggccatga

SEQ ID NO: 11379 - DNA, 36 bp, Artificial Sequence
  Synthetic oligonucleotide
tgccaagcaccgtgcatattgtcaagtggattctaa

SEQ ID NO: 11380 - DNA, 36 bp, Artificial Sequence
  Synthetic oligonucleotide
ttacccgtgtctatacgagatgtcgtaccgtggtga

SEQ ID NO: 11381 - DNA, 35 bp, Artificial Sequence
  Synthetic oligonucleotide
ttcaagcagtcgtagaatgaacgtaaccagtcgat

SEQ ID NO: 11382 - DNA, 37 bp, Artificial Sequence
  Synthetic oligonucleotide
ttcgcgggacagtacttccggtcatggatattcggga

SEQ ID NO: 11383 - DNA, 35 bp, Artificial Sequence
  Synthetic oligonucleotide
acactggcgagtagggtgggttttccagtaacgac

SEQ ID NO: 11384 - DNA, 36 bp, Artificial Sequence
  Synthetic oligonucleotide
tgttgaatacgtgcgttagaatgccccatgtactga

SEQ ID NO: 11385 - DNA, 35 bp, Artificial Sequence
  Synthetic oligonucleotide
agccaggtgcggtttgctgtcattgtaagctcccc

SEQ ID NO: 11386 - DNA, 38 bp, Artificial Sequence
  Synthetic oligonucleotide
gagtagaggaaatacgaccagttactgtgacggggtga

SEQ ID NO: 11387 - DNA, 37 bp, Artificial Sequence
  Synthetic oligonucleotide
gagttagttgactcgaagtgttgccactcgagtgcga

SEQ ID NO: 11388 - DNA, 35 bp, Artificial Sequence
  Synthetic oligonucleotide
gattcctttagacgtgacgtcattgttccgaagct

SEQ ID NO: 11389 - DNA, 35 bp, Artificial Sequence
  Synthetic oligonucleotide
tagtctgttggccgtcgcagtattgaggcattctc

SEQ ID NO: 11390 - DNA, 36 bp, Artificial Sequence
  Synthetic oligonucleotide
tatgggactcactctgcaattcgataacaggccaaa

SEQ ID NO: 11391 - DNA, 37 bp, Artificial Sequence
  Synthetic oligonucleotide
tcttggcacgcctgcggggttttcatgtcttttcaga

SEQ ID NO: 11392 - DNA, 36 bp, Artificial Sequence
  Synthetic oligonucleotide
agagtcggtcccgaaacggaaatcgggtggagtaga

SEQ ID NO: 11393 - DNA, 35 bp, Artificial Sequence
  Synthetic oligonucleotide
gagttacctgacgacaggtggactcgcggtgcatg

SEQ ID NO: 11394 - DNA, 37 bp, Artificial Sequence
  Synthetic oligonucleotide
tgtaagcacgtaccaggatttagtgttcatgctggga

SEQ ID NO: 11395 - DNA, 35 bp, Artificial Sequence
  Synthetic oligonucleotide
gtcgtcagaacaacgccaatgacactactgaccga

SEQ ID NO: 11396 - DNA, 36 bp, Artificial Sequence
  Synthetic oligonucleotide
tcatgaatcgtagtgttgtattcgtactggcacaaa

SEQ ID NO: 11397 - DNA, 37 bp, Artificial Sequence
  Synthetic oligonucleotide
tgtctctggggtgttttgtccgtgctccccaattgga

SEQ ID NO: 11398 - DNA, 37 bp, Artificial Sequence
  Synthetic oligonucleotide
acttcatcgcgggttggcacaggactgacatttgaga

SEQ ID NO: 11399 - DNA, 36 bp, Artificial Sequence
  Synthetic oligonucleotide
tatgcaccgagtcatacgagaatataggcgtgctga

SEQ ID NO: 11400 - DNA, 35 bp, Artificial Sequence
  Synthetic oligonucleotide
gcaaggtacattgaaagccaggagacttggctgag

SEQ ID NO: 11401 - DNA, 35 bp, Artificial Sequence
  Synthetic oligonucleotide
gtcccgttgagacacgtgaatgcgacttggcttgg

SEQ ID NO: 11402 - DNA, 38 bp, Artificial Sequence
  Synthetic oligonucleotide
gtccctgtgacatgttgttgtttatgtggcctctttga

SEQ ID NO: 11403 - DNA, 36 bp, Artificial Sequence
  Synthetic oligonucleotide
ttcgtagaccgtactggggagttgattgcgaagcca

SEQ ID NO: 11404 - DNA, 38 bp, Artificial Sequence
  Synthetic oligonucleotide
aaacaattggagtatgtactgctctatgatctacgtga

SEQ ID NO: 11405 - DNA, 36 bp, Artificial Sequence
  Synthetic oligonucleotide
aaatgtcagggtgacgcttcgttgctccgacggtta

SEQ ID NO: 11406 - DNA, 36 bp, Artificial Sequence
  Synthetic oligonucleotide
aacctggcataagaggaactatcagtatgagattca

SEQ ID NO: 11407 - DNA, 38 bp, Artificial Sequence
  Synthetic oligonucleotide
aacgagtgtgggttccccgaagcgtactagaatcatga

SEQ ID NO: 11408 - DNA, 37 bp, Artificial Sequence
  Synthetic oligonucleotide
aacgcatcgatggcggacgcaaattgcaacggttgga

SEQ ID NO: 11409 - DNA, 35 bp, Artificial Sequence
  Synthetic oligonucleotide
aagaagcgtgtcaccatgtgcagaacttccgtgaa

SEQ ID NO: 11410 - DNA, 37 bp, Artificial Sequence
  Synthetic oligonucleotide
aagccgacgcaagtcgagcatacaggtcctttcgcga

SEQ ID NO: 11411 - DNA, 35 bp, Artificial Sequence
  Synthetic oligonucleotide
aattagtacgcgtgcgggtttcctggcacatgtgg

SEQ ID NO: 11412 - DNA, 38 bp, Artificial Sequence
  Synthetic oligonucleotide
acataccgaggcaaaggggctacgacctgtaagtttga

SEQ ID NO: 11413 - DNA, 37 bp, Artificial Sequence
  Synthetic oligonucleotide
accacgggtagtatgcctatttggttactgaaacgga

SEQ ID NO: 11414 - DNA, 35 bp, Artificial Sequence
  Synthetic oligonucleotide
accattgctggcatactggttccagtcccgggtgt

SEQ ID NO: 11415 - DNA, 36 bp, Artificial Sequence
  Synthetic oligonucleotide
accgaggaggtgtggcggaagtatcggttcattgta

SEQ ID NO: 11416 - DNA, 36 bp, Artificial Sequence
  Synthetic oligonucleotide
acgagctagacctaagctgtaacgtctaaaatgcta

SEQ ID NO: 11417 - DNA, 36 bp, Artificial Sequence
  Synthetic oligonucleotide
acgtgtccgaacgacttaccaaaaggctgggtaaaa

SEQ ID NO: 11418 - DNA, 36 bp, Artificial Sequence
  Synthetic oligonucleotide
acgtgtgtcgggcaaaggcccccaagcgaaatgaac

SEQ ID NO: 11419 - DNA, 37 bp, Artificial Sequence
  Synthetic oligonucleotide
actaatgtacggctcctagtgatgctggtttagtaga

SEQ ID NO: 11420 - DNA, 37 bp, Artificial Sequence
  Synthetic oligonucleotide
actactacgaccagagcgagctggaatttagtttaga

SEQ ID NO: 11421 - DNA, 38 bp, Artificial Sequence
  Synthetic oligonucleotide
actgattatgaagggtacgcacaatgctaacactatga

SEQ ID NO: 11422 - DNA, 35 bp, Artificial Sequence
  Synthetic oligonucleotide
actggattaggtacggaccagttcatacggagcat

SEQ ID NO: 11423 - DNA, 37 bp, Artificial Sequence
  Synthetic oligonucleotide
actgtaggtggacgacgactaggcggaacgcacagga

SEQ ID NO: 11424 - DNA, 35 bp, Artificial Sequence
  Synthetic oligonucleotide
acttcttcgtcactgaacggatcacaacatgtgag

SEQ ID NO: 11425 - DNA, 36 bp, Artificial Sequence
  Synthetic oligonucleotide
agactggatgcgacattaaagtcggtcggtttggga

SEQ ID NO: 11426 - DNA, 38 bp, Artificial Sequence
  Synthetic oligonucleotide
agagcgagctactggtttatcgagactgaattgtatga

SEQ ID NO: 11427 - DNA, 37 bp, Artificial Sequence
  Synthetic oligonucleotide
agattgatgccaacatcttgagagtcatatcttaaga

SEQ ID NO: 11428 - DNA, 38 bp, Artificial Sequence
  Synthetic oligonucleotide
agccttgcgagcgtgtatacatgcgtttactaaagtga

SEQ ID NO: 11429 - DNA, 34 bp, Artificial Sequence
  Synthetic oligonucleotide
aggacgataaatggtatggctaaacggtagttag

SEQ ID NO: 11430 - DNA, 38 bp, Artificial Sequence
  Synthetic oligonucleotide
aggcgtactggggtggtaatcaggtgtgacttaactga

SEQ ID NO: 11431 - DNA, 37 bp, Artificial Sequence
  Synthetic oligonucleotide
aggcttggcgcaggttatagacaatcgtcatggcgga

SEQ ID NO: 11432 - DNA, 38 bp, Artificial Sequence
  Synthetic oligonucleotide
agggcaacaacgccctggggtgcggttcgtcatagtga

SEQ ID NO: 11433 - DNA, 37 bp, Artificial Sequence
  Synthetic oligonucleotide
agtacgtgcaggactatgtaattgcttaacctatgga

SEQ ID NO: 11434 - DNA, 37 bp, Artificial Sequence
  Synthetic oligonucleotide
agtcagtcaatcatggaactccctgtcgaatagatga

SEQ ID NO: 11435 - DNA, 35 bp, Artificial Sequence
  Synthetic oligonucleotide
agtcgcaccatgtgaactaacgggggggtcatggt

SEQ ID NO: 11436 - DNA, 37 bp, Artificial Sequence
  Synthetic oligonucleotide
agtgtgaatgcgtggaataacgggcaagcccgttcga

SEQ ID NO: 11437 - DNA, 37 bp, Artificial Sequence
  Synthetic oligonucleotide
ataacgactcaccgatctttgtaacatagtaggtaga

SEQ ID NO: 11438 - DNA, 37 bp, Artificial Sequence
  Synthetic oligonucleotide
atcatgctatgtactcttgggcgggatcttatgaaga

SEQ ID NO: 11439 - DNA, 35 bp, Artificial Sequence
  Synthetic oligonucleotide
atgaacaactgcagggatgcgagttcacacaccta

SEQ ID NO: 11440 - DNA, 36 bp, Artificial Sequence
  Synthetic oligonucleotide
atgacaacagatgacaattacggttgctggtcccta

SEQ ID NO: 11441 - DNA, 35 bp, Artificial Sequence
  Synthetic oligonucleotide
atgccagcgcaacatttgcgcgtgcgatactgtga

SEQ ID NO: 11442 - DNA, 36 bp, Artificial Sequence
  Synthetic oligonucleotide
atggttcgcggaagtgtcccatcccagtcccacgaa

SEQ ID NO: 11443 - DNA, 37 bp, Artificial Sequence
  Synthetic oligonucleotide
atgtccaaatggcgagggcacagacgtacgcactcga

SEQ ID NO: 11444 - DNA, 37 bp, Artificial Sequence
  Synthetic oligonucleotide
attcagctattcctttgttacaaggggaaagtttaga

SEQ ID NO: 11445 - DNA, 36 bp, Artificial Sequence
  Synthetic oligonucleotide
attgggtcgccgatagttggcctgctgcatacacga

SEQ ID NO: 11446 - DNA, 36 bp, Artificial Sequence
  Synthetic oligonucleotide
atttacaggccggcacgagccgtagccacttgtgca

SEQ ID NO: 11447 - DNA, 37 bp, Artificial Sequence
  Synthetic oligonucleotide
cacgcttcgtggcgtggaaatgttaagtttacctaga

SEQ ID NO: 11448 - DNA, 35 bp, Artificial Sequence
  Synthetic oligonucleotide
cacgtacattgttaagcctgagtgtacaactagtg

SEQ ID NO: 11449 - DNA, 35 bp, Artificial Sequence
  Synthetic oligonucleotide
cactaaaacagataaatagtccgccgggagccatc

SEQ ID NO: 11450 - DNA, 36 bp, Artificial Sequence
  Synthetic oligonucleotide
cactctcaacgaatctatcgttgcaaacttgacata

SEQ ID NO: 11451 - DNA, 37 bp, Artificial Sequence
  Synthetic oligonucleotide
catagtgacataacctagcggtttcggtcgttaccga

SEQ ID NO: 11452 - DNA, 35 bp, Artificial Sequence
  Synthetic oligonucleotide
cattggctcttgatccaaaggtgtacttggcatta

SEQ ID NO: 11453 - DNA, 36 bp, Artificial Sequence
  Synthetic oligonucleotide
ccaagttcagtggtcatgtcgttataggtggtcata

SEQ ID NO: 11454 - DNA, 37 bp, Artificial Sequence
  Synthetic oligonucleotide
ccagagaacagggactgtcctatttgaccgtggccga

SEQ ID NO: 11455 - DNA, 38 bp, Artificial Sequence
  Synthetic oligonucleotide
cccgaagcgaaatacggtaagtaccaagggagtcctga

SEQ ID NO: 11456 - DNA, 38 bp, Artificial Sequence
  Synthetic oligonucleotide
ctgacgacgatttgactaaacgagtcaccgttcggtga

SEQ ID NO: 11457 - DNA, 35 bp, Artificial Sequence
  Synthetic oligonucleotide
ctgatcgtaatgcatgctcgctttcagtgtcgaaa

SEQ ID NO: 11458 - DNA, 36 bp, Artificial Sequence
  Synthetic oligonucleotide
gaagacaagaagcctaagttgccgaaagaacctgga

SEQ ID NO: 11459 - DNA, 35 bp, Artificial Sequence
  Synthetic oligonucleotide
gaagatttcatttgagcgattacagggtaagcaga

SEQ ID NO: 11460 - DNA, 35 bp, Artificial Sequence
  Synthetic oligonucleotide
gacacataggcgtaggtctgcgatggatctggtga

SEQ ID NO: 11461 - DNA, 37 bp, Artificial Sequence
  Synthetic oligonucleotide
gacccccggagcactgtaactcgccaatctcccccga

SEQ ID NO: 11462 - DNA, 35 bp, Artificial Sequence
  Synthetic oligonucleotide
gaccggtgactgtgcctgtagggtttatttaggtc

SEQ ID NO: 11463 - DNA, 35 bp, Artificial Sequence
  Synthetic oligonucleotide
gacctcacgcgattatgggtatcgtgcttgcaatc

SEQ ID NO: 11464 - DNA, 38 bp, Artificial Sequence
  Synthetic oligonucleotide
gacctgtcgctggcccattaagatcgtcgcccaagtga

SEQ ID NO: 11465 - DNA, 36 bp, Artificial Sequence
  Synthetic oligonucleotide
gacgaccaccactttgacactagaatactatagtag

SEQ ID NO: 11466 - DNA, 37 bp, Artificial Sequence
  Synthetic oligonucleotide
gactatggatatgcaataccattttctggtacgctga

SEQ ID NO: 11467 - DNA, 38 bp, Artificial Sequence
  Synthetic oligonucleotide
gactgccgtagatcccagttttcaagtgtcatcactga

SEQ ID NO: 11468 - DNA, 36 bp, Artificial Sequence
  Synthetic oligonucleotide
gagcgcgtgcggtcctgacactgggatgggttgaga

SEQ ID NO: 11469 - DNA, 37 bp, Artificial Sequence
  Synthetic oligonucleotide
gagcggccgccgctaggacagtgtatatgacttttga

SEQ ID NO: 11470 - DNA, 36 bp, Artificial Sequence
  Synthetic oligonucleotide
gaggatcatgttctccgtaatgcccaggcactggaa

SEQ ID NO: 11471 - DNA, 37 bp, Artificial Sequence
  Synthetic oligonucleotide
gagtccacgaccgtcgccgactgagactcgggcctga

SEQ ID NO: 11472 - DNA, 38 bp, Artificial Sequence
  Synthetic oligonucleotide
gagtcccgatataagtggataatgccgaagatgtctga

SEQ ID NO: 11473 - DNA, 35 bp, Artificial Sequence
  Synthetic oligonucleotide
gataagccgtgttagatcacggtacaataggggtt

SEQ ID NO: 11474 - DNA, 37 bp, Artificial Sequence
  Synthetic oligonucleotide
gatcatcacacttgcgaatctctaactgaacttcgga

SEQ ID NO: 11475 - DNA, 37 bp, Artificial Sequence
  Synthetic oligonucleotide
gcaagttcgtttgttttaggtgctccccgtagaagga

SEQ ID NO: 11476 - DNA, 37 bp, Artificial Sequence
  Synthetic oligonucleotide
gcaataccgcgacttgcaccctggctgacgagccaga

SEQ ID NO: 11477 - DNA, 37 bp, Artificial Sequence
  Synthetic oligonucleotide
gcacgtactgcacatagaacataaccacacgtgttga

SEQ ID NO: 11478 - DNA, 38 bp, Artificial Sequence
  Synthetic oligonucleotide
gcaggggaggtgctgtctttcttggaaagtctgcatga

SEQ ID NO: 11479 - DNA, 38 bp, Artificial Sequence
  Synthetic oligonucleotide
gcataatgaatgtccggacagtgcacttttttgcttga

SEQ ID NO: 11480 - DNA, 36 bp, Artificial Sequence
  Synthetic oligonucleotide
gccacattaagggacggaccggtaggcttacgagaa

SEQ ID NO: 11481 - DNA, 37 bp, Artificial Sequence
  Synthetic oligonucleotide
gccagaattatgttacaattcagggtacggtgtgcga

SEQ ID NO: 11482 - DNA, 37 bp, Artificial Sequence
  Synthetic oligonucleotide
gcccagccaacaagcgccgtattcgctgtacacagga

SEQ ID NO: 11483 - DNA, 35 bp, Artificial Sequence
  Synthetic oligonucleotide
gccctcatgggtctaagaagcaatattgtaacgtt

SEQ ID NO: 11484 - DNA, 37 bp, Artificial Sequence
  Synthetic oligonucleotide
gcctcgccaattcatgtttccagattgtcagaggtga

SEQ ID NO: 11485 - DNA, 35 bp, Artificial Sequence
  Synthetic oligonucleotide
gcgatgaactctcgatcgtggcacataactgtgcg

SEQ ID NO: 11486 - DNA, 37 bp, Artificial Sequence
  Synthetic oligonucleotide
gcgtggctaaccttttagtcattcgagactagtgcga

SEQ ID NO: 11487 - DNA, 35 bp, Artificial Sequence
  Synthetic oligonucleotide
gcgtgggtaatgaaattaacctccggtcccatgcg

SEQ ID NO: 11488 - DNA, 36 bp, Artificial Sequence
  Synthetic oligonucleotide
gcgttaggggacaaccctgcgggcggggtgccgaga

SEQ ID NO: 11489 - DNA, 35 bp, Artificial Sequence
  Synthetic oligonucleotide
gctcctgaaagttcataaaactgggtaccttatta

SEQ ID NO: 11490 - DNA, 35 bp, Artificial Sequence
  Synthetic oligonucleotide
gctttagggagtcattgaacacagccgcaagggag

SEQ ID NO: 11491 - DNA, 37 bp, Artificial Sequence
  Synthetic oligonucleotide
ggaaaccctcgcctgacgcggggactttatacgctga

SEQ ID NO: 11492 - DNA, 35 bp, Artificial Sequence
  Synthetic oligonucleotide
ggaaatgtgcttcaagtaaccgctgaagccctgta

SEQ ID NO: 11493 - DNA, 35 bp, Artificial Sequence
  Synthetic oligonucleotide
ggacattggatcccgcgggaaatgtgggggactgg

SEQ ID NO: 11494 - DNA, 38 bp, Artificial Sequence
  Synthetic oligonucleotide
ggacccccccgcccagtcgttactcaggtctgccctga

SEQ ID NO: 11495 - DNA, 37 bp, Artificial Sequence
  Synthetic oligonucleotide
ggacgctcagcctttcactttgtgactgctgtcccga

SEQ ID NO: 11496 - DNA, 37 bp, Artificial Sequence
  Synthetic oligonucleotide
ggagatgccataaccgggggtcggctgagggaaatga

SEQ ID NO: 11497 - DNA, 36 bp, Artificial Sequence
  Synthetic oligonucleotide
ggataacaggcgataacatgcaggtgacatcaagga

SEQ ID NO: 11498 - DNA, 36 bp, Artificial Sequence
  Synthetic oligonucleotide
ggccctacgtaccgggttacaggtttgcgactccta

SEQ ID NO: 11499 - DNA, 36 bp, Artificial Sequence
  Synthetic oligonucleotide
ggcctgctggcttgctcatggggtcgtaatacggga

SEQ ID NO: 11500 - DNA, 38 bp, Artificial Sequence
  Synthetic oligonucleotide
ggcgggaccccacgtatagcggaaagtttgtagattga

SEQ ID NO: 11501 - DNA, 37 bp, Artificial Sequence
  Synthetic oligonucleotide
gggcatgcgcatttatgatatgcaagctaaccagtga

SEQ ID NO: 11502 - DNA, 37 bp, Artificial Sequence
  Synthetic oligonucleotide
gggcttacgttcaatttaacggctacgggactaggga

SEQ ID NO: 11503 - DNA, 37 bp, Artificial Sequence
  Synthetic oligonucleotide
ggtaagggaacccaacctgaccccctcgtcttggaga

SEQ ID NO: 11504 - DNA, 38 bp, Artificial Sequence
  Synthetic oligonucleotide
ggtagtaaactatgtgcacacgtatttgttatcaaaga

SEQ ID NO: 11505 - DNA, 35 bp, Artificial Sequence
  Synthetic oligonucleotide
ggtcatcctccggaaacgtacgaagaggtgaacag

SEQ ID NO: 11506 - DNA, 38 bp, Artificial Sequence
  Synthetic oligonucleotide
ggttcctgggacacgtagtcttactgggacgtgattga

SEQ ID NO: 11507 - DNA, 37 bp, Artificial Sequence
  Synthetic oligonucleotide
gtaagaatagcgggcaccgataggattttcggtttga

SEQ ID NO: 11508 - DNA, 36 bp, Artificial Sequence
  Synthetic oligonucleotide
gtaagtcaggcctatcaatcaaattaaaggttcaga

SEQ ID NO: 11509 - DNA, 36 bp, Artificial Sequence
  Synthetic oligonucleotide
gtagctgcagggcatggactatggcgactgaactca

SEQ ID NO: 11510 - DNA, 37 bp, Artificial Sequence
  Synthetic oligonucleotide
gtcacgtgtggacgggttggtattacctctgtacgga

SEQ ID NO: 11511 - DNA, 36 bp, Artificial Sequence
  Synthetic oligonucleotide
gtcagggcgggagccatgacatagggataaatcata

SEQ ID NO: 11512 - DNA, 38 bp, Artificial Sequence
  Synthetic oligonucleotide
gtcatgagtttttaggtacggcgatttggtccgcatga

SEQ ID NO: 11513 - DNA, 37 bp, Artificial Sequence
  Synthetic oligonucleotide
gtctgactgtacatgttcgggtaatggcattgcgtga

SEQ ID NO: 11514 - DNA, 36 bp, Artificial Sequence
  Synthetic oligonucleotide
gtgacaacctcccccttaggaactgtggacatcgta

SEQ ID NO: 11515 - DNA, 36 bp, Artificial Sequence
  Synthetic oligonucleotide
gtgcactgaagagtcgaggaaacgcgctatggtgta

SEQ ID NO: 11516 - DNA, 36 bp, Artificial Sequence
  Synthetic oligonucleotide
gtggacgctccaaccgtagttaggtgggtagtggta

SEQ ID NO: 11517 - DNA, 35 bp, Artificial Sequence
  Synthetic oligonucleotide
gtgtaaatcgttacgcggtctgagctgctctgttt

SEQ ID NO: 11518 - DNA, 37 bp, Artificial Sequence
  Synthetic oligonucleotide
gtgttgaaccgatcaagcttttaaatggcgggagaga

SEQ ID NO: 11519 - DNA, 35 bp, Artificial Sequence
  Synthetic oligonucleotide
taaaccggttgtggccccccacattcaaacgaccg

SEQ ID NO: 11520 - DNA, 35 bp, Artificial Sequence
  Synthetic oligonucleotide
taattcagtacgggcgtcatggataactctatggt

SEQ ID NO: 11521 - DNA, 38 bp, Artificial Sequence
  Synthetic oligonucleotide
taattgagaacagttactccgctgatccgtaagcctga

SEQ ID NO: 11522 - DNA, 38 bp, Artificial Sequence
  Synthetic oligonucleotide
tacagggttacgacaaatctgtgtgcggttcacgttga

SEQ ID NO: 11523 - DNA, 35 bp, Artificial Sequence
  Synthetic oligonucleotide
taccacccaggggagtgatcttcataactaacact

SEQ ID NO: 11524 - DNA, 37 bp, Artificial Sequence
  Synthetic oligonucleotide
tacgtaacgtggcgccgtgtttatgcaccacgagcga

SEQ ID NO: 11525 - DNA, 38 bp, Artificial Sequence
  Synthetic oligonucleotide
tacgtcaggtttgtcgggttgtgactggtccgctatga

SEQ ID NO: 11526 - DNA, 37 bp, Artificial Sequence
  Synthetic oligonucleotide
tactagcgcagttctatggcgcccggtcgaggtctga

SEQ ID NO: 11527 - DNA, 38 bp, Artificial Sequence
  Synthetic oligonucleotide
tagcccattggggttgaggcgcgcccttgcagtcttga

SEQ ID NO: 11528 - DNA, 38 bp, Artificial Sequence
  Synthetic oligonucleotide
tagtccgggcgcttccggggaattatgggctgttgtga

SEQ ID NO: 11529 - DNA, 35 bp, Artificial Sequence
  Synthetic oligonucleotide
tatgagcgtgggggatgggccgtccgggtccccca

SEQ ID NO: 11530 - DNA, 35 bp, Artificial Sequence
  Synthetic oligonucleotide
tattagcaggcctgggctacgctttgtttgcttcg

SEQ ID NO: 11531 - DNA, 36 bp, Artificial Sequence
  Synthetic oligonucleotide
tattgcgctttctggctgattacgtacttcggatta

SEQ ID NO: 11532 - DNA, 35 bp, Artificial Sequence
  Synthetic oligonucleotide
tattgggtctagtagaattgtcgcttagcacttag

SEQ ID NO: 11533 - DNA, 37 bp, Artificial Sequence
  Synthetic oligonucleotide
tcagtgacggggtgtcgcgatctccagagaaccgata

SEQ ID NO: 11534 - DNA, 35 bp, Artificial Sequence
  Synthetic oligonucleotide
tcatcctggagtctcgtgtatcgcagacttgaagg

SEQ ID NO: 11535 - DNA, 35 bp, Artificial Sequence
  Synthetic oligonucleotide
tcatttgacgttctaggaagtaagacttggactcc

SEQ ID NO: 11536 - DNA, 36 bp, Artificial Sequence
  Synthetic oligonucleotide
tccagactacctgtgtcataaaaccatggggtcaca

SEQ ID NO: 11537 - DNA, 36 bp, Artificial Sequence
  Synthetic oligonucleotide
tccaggaacaaggtgagggtaccgcatgtaagatta

SEQ ID NO: 11538 - DNA, 35 bp, Artificial Sequence
  Synthetic oligonucleotide
tccgacagaggagccaagattgcggtatacacttt

SEQ ID NO: 11539 - DNA, 36 bp, Artificial Sequence
  Synthetic oligonucleotide
tccttcacaggccatctggcatctggctctccttta

SEQ ID NO: 11540 - DNA, 37 bp, Artificial Sequence
  Synthetic oligonucleotide
tcgacgcacgggagctcggcctcagtatatggtagga

SEQ ID NO: 11541 - DNA, 36 bp, Artificial Sequence
  Synthetic oligonucleotide
tcgagacatatatagtttctacttggagtaagatta

SEQ ID NO: 11542 - DNA, 38 bp, Artificial Sequence
  Synthetic oligonucleotide
tcgatagctaggcccaggcgtagaatgaaaagcaatga

SEQ ID NO: 11543 - DNA, 37 bp, Artificial Sequence
  Synthetic oligonucleotide
tcgcactattgaaaaagatgaagctaggagcgaggga

SEQ ID NO: 11544 - DNA, 37 bp, Artificial Sequence
  Synthetic oligonucleotide
tctcgttagcgtgcgtatagcatggcaacgaaatcga

SEQ ID NO: 11545 - DNA, 38 bp, Artificial Sequence
  Synthetic oligonucleotide
tctgcgatggactgcgggggaattgtctggtacggtga

SEQ ID NO: 11546 - DNA, 36 bp, Artificial Sequence
  Synthetic oligonucleotide
tgaagcacgttggatttggggtacctaggtggagaa

SEQ ID NO: 11547 - DNA, 38 bp, Artificial Sequence
  Synthetic oligonucleotide
tgataagtccgtacaggtgacatatttgacgctaatga

SEQ ID NO: 11548 - DNA, 36 bp, Artificial Sequence
  Synthetic oligonucleotide
tgccctcaccactagttagtctcagggtgcggatta

SEQ ID NO: 11549 - DNA, 38 bp, Artificial Sequence
  Synthetic oligonucleotide
tgctcgacgtacacgttgtggcgaattcaggacgctga

SEQ ID NO: 11550 - DNA, 35 bp, Artificial Sequence
  Synthetic oligonucleotide
tggtaggcatataaggctctactgtttacgataag

SEQ ID NO: 11551 - DNA, 36 bp, Artificial Sequence
  Synthetic oligonucleotide
tgtagcaactaggacttaccatgtcataacgtgata

SEQ ID NO: 11552 - DNA, 35 bp, Artificial Sequence
  Synthetic oligonucleotide
ttatccaggcggtgcggtggtagttgtaaaaaata

SEQ ID NO: 11553 - DNA, 38 bp, Artificial Sequence
  Synthetic oligonucleotide
ttattcgtgcattgtgcagtcatcgacttgcctcctga

SEQ ID NO: 11554 - DNA, 36 bp, Artificial Sequence
  Synthetic oligonucleotide
ttgcatacctgcggaggaataggaggtttatgctta

SEQ ID NO: 11555 - DNA, 35 bp, Artificial Sequence
  Synthetic oligonucleotide
ttgcgagcagtcctattatgcaatccatcaccatg

SEQ ID NO: 11556 - DNA, 35 bp, Artificial Sequence
  Synthetic oligonucleotide
tttgtaccgaggcgccctatgggatgtgctgataa

SEQ ID NO: 11557 - DNA, 36 bp, Artificial Sequence
  Synthetic oligonucleotide
ttttggtacagggcgtgcacaagcaaaactccgtta

SEQ ID NO: 11558 - DNA, 37 bp, Artificial Sequence
  Synthetic oligonucleotide
tacagtgaagcacagccgccatgaattcgacttagga

SEQ ID NO: 11559 - DNA, 36 bp, Artificial Sequence
  Synthetic oligonucleotide
ggactgcgaggcggacaccagctttgtcacggttga

SEQ ID NO: 11560 - DNA, 35 bp, Artificial Sequence
  Synthetic oligonucleotide
gaaacctggttccagccaggcgctctggaccctcc

SEQ ID NO: 11561 - DNA, 37 bp, Artificial Sequence
  Synthetic oligonucleotide
aaccagaaaggtgatatgtaacggctacctgtaagga

SEQ ID NO: 11562 - DNA, 35 bp, Artificial Sequence
  Synthetic oligonucleotide
cctatagtccagggtgggacgggggctaggtagta

SEQ ID NO: 11563 - DNA, 35 bp, Artificial Sequence
  Synthetic oligonucleotide
gatgggcctcgtgcgcgcggagacccgagtttgta

SEQ ID NO: 11564 - DNA, 36 bp, Artificial Sequence
  Synthetic oligonucleotide
agtcaacaccatacgtcatggggcataggtcaaata

SEQ ID NO: 11565 - DNA, 35 bp, Artificial Sequence
  Synthetic oligonucleotide
gaaaagtgacagttagcggtgatggaacgcaagtc

SEQ ID NO: 11566 - DNA, 37 bp, Artificial Sequence
  Synthetic oligonucleotide
gctggtaactgcgagcagtcctgattgatctggtcga

SEQ ID NO: 11567 - DNA, 38 bp, Artificial Sequence
  Synthetic oligonucleotide
gttgggatagggagtgcagagcaggaatcctaatatga

SEQ ID NO: 11568 - DNA, 37 bp, Artificial Sequence
  Synthetic oligonucleotide
ttgacccctttcaggacttgtttttaagagttagcga

SEQ ID NO: 11569 - DNA, 35 bp, Artificial Sequence
  Synthetic oligonucleotide
acgccttgggtaatgctcaaagcgtcacataccgg

SEQ ID NO: 11570 - DNA, 36 bp, Artificial Sequence
  Synthetic oligonucleotide
agcgccgttgttaaaagacagatttggtatagagta

SEQ ID NO: 11571 - DNA, 37 bp, Artificial Sequence
  Synthetic oligonucleotide
aaatgttgctaggattatccatgcgcttacatactga

SEQ ID NO: 11572 - DNA, 37 bp, Artificial Sequence
  Synthetic oligonucleotide
acacaaagagcatttcggagggacgtggtctttggga

SEQ ID NO: 11573 - DNA, 38 bp, Artificial Sequence
  Synthetic oligonucleotide
caagtactaactcgttagcaagctgacggggctgctga

SEQ ID NO: 11574 - DNA, 36 bp, Artificial Sequence
  Synthetic oligonucleotide
gcacgggaagagtcttgtctagacttttcaggcgga

SEQ ID NO: 11575 - DNA, 37 bp, Artificial Sequence
  Synthetic oligonucleotide
gcgactcaacgttatgcatcaggattatgtggaccga

SEQ ID NO: 11576 - DNA, 35 bp, Artificial Sequence
  Synthetic oligonucleotide
ggccgtaaattcagcgtgacaaggaatagggtgta

SEQ ID NO: 11577 - DNA, 37 bp, Artificial Sequence
  Synthetic oligonucleotide
gtacaactacaggatagtgttaggtcaaattgaccga

SEQ ID NO: 11578 - DNA, 36 bp, Artificial Sequence
  Synthetic oligonucleotide
tgactgcgaagttcgcattaaagttactttatgtca

SEQ ID NO: 11579 - DNA, 35 bp, Artificial Sequence
  Synthetic oligonucleotide
tttcagcaggctaagtggttgttcggggtacgttt

SEQ ID NO: 11580 - DNA, 38 bp, Artificial Sequence
  Synthetic oligonucleotide
tttccgaggcggtagggaactgagcaatcacccaatga

SEQ ID NO: 11581 - DNA, 35 bp, Artificial Sequence
  Synthetic oligonucleotide
tttggacgtggttaaagatatagagtcgatccgcg

SEQ ID NO: 11582 - DNA, 35 bp, Artificial Sequence
  Synthetic oligonucleotide
tttgtagagaaggttcagacctatcatggacgtgc

SEQ ID NO: 11583 - DNA, 38 bp, Artificial Sequence
  Synthetic oligonucleotide
gatagtgaccgtcggtcttgcagaagcattttaaatga

SEQ ID NO: 11584 - DNA, 38 bp, Artificial Sequence
  Synthetic oligonucleotide
aaccctaacactaggtacgagaggcaagtaggctgtga

SEQ ID NO: 11585 - DNA, 37 bp, Artificial Sequence
  Synthetic oligonucleotide
aacgtcatggtgtcaagggcactttcgttctctggga

SEQ ID NO: 11586 - DNA, 38 bp, Artificial Sequence
  Synthetic oligonucleotide
accggttaacgcaagttagtgtcccccactgccaatga

SEQ ID NO: 11587 - DNA, 35 bp, Artificial Sequence
  Synthetic oligonucleotide
acgaaaatccgcaaatctacgttcgtaaaggtcga

SEQ ID NO: 11588 - DNA, 35 bp, Artificial Sequence
  Synthetic oligonucleotide
acgtgcatttctcattggctatatgtccttggggt

SEQ ID NO: 11589 - DNA, 37 bp, Artificial Sequence
  Synthetic oligonucleotide
actctgaggaacagtcactggtatgtccgattggcga

SEQ ID NO: 11590 - DNA, 36 bp, Artificial Sequence
  Synthetic oligonucleotide
acttggccacgggatcgacatatcatctacaactga

SEQ ID NO: 11591 - DNA, 35 bp, Artificial Sequence
  Synthetic oligonucleotide
agctaaaacactaccatcgggctgtatgcacctcc

SEQ ID NO: 11592 - DNA, 38 bp, Artificial Sequence
  Synthetic oligonucleotide
atacctatcgtcaagaccggaatttgtgacgaggctga

SEQ ID NO: 11593 - DNA, 37 bp, Artificial Sequence
  Synthetic oligonucleotide
atatacttccgcgggtgaagccgttgagcttgcggga

SEQ ID NO: 11594 - DNA, 38 bp, Artificial Sequence
  Synthetic oligonucleotide
catgatctatgtcgccttggcgacgaaatttgctgtga

SEQ ID NO: 11595 - DNA, 36 bp, Artificial Sequence
  Synthetic oligonucleotide
gaacacctgtcggtcgatggtagggatttagatcca

SEQ ID NO: 11596 - DNA, 36 bp, Artificial Sequence
  Synthetic oligonucleotide
gacactgccggggaaggctttgtcattgtatattaa

SEQ ID NO: 11597 - DNA, 38 bp, Artificial Sequence
  Synthetic oligonucleotide
gacttgcctgaaatgagcaagaactactggccacatga

SEQ ID NO: 11598 - DNA, 36 bp, Artificial Sequence
  Synthetic oligonucleotide
gatcagaattacgttttcgtaagtggtcatgtgcta

SEQ ID NO: 11599 - DNA, 34 bp, Artificial Sequence
  Synthetic oligonucleotide
gctgtcatgcatagtggagatacgggtacgtgac

SEQ ID NO: 11600 - DNA, 35 bp, Artificial Sequence
  Synthetic oligonucleotide
gcttgagcacagtcacaattacgagctcggggtct

SEQ ID NO: 11601 - DNA, 35 bp, Artificial Sequence
  Synthetic oligonucleotide
ggaaccgccatcaagatggctaaggttagtccgga

SEQ ID NO: 11602 - DNA, 37 bp, Artificial Sequence
  Synthetic oligonucleotide
ggcccagcctggaacgcggttaaggctatggaatgga

SEQ ID NO: 11603 - DNA, 35 bp, Artificial Sequence
  Synthetic oligonucleotide
ggtctgaccagaggccgaaaccccggaaactcggc

SEQ ID NO: 11604 - DNA, 37 bp, Artificial Sequence
  Synthetic oligonucleotide
ggttctatatcaaggctcatgttggggactcccagga

SEQ ID NO: 11605 - DNA, 37 bp, Artificial Sequence
  Synthetic oligonucleotide
gtaccgatatgaggggtgcatgattcgtgtaccggga

SEQ ID NO: 11606 - DNA, 35 bp, Artificial Sequence
  Synthetic oligonucleotide
gtactggaaggacttcagtctcgatcctgaagagg

SEQ ID NO: 11607 - DNA, 35 bp, Artificial Sequence
  Synthetic oligonucleotide
gtggctcaataccgctagtaaaacacatggaacgt

SEQ ID NO: 11608 - DNA, 36 bp, Artificial Sequence
  Synthetic oligonucleotide
taggactttgtcctcagtatccgcgctctatgtgga

SEQ ID NO: 11609 - DNA, 35 bp, Artificial Sequence
  Synthetic oligonucleotide
tcacattgcacttggtaatatgaggcgtaataaag

SEQ ID NO: 11610 - DNA, 37 bp, Artificial Sequence
  Synthetic oligonucleotide
tcgcttgcacttcatacacttttagacggggcattga

SEQ ID NO: 11611 - DNA, 36 bp, Artificial Sequence
  Synthetic oligonucleotide
tcgttaacagcgatgctagactcgctcccaacgtaa

SEQ ID NO: 11612 - DNA, 37 bp, Artificial Sequence
  Synthetic oligonucleotide
tctgactctgcgcagtagtgctcatggaaacccttga

SEQ ID NO: 11613 - DNA, 38 bp, Artificial Sequence
  Synthetic oligonucleotide
tgacacctggtatccaggtgatatttgtagcaatctga

SEQ ID NO: 11614 - DNA, 37 bp, Artificial Sequence
  Synthetic oligonucleotide
tgcgctgcactcataattaggagtcagctccatcgga

SEQ ID NO: 11615 - DNA, 36 bp, Artificial Sequence
  Synthetic oligonucleotide
tggatcactgttcgtgctggacgcgggaataagtaa

SEQ ID NO: 11616 - DNA, 36 bp, Artificial Sequence
  Synthetic oligonucleotide
ttcgcagtaattatcacggcatcgcgctagagcaca

SEQ ID NO: 11617 - DNA, 38 bp, Artificial Sequence
  Synthetic oligonucleotide
aaaacaggatactttgcccttgtaatggtcaggattga

SEQ ID NO: 11618 - DNA, 37 bp, Artificial Sequence
  Synthetic oligonucleotide
aaactgcacactaagcaaatccgcatgtaggtatcga

SEQ ID NO: 11619 - DNA, 36 bp, Artificial Sequence
  Synthetic oligonucleotide
aacacagtaccgtagtccggtggacgtacgtgcata

SEQ ID NO: 11620 - DNA, 36 bp, Artificial Sequence
  Synthetic oligonucleotide
aacagctagcatcgtacgttgctgagcggactgata

SEQ ID NO: 11621 - DNA, 38 bp, Artificial Sequence
  Synthetic oligonucleotide
aacgacgaggaatgccttcgtcgcgtaaagaagaatga

SEQ ID NO: 11622 - DNA, 36 bp, Artificial Sequence
  Synthetic oligonucleotide
acatgattacgaccgaaatcccgggctcgcaggaaa

SEQ ID NO: 11623 - DNA, 35 bp, Artificial Sequence
  Synthetic oligonucleotide
accggcattcccatcatagcgggcattactcgaca

SEQ ID NO: 11624 - DNA, 36 bp, Artificial Sequence
  Synthetic oligonucleotide
actttcgaactgtgctttcgtttagtgcttgcccca

SEQ ID NO: 11625 - DNA, 35 bp, Artificial Sequence
  Synthetic oligonucleotide
agactagctctgggcagtaagtgccatgcccgtta

SEQ ID NO: 11626 - DNA, 37 bp, Artificial Sequence
  Synthetic oligonucleotide
agagggccgaaacggctgatcctcgggtccagtggga

SEQ ID NO: 11627 - DNA, 37 bp, Artificial Sequence
  Synthetic oligonucleotide
aggaaaccgggggagttggagcagtaaatcggccaga

SEQ ID NO: 11628 - DNA, 35 bp, Artificial Sequence
  Synthetic oligonucleotide
catgcgggcgggcatacccggcttaaaagtcccac

SEQ ID NO: 11629 - DNA, 36 bp, Artificial Sequence
  Synthetic oligonucleotide
ccaaagcaggacgtgcaatggttggatctaggagaa

SEQ ID NO: 11630 - DNA, 38 bp, Artificial Sequence
  Synthetic oligonucleotide
cctctactatcgcgatcagagcttttgcaggctactga

SEQ ID NO: 11631 - DNA, 38 bp, Artificial Sequence
  Synthetic oligonucleotide
cgaaaagcggtgacgctagtaatgccgacgtaacttga

SEQ ID NO: 11632 - DNA, 38 bp, Artificial Sequence
  Synthetic oligonucleotide
cgcgcaaggctcccttggtcaccgcgagacaggactga

SEQ ID NO: 11633 - DNA, 36 bp, Artificial Sequence
  Synthetic oligonucleotide
ctaaacgtgtacgtgtcatcatgggagctcttgcga

SEQ ID NO: 11634 - DNA, 36 bp, Artificial Sequence
  Synthetic oligonucleotide
ctcgccaaactgctagacctcggttggactcaacga

SEQ ID NO: 11635 - DNA, 36 bp, Artificial Sequence
  Synthetic oligonucleotide
ctttgaatggcgctgatgggatctatgtggacatga

SEQ ID NO: 11636 - DNA, 38 bp, Artificial Sequence
  Synthetic oligonucleotide
gaacctgtcaagttgatgggcttgaccacaactattga

SEQ ID NO: 11637 - DNA, 38 bp, Artificial Sequence
  Synthetic oligonucleotide
gacaaaggcgcagcaatgtccgggcgttctgctgatga

SEQ ID NO: 11638 - DNA, 35 bp, Artificial Sequence
  Synthetic oligonucleotide
gacaagatggtcaacatattgtgtgaatcctaagg

SEQ ID NO: 11639 - DNA, 38 bp, Artificial Sequence
  Synthetic oligonucleotide
gacattagtcggccacatgttagatcggtaccgaatga

SEQ ID NO: 11640 - DNA, 35 bp, Artificial Sequence
  Synthetic oligonucleotide
gaccacgcgttttgttaccggattaactcagtact

SEQ ID NO: 11641 - DNA, 35 bp, Artificial Sequence
  Synthetic oligonucleotide
gagaacgtgcggcgacgactgcttgattagctcct

SEQ ID NO: 11642 - DNA, 37 bp, Artificial Sequence
  Synthetic oligonucleotide
gagtggatcctcatctgtcggttagcccacggtttga

SEQ ID NO: 11643 - DNA, 36 bp, Artificial Sequence
  Synthetic oligonucleotide
gagttctggcatctatctaagagttcgcttggggta

SEQ ID NO: 11644 - DNA, 38 bp, Artificial Sequence
  Synthetic oligonucleotide
gcacaacaagctcgtaggctcgtgtaactcgcgactga

SEQ ID NO: 11645 - DNA, 38 bp, Artificial Sequence
  Synthetic oligonucleotide
gcactgggtacgagtgatagatacgaagacataaatga

SEQ ID NO: 11646 - DNA, 38 bp, Artificial Sequence
  Synthetic oligonucleotide
gcagtattatgttcaggttttgctaaaactggacatga

SEQ ID NO: 11647 - DNA, 37 bp, Artificial Sequence
  Synthetic oligonucleotide
gccgctcctcagcatatgggatctagctcgtgattga

SEQ ID NO: 11648 - DNA, 37 bp, Artificial Sequence
  Synthetic oligonucleotide
gctccgctccaccagtaaatattacacatgaagggga

SEQ ID NO: 11649 - DNA, 37 bp, Artificial Sequence
  Synthetic oligonucleotide
ggcgaacgcttataaacatcggctcttaccaaccgga

SEQ ID NO: 11650 - DNA, 36 bp, Artificial Sequence
  Synthetic oligonucleotide
ggcttgacgactaagtaaagaaagttctcccgggaa

SEQ ID NO: 11651 - DNA, 35 bp, Artificial Sequence
  Synthetic oligonucleotide
gggttagtatgtttagttgagaaccagtgtagggc

SEQ ID NO: 11652 - DNA, 36 bp, Artificial Sequence
  Synthetic oligonucleotide
gtacgcaatgggaataggggctgttagaacttgtta

SEQ ID NO: 11653 - DNA, 38 bp, Artificial Sequence
  Synthetic oligonucleotide
gtatcgaaggagtgcgttgaaatggacggggataatga

SEQ ID NO: 11654 - DNA, 35 bp, Artificial Sequence
  Synthetic oligonucleotide
gtatgatttcggcaagctgaggtaaaccatgtttg

SEQ ID NO: 11655 - DNA, 35 bp, Artificial Sequence
  Synthetic oligonucleotide
gtattgactgcattacatgtcattagacgcccggt

SEQ ID NO: 11656 - DNA, 35 bp, Artificial Sequence
  Synthetic oligonucleotide
gtgcataaatgtggatccggcaaaccgccccctgg

SEQ ID NO: 11657 - DNA, 35 bp, Artificial Sequence
  Synthetic oligonucleotide
gtgctgccgactgcgatttgtggtctcggttgtat

SEQ ID NO: 11658 - DNA, 35 bp, Artificial Sequence
  Synthetic oligonucleotide
gtgtcctacttaagtgtatctagggcacccccata

SEQ ID NO: 11659 - DNA, 37 bp, Artificial Sequence
  Synthetic oligonucleotide
gtgtgtaggtgtaggggtaaacattggtaccctacga

SEQ ID NO: 11660 - DNA, 38 bp, Artificial Sequence
  Synthetic oligonucleotide
taagcatatccaattaccgcaaacgttcttaagcctga

SEQ ID NO: 11661 - DNA, 38 bp, Artificial Sequence
  Synthetic oligonucleotide
taagcttgctagcaacgctatcggtgttgtatacttga

SEQ ID NO: 11662 - DNA, 35 bp, Artificial Sequence
  Synthetic oligonucleotide
tagaacccgtaaccacggattagcacacccaggcg

SEQ ID NO: 11663 - DNA, 36 bp, Artificial Sequence
  Synthetic oligonucleotide
tatccaattcagtaaagggcggagggaagttctgga

SEQ ID NO: 11664 - DNA, 36 bp, Artificial Sequence
  Synthetic oligonucleotide
tatcgtaatgaacgtctgcgatcctcaacaatgcta

SEQ ID NO: 11665 - DNA, 38 bp, Artificial Sequence
  Synthetic oligonucleotide
tcatggcgtagaagccgtgcctcttacatgtcatttga

SEQ ID NO: 11666 - DNA, 35 bp, Artificial Sequence
  Synthetic oligonucleotide
tcattctcaaggcgcctgattgatggtggctcaca

SEQ ID NO: 11667 - DNA, 35 bp, Artificial Sequence
  Synthetic oligonucleotide
tctacatccgtgaggtaagtactcaggggaacctg

SEQ ID NO: 11668 - DNA, 38 bp, Artificial Sequence
  Synthetic oligonucleotide
tctaggtacagtcaaactacgttcatagtcaggtctga

SEQ ID NO: 11669 - DNA, 35 bp, Artificial Sequence
  Synthetic oligonucleotide
tggtgtcggaacgtactgaacagcgtgtgtatatc

SEQ ID NO: 11670 - DNA, 35 bp, Artificial Sequence
  Synthetic oligonucleotide
gtacgagtcaaacggtcacggcgatccacaatacg

SEQ ID NO: 11671 - DNA, 35 bp, Artificial Sequence
  Synthetic oligonucleotide
taccacacgaggcaagctacaccgcgttaactgat

SEQ ID NO: 11672 - DNA, 35 bp, Artificial Sequence
  Synthetic oligonucleotide
actcggggagtaggcaatcatgtggtggcattcta

SEQ ID NO: 11673 - DNA, 38 bp, Artificial Sequence
  Synthetic oligonucleotide
gcaagtactttggtcctcattgtcaggctttcgcctga

SEQ ID NO: 11674 - DNA, 36 bp, Artificial Sequence
  Synthetic oligonucleotide
ccgaagctgtagtgttactatagcagaaggtacgga

SEQ ID NO: 11675 - DNA, 35 bp, Artificial Sequence
  Synthetic oligonucleotide
gtcactgggttgggttgcgaccttattatcttgaa

SEQ ID NO: 11676 - DNA, 38 bp, Artificial Sequence
  Synthetic oligonucleotide
gacgtactgatgcgtgttccaaaggtcaggtgaggtga

SEQ ID NO: 11677 - DNA, 35 bp, Artificial Sequence
  Synthetic oligonucleotide
tgaggtagtgcggtaatggcaatgtgcatagacat

SEQ ID NO: 11678 - DNA, 36 bp, Artificial Sequence
  Synthetic oligonucleotide
tttagccggcgctcgtgcgatcgaggcggtaaggta

SEQ ID NO: 11679 - DNA, 37 bp, Artificial Sequence
  Synthetic oligonucleotide
aacgatctcccgagtcatgaagcacggcatggtaaga

SEQ ID NO: 11680 - DNA, 37 bp, Artificial Sequence
  Synthetic oligonucleotide
aacgtcagtgtgactacgttccacacattctaaatga

SEQ ID NO: 11681 - DNA, 35 bp, Artificial Sequence
  Synthetic oligonucleotide
atctttgagagattgttcataaggaacgctgtgtc

SEQ ID NO: 11682 - DNA, 37 bp, Artificial Sequence
  Synthetic oligonucleotide
attacttggaccgagatgggtagttcggaacaggcga

SEQ ID NO: 11683 - DNA, 35 bp, Artificial Sequence
  Synthetic oligonucleotide
gatccgggggtctacagcagcttagtgccccccac

SEQ ID NO: 11684 - DNA, 35 bp, Artificial Sequence
  Synthetic oligonucleotide
gctcgatgtatcatggacatccggccacccctttc

SEQ ID NO: 11685 - DNA, 35 bp, Artificial Sequence
  Synthetic oligonucleotide
ggaaccctcgcactgcgacaggcttcaactggaag

SEQ ID NO: 11686 - DNA, 36 bp, Artificial Sequence
  Synthetic oligonucleotide
gtggacactgcatgaggacgcttgatgtagtatgga

SEQ ID NO: 11687 - DNA, 35 bp, Artificial Sequence
  Synthetic oligonucleotide
tattcaacttgcggtccaatacggtgttggagcta

SEQ ID NO: 11688 - DNA, 37 bp, Artificial Sequence
  Synthetic oligonucleotide
tcatgaacgattattctggcgagaatgcggactatga

SEQ ID NO: 11689 - DNA, 38 bp, Artificial Sequence
  Synthetic oligonucleotide
tctgggatcccccttaagaggggtttgaacaacactga

SEQ ID NO: 11690 - DNA, 37 bp, Artificial Sequence
  Synthetic oligonucleotide
ttaacaacacgttctgagcgtaacgttgtaaagctga

SEQ ID NO: 11691 - DNA, 38 bp, Artificial Sequence
  Synthetic oligonucleotide
ttctacggggtcacagtccgatcagagcggtcaactga

SEQ ID NO: 11692 - DNA, 36 bp, Artificial Sequence
  Synthetic oligonucleotide
gagactcccccggcgaaccacagtcatatggagcca

SEQ ID NO: 11693 - DNA, 37 bp, Artificial Sequence
  Synthetic oligonucleotide
gactccccctccacggcactgcattgtgcatttttga

SEQ ID NO: 11694 - DNA, 35 bp, Artificial Sequence
  Synthetic oligonucleotide
atagacccgcgctgtcacgagccatagcctgttta

SEQ ID NO: 11695 - DNA, 38 bp, Artificial Sequence
  Synthetic oligonucleotide
tgacggtcctttgataacacacgttcgggcgacggtga

SEQ ID NO: 11696 - DNA, 35 bp, Artificial Sequence
  Synthetic oligonucleotide
ccatgaacagtcactacgttcggggaccggtcgtg

SEQ ID NO: 11697 - DNA, 35 bp, Artificial Sequence
  Synthetic oligonucleotide
cttgcatctccgttgacgatcgtagaaggatttct

SEQ ID NO: 11698 - DNA, 37 bp, Artificial Sequence
  Synthetic oligonucleotide
gaccgtttgcacgacataaaagccccagctgggccga

SEQ ID NO: 11699 - DNA, 36 bp, Artificial Sequence
  Synthetic oligonucleotide
gagtgcgggcctcagtactcattcggaaaccagtga

SEQ ID NO: 11700 - DNA, 36 bp, Artificial Sequence
  Synthetic oligonucleotide
gtaaacaggccgagaatgtttgcattcgtggctcta

SEQ ID NO: 11701 - DNA, 35 bp, Artificial Sequence
  Synthetic oligonucleotide
gtcagtatggactgtcacatttgatacgaactggt

SEQ ID NO: 11702 - DNA, 36 bp, Artificial Sequence
  Synthetic oligonucleotide
gtcttcgggacgatatctaaacaacgaacggtgtca

SEQ ID NO: 11703 - DNA, 38 bp, Artificial Sequence
  Synthetic oligonucleotide
gtggtactgcccggatggtgataaactatgtcgtctga

SEQ ID NO: 11704 - DNA, 36 bp, Artificial Sequence
  Synthetic oligonucleotide
taatccggtggaagcagggcagtgctggcggaagca

SEQ ID NO: 11705 - DNA, 36 bp, Artificial Sequence
  Synthetic oligonucleotide
tgtgggtaatttactctaccgtcttggttcacctga

SEQ ID NO: 11706 - DNA, 35 bp, Artificial Sequence
  Synthetic oligonucleotide
ttgcagacatgtacggggggattaccgatgcggtc

SEQ ID NO: 11707 - DNA, 38 bp, Artificial Sequence
  Synthetic oligonucleotide
gcgacgaagttctggttgtaaacaaggcttgtttatga

SEQ ID NO: 11708 - DNA, 37 bp, Artificial Sequence
  Synthetic oligonucleotide
gcttgcgtgatctccattcgcgcgttcatgatataga

SEQ ID NO: 11709 - DNA, 37 bp, Artificial Sequence
  Synthetic oligonucleotide
tatggacgcagaggccgcattcgcactgcgatcacga

SEQ ID NO: 11710 - DNA, 36 bp, Artificial Sequence
  Synthetic oligonucleotide
tgtcgcctaagtaactggactacggcttttgagaca

SEQ ID NO: 11711 - DNA, 35 bp, Artificial Sequence
  Synthetic oligonucleotide
aagtcaataagaatctgcagtcgagctgtaaacga

SEQ ID NO: 11712 - DNA, 36 bp, Artificial Sequence
  Synthetic oligonucleotide
aagtgggtagctgtgattgtgctcggtttggatgaa

SEQ ID NO: 11713 - DNA, 38 bp, Artificial Sequence
  Synthetic oligonucleotide
aattctcctggtggagggagtcttcagatgggacatga

SEQ ID NO: 11714 - DNA, 35 bp, Artificial Sequence
  Synthetic oligonucleotide
acaaagtactagcggggtacccccagcatatgggg

SEQ ID NO: 11715 - DNA, 36 bp, Artificial Sequence
  Synthetic oligonucleotide
agaataacgccgtagccaaaacaagagtttcgccga

SEQ ID NO: 11716 - DNA, 36 bp, Artificial Sequence
  Synthetic oligonucleotide
agaggtccccattaatcattgtataaagtttgacca

SEQ ID NO: 11717 - DNA, 35 bp, Artificial Sequence
  Synthetic oligonucleotide
agcatttcatggataattgcgtagtcgagacgtgt

SEQ ID NO: 11718 - DNA, 34 bp, Artificial Sequence
  Synthetic oligonucleotide
agcggaataatactatcgggcagttccagcagga

SEQ ID NO: 11719 - DNA, 37 bp, Artificial Sequence
  Synthetic oligonucleotide
agtccaggcgtccttcaacgtgaccccatgataccga

SEQ ID NO: 11720 - DNA, 37 bp, Artificial Sequence
  Synthetic oligonucleotide
atacgaatcggttcgtactttgttaaaaacgatgcga

SEQ ID NO: 11721 - DNA, 37 bp, Artificial Sequence
  Synthetic oligonucleotide
atagtgccgtatgaattcagggcttagaattcgcgga

SEQ ID NO: 11722 - DNA, 38 bp, Artificial Sequence
  Synthetic oligonucleotide
catgaaacagacgtagcctattcgatccgagcaaatga

SEQ ID NO: 11723 - DNA, 36 bp, Artificial Sequence
  Synthetic oligonucleotide
gaccgttaacccggtccctgatggtactttgggtaa

SEQ ID NO: 11724 - DNA, 37 bp, Artificial Sequence
  Synthetic oligonucleotide
gagccatttgtgcgaaggatagctcatttctcaatga

SEQ ID NO: 11725 - DNA, 36 bp, Artificial Sequence
  Synthetic oligonucleotide
gagttagagtgtctttccgtgcgcatcttccttaca

SEQ ID NO: 11726 - DNA, 38 bp, Artificial Sequence
  Synthetic oligonucleotide
gcccgccgacaaaggatttgaagctttatataggctga

SEQ ID NO: 11727 - DNA, 36 bp, Artificial Sequence
  Synthetic oligonucleotide
gccctgtggcactcacacttggctatttgctcatca

SEQ ID NO: 11728 - DNA, 37 bp, Artificial Sequence
  Synthetic oligonucleotide
gcgattcgcgtggcgtgccatttatggagtgatgaga

SEQ ID NO: 11729 - DNA, 38 bp, Artificial Sequence
  Synthetic oligonucleotide
gcgtgaccacatgggactagtagaaatttgcggtgtga

SEQ ID NO: 11730 - DNA, 37 bp, Artificial Sequence
  Synthetic oligonucleotide
gctgtagcatcagtccaattagaactatgttgacaga

SEQ ID NO: 11731 - DNA, 38 bp, Artificial Sequence
  Synthetic oligonucleotide
ggtaataacgctaatccacgtttagtaccttaggatga

SEQ ID NO: 11732 - DNA, 35 bp, Artificial Sequence
  Synthetic oligonucleotide
ggtcagcatcgatttgcgtgataccacttcgtttg

SEQ ID NO: 11733 - DNA, 35 bp, Artificial Sequence
  Synthetic oligonucleotide
ggtttggttccgatccgcaagcgcggttacaaaga

SEQ ID NO: 11734 - DNA, 36 bp, Artificial Sequence
  Synthetic oligonucleotide
gtcctgcatcggtgaatcacattgggacggtggaca

SEQ ID NO: 11735 - DNA, 35 bp, Artificial Sequence
  Synthetic oligonucleotide
gtgatagtccgcggtgtccacaggatcaacattca

SEQ ID NO: 11736 - DNA, 36 bp, Artificial Sequence
  Synthetic oligonucleotide
gtggggcatttataccttcgccataagtgcttcaca

SEQ ID NO: 11737 - DNA, 38 bp, Artificial Sequence
  Synthetic oligonucleotide
gttagaacgacaagtcaagaagtcagcacccaggctga

SEQ ID NO: 11738 - DNA, 35 bp, Artificial Sequence
  Synthetic oligonucleotide
gtttgcaagggccggctttgttaaacgtctgtagt

SEQ ID NO: 11739 - DNA, 37 bp, Artificial Sequence
  Synthetic oligonucleotide
taaatgactgtgtgcaacattggcgtgggcgtttcga

SEQ ID NO: 11740 - DNA, 38 bp, Artificial Sequence
  Synthetic oligonucleotide
taagtcctcttacccgctgtgagaaggacttcacatga

SEQ ID NO: 11741 - DNA, 35 bp, Artificial Sequence
  Synthetic oligonucleotide
tacctagggtaaactttcatcatttcccgaagttg

SEQ ID NO: 11742 - DNA, 36 bp, Artificial Sequence
  Synthetic oligonucleotide
tactcgtatagtatgtgagttgtgagcaagactaca

SEQ ID NO: 11743 - DNA, 36 bp, Artificial Sequence
  Synthetic oligonucleotide
tagatacgatatcaaggggtaatgggccatagctta

SEQ ID NO: 11744 - DNA, 37 bp, Artificial Sequence
  Synthetic oligonucleotide
tcaacaacggagtgactactagcaagggtattacgga

SEQ ID NO: 11745 - DNA, 35 bp, Artificial Sequence
  Synthetic oligonucleotide
tccttggtctcataatgtagattccggtgtactgc

SEQ ID NO: 11746 - DNA, 38 bp, Artificial Sequence
  Synthetic oligonucleotide
ttatagccagggatcataagacagtgagcggaatttga

SEQ ID NO: 11747 - DNA, 36 bp, Artificial Sequence
  Synthetic oligonucleotide
ttcgagcaaacgctagactatggtatacacggcgta

SEQ ID NO: 11748 - DNA, 35 bp, Artificial Sequence
  Synthetic oligonucleotide
gtctgacaaatgaccggataagttacgcgtggcaa

SEQ ID NO: 11749 - DNA, 35 bp, Artificial Sequence
  Synthetic oligonucleotide
acgcggcgcgggtcactacagggcataactacagt

SEQ ID NO: 11750 - DNA, 36 bp, Artificial Sequence
  Synthetic oligonucleotide
gttggggggttctacgccagaatgcgtcatcacgga

SEQ ID NO: 11751 - DNA, 37 bp, Artificial Sequence
  Synthetic oligonucleotide
aacccccttctcgtttcgtgcgaaacagcgagttcga

SEQ ID NO: 11752 - DNA, 37 bp, Artificial Sequence
  Synthetic oligonucleotide
gtgcgacatgcgtagtagcgactgtcatcgcccacga

SEQ ID NO: 11753 - DNA, 36 bp, Artificial Sequence
  Synthetic oligonucleotide
aaattgtggtacgctgaaggaacggggagcatgtta

SEQ ID NO: 11754 - DNA, 35 bp, Artificial Sequence
  Synthetic oligonucleotide
aacaggagtgccgaccggacggttccggatcaaga

SEQ ID NO: 11755 - DNA, 38 bp, Artificial Sequence
  Synthetic oligonucleotide
aaggcactgcaataatcctctccaccgttggggtgtga

SEQ ID NO: 11756 - DNA, 37 bp, Artificial Sequence
  Synthetic oligonucleotide
aaggggcgcaatttgactgaggcgctaaatgccaaga

SEQ ID NO: 11757 - DNA, 36 bp, Artificial Sequence
  Synthetic oligonucleotide
aatgtgctgggtcatagtgatggctttgtatcagga

SEQ ID NO: 11758 - DNA, 37 bp, Artificial Sequence
  Synthetic oligonucleotide
aattcataggtcaagtcgtggacacgtaaagtacaga

SEQ ID NO: 11759 - DNA, 36 bp, Artificial Sequence
  Synthetic oligonucleotide
acacgcgtgaggttccattacactgtagaccgggaa

SEQ ID NO: 11760 - DNA, 37 bp, Artificial Sequence
  Synthetic oligonucleotide
acgtcaagctgaaaggaataggtgcgggatggaacga

SEQ ID NO: 11761 - DNA, 36 bp, Artificial Sequence
  Synthetic oligonucleotide
actaaaccgaccgtgccttcatatgccgaacatgga

SEQ ID NO: 11762 - DNA, 36 bp, Artificial Sequence
  Synthetic oligonucleotide
actaatctacggcgggttgcaaggagtactagtata

SEQ ID NO: 11763 - DNA, 36 bp, Artificial Sequence
  Synthetic oligonucleotide
actttagcttcatgaccatacactcatcgagtggca

SEQ ID NO: 11764 - DNA, 35 bp, Artificial Sequence
  Synthetic oligonucleotide
agcatatctaaagatgcaagaggagcggtcattag

SEQ ID NO: 11765 - DNA, 37 bp, Artificial Sequence
  Synthetic oligonucleotide
agccatcggtccggtgacaacgactgggacggagcga

SEQ ID NO: 11766 - DNA, 35 bp, Artificial Sequence
  Synthetic oligonucleotide
agtcacacggtggggctaatagtaaccccgttgta

SEQ ID NO: 11767 - DNA, 35 bp, Artificial Sequence
  Synthetic oligonucleotide
agttgcgacgcccataggtttcatagcggcgaagc

SEQ ID NO: 11768 - DNA, 35 bp, Artificial Sequence
  Synthetic oligonucleotide
atatgtggaaacgtacctgctgattttaagccagg

SEQ ID NO: 11769 - DNA, 37 bp, Artificial Sequence
  Synthetic oligonucleotide
atccgctggtatcggtcgctccaaccagaacgctcga

SEQ ID NO: 11770 - DNA, 37 bp, Artificial Sequence
  Synthetic oligonucleotide
atcgagcgtcaagatcatctccttacgccccccaaga

SEQ ID NO: 11771 - DNA, 38 bp, Artificial Sequence
  Synthetic oligonucleotide
atctcgcgaatcccgtgggcgcactgaaccgccaatga

SEQ ID NO: 11772 - DNA, 35 bp, Artificial Sequence
  Synthetic oligonucleotide
caacggattcacaaggggtttaatctaatggcctt

SEQ ID NO: 11773 - DNA, 36 bp, Artificial Sequence
  Synthetic oligonucleotide
caccgcggtaggggcaacgggaaatgacgaactata

SEQ ID NO: 11774 - DNA, 35 bp, Artificial Sequence
  Synthetic oligonucleotide
ccacgagctggagaaaaccgtatggtttttacttt

SEQ ID NO: 11775 - DNA, 35 bp, Artificial Sequence
  Synthetic oligonucleotide
cccaggagccggtgtaggggacgggactcccactg

SEQ ID NO: 11776 - DNA, 35 bp, Artificial Sequence
  Synthetic oligonucleotide
cctcgctgacttcggttccaacctgacccttgggt

SEQ ID NO: 11777 - DNA, 38 bp, Artificial Sequence
  Synthetic oligonucleotide
ctaatggacgtactttgtataggtgtgctggctaatga

SEQ ID NO: 11778 - DNA, 35 bp, Artificial Sequence
  Synthetic oligonucleotide
gaatccatcgggagggctacaacgttttggtatag

SEQ ID NO: 11779 - DNA, 36 bp, Artificial Sequence
  Synthetic oligonucleotide
gactggccttcgcaaccggacgtaacgtggccggta

SEQ ID NO: 11780 - DNA, 38 bp, Artificial Sequence
  Synthetic oligonucleotide
gagaagggagagccggcaagagtgttggggggatttga

SEQ ID NO: 11781 - DNA, 35 bp, Artificial Sequence
  Synthetic oligonucleotide
gagattctccgctaagtactcaggttcgaagtggc

SEQ ID NO: 11782 - DNA, 36 bp, Artificial Sequence
  Synthetic oligonucleotide
gagcaacaactggcggtctctggagaccacgtacaa

SEQ ID NO: 11783 - DNA, 36 bp, Artificial Sequence
  Synthetic oligonucleotide
gatcttaggaaatagtacggctgatgctaacgttta

SEQ ID NO: 11784 - DNA, 37 bp, Artificial Sequence
  Synthetic oligonucleotide
gcacacaagtggtgagacgtagtgggtaagggtagga

SEQ ID NO: 11785 - DNA, 37 bp, Artificial Sequence
  Synthetic oligonucleotide
gcagacaagttgcgcatccctctgtttctgacgctga

SEQ ID NO: 11786 - DNA, 35 bp, Artificial Sequence
  Synthetic oligonucleotide
gcctacaggctaatgctcaaatagtattagacctc

SEQ ID NO: 11787 - DNA, 34 bp, Artificial Sequence
  Synthetic oligonucleotide
gcgactacgcaccctttcagtgtctcacacgtga

SEQ ID NO: 11788 - DNA, 37 bp, Artificial Sequence
  Synthetic oligonucleotide
gctaaaatgtgatgcctagcaaggtgccaataacgga

SEQ ID NO: 11789 - DNA, 38 bp, Artificial Sequence
  Synthetic oligonucleotide
ggaaccgaaagttcgtaacatagaatatccgaacgtga

SEQ ID NO: 11790 - DNA, 38 bp, Artificial Sequence
  Synthetic oligonucleotide
gggagtagtacatcaggtcctcccgctagctgcgatga

SEQ ID NO: 11791 - DNA, 38 bp, Artificial Sequence
  Synthetic oligonucleotide
ggggtcgaaggttgacggtatctagtgggtctgcatga

SEQ ID NO: 11792 - DNA, 36 bp, Artificial Sequence
  Synthetic oligonucleotide
gtacaggctacgctacttgtccagtaggattaacta

SEQ ID NO: 11793 - DNA, 36 bp, Artificial Sequence
  Synthetic oligonucleotide
gtctggtgcatacaaagttggagtctctgtcgacta

SEQ ID NO: 11794 - DNA, 37 bp, Artificial Sequence
  Synthetic oligonucleotide
gtgaaacctaagttaagttactattgtctgcctaaga

SEQ ID NO: 11795 - DNA, 36 bp, Artificial Sequence
  Synthetic oligonucleotide
gtgcccgcgacctagtagaagcgaagtcactgtcca

SEQ ID NO: 11796 - DNA, 36 bp, Artificial Sequence
  Synthetic oligonucleotide
gtgctcgggaatataacgaacttcgtacttagcata

SEQ ID NO: 11797 - DNA, 38 bp, Artificial Sequence
  Synthetic oligonucleotide
gtgcttccacaacacgggtgaggtgcacgtactagtga

SEQ ID NO: 11798 - DNA, 36 bp, Artificial Sequence
  Synthetic oligonucleotide
gtggtttgggcacaaatcgccactggacgctcatga

SEQ ID NO: 11799 - DNA, 35 bp, Artificial Sequence
  Synthetic oligonucleotide
gtttcaagctagcgtagttaaatgcgactttcgtc

SEQ ID NO: 11800 - DNA, 37 bp, Artificial Sequence
  Synthetic oligonucleotide
taaagggcataggaataaccgaaccggtgtgggtcga

SEQ ID NO: 11801 - DNA, 37 bp, Artificial Sequence
  Synthetic oligonucleotide
taacgacgtggttacgttaactagaacatggtttgga

SEQ ID NO: 11802 - DNA, 36 bp, Artificial Sequence
  Synthetic oligonucleotide
tacattcagcggggacggtaagcgggctgcattcga

SEQ ID NO: 11803 - DNA, 38 bp, Artificial Sequence
  Synthetic oligonucleotide
tacgtggtgcgaaaattatgcgtgtactcaagatttga

SEQ ID NO: 11804 - DNA, 36 bp, Artificial Sequence
  Synthetic oligonucleotide
tactgggcgatagttgcacaagcggacatcgagaca

SEQ ID NO: 11805 - DNA, 38 bp, Artificial Sequence
  Synthetic oligonucleotide
tagtcttactgggcatggagatatgtacgaacgtatga

SEQ ID NO: 11806 - DNA, 36 bp, Artificial Sequence
  Synthetic oligonucleotide
tatggaggggtgctcactagatttctgtgcttgcaa

SEQ ID NO: 11807 - DNA, 35 bp, Artificial Sequence
  Synthetic oligonucleotide
tcagtcacgtagcacatcgagtagggctgtgagta

SEQ ID NO: 11808 - DNA, 37 bp, Artificial Sequence
  Synthetic oligonucleotide
tcctgcacaaggggatccttcagacggggaagaggta

SEQ ID NO: 11809 - DNA, 35 bp, Artificial Sequence
  Synthetic oligonucleotide
tcctttgtagcacggggccattcggtacggaccaa

SEQ ID NO: 11810 - DNA, 37 bp, Artificial Sequence
  Synthetic oligonucleotide
tcttcaccttataggtcgtcgttgaaatgggagatga

SEQ ID NO: 11811 - DNA, 36 bp, Artificial Sequence
  Synthetic oligonucleotide
tgtcactataacaattgctgttggctgcacacgcga

SEQ ID NO: 11812 - DNA, 35 bp, Artificial Sequence
  Synthetic oligonucleotide
tgtggtcaaatggacattcgaacattgtgcctggt

SEQ ID NO: 11813 - DNA, 38 bp, Artificial Sequence
  Synthetic oligonucleotide
ttacacgttcgcatcctggttaaagttatgggcattga

SEQ ID NO: 11814 - DNA, 38 bp, Artificial Sequence
  Synthetic oligonucleotide
ttagcctgtaccatggccttttttgtcgggctgtgtga

SEQ ID NO: 11815 - DNA, 38 bp, Artificial Sequence
  Synthetic oligonucleotide
gtgagtagtccgcgtgttgcactactatgtagtgttga

SEQ ID NO: 11816 - DNA, 37 bp, Artificial Sequence
  Synthetic oligonucleotide
gggtacaatgttacattactaccgcccacagtagtga

SEQ ID NO: 11817 - DNA, 36 bp, Artificial Sequence
  Synthetic oligonucleotide
taaccccgccgtcgactcccggcttgagaaagccga

SEQ ID NO: 11818 - DNA, 37 bp, Artificial Sequence
  Synthetic oligonucleotide
agaagagtcggggatctagcgaagagtgacaccgtga

SEQ ID NO: 11819 - DNA, 38 bp, Artificial Sequence
  Synthetic oligonucleotide
agagcgacacctccgcttatgatggccagataatctga

SEQ ID NO: 11820 - DNA, 37 bp, Artificial Sequence
  Synthetic oligonucleotide
agtaaggaccggagctgaacagagcggccctgataga

SEQ ID NO: 11821 - DNA, 35 bp, Artificial Sequence
  Synthetic oligonucleotide
attaggcaaagctaccgctatagatacttgttacg

SEQ ID NO: 11822 - DNA, 37 bp, Artificial Sequence
  Synthetic oligonucleotide
attgagaagccttgcaagtcgaaatcgattgatctga

SEQ ID NO: 11823 - DNA, 35 bp, Artificial Sequence
  Synthetic oligonucleotide
ctactaatgtggttgtttgggtcgtgctatatact

SEQ ID NO: 11824 - DNA, 36 bp, Artificial Sequence
  Synthetic oligonucleotide
gcccgacatgtacatgctgttgtgtggaaaaggtta

SEQ ID NO: 11825 - DNA, 38 bp, Artificial Sequence
  Synthetic oligonucleotide
ggggatagttgtttatgggtttcgttagatcttagtga

SEQ ID NO: 11826 - DNA, 38 bp, Artificial Sequence
  Synthetic oligonucleotide
gtaggagcggacccgcgcgtcacatgaccaatacatga

SEQ ID NO: 11827 - DNA, 36 bp, Artificial Sequence
  Synthetic oligonucleotide
tccgtgatctgctggaaactgctaagacagttgaga

SEQ ID NO: 11828 - DNA, 35 bp, Artificial Sequence
  Synthetic oligonucleotide
gccctccatgcggccatatagatacggtttcgata

SEQ ID NO: 11829 - DNA, 38 bp, Artificial Sequence
  Synthetic oligonucleotide
gtggagaatgttgggaagtgaattcgggcaagacgtga

SEQ ID NO: 11830 - DNA, 36 bp, Artificial Sequence
  Synthetic oligonucleotide
ttgttactggttctgtcagtcaggagtaagctttaa

SEQ ID NO: 11831 - DNA, 35 bp, Artificial Sequence
  Synthetic oligonucleotide
gaagacaaatgattagggcgccggctagggtaggt

SEQ ID NO: 11832 - DNA, 37 bp, Artificial Sequence
  Synthetic oligonucleotide
aacccgacggagaacgtgtgcatggctccgctgttga

SEQ ID NO: 11833 - DNA, 36 bp, Artificial Sequence
  Synthetic oligonucleotide
aatactgctcgacgcccgaaccgcgggtcctttata

SEQ ID NO: 11834 - DNA, 36 bp, Artificial Sequence
  Synthetic oligonucleotide
acgtactgtgcaactccagggtggtacttttcatga

SEQ ID NO: 11835 - DNA, 36 bp, Artificial Sequence
  Synthetic oligonucleotide
atcagagtggggatacatggtaaatgcagtacagga

SEQ ID NO: 11836 - DNA, 35 bp, Artificial Sequence
  Synthetic oligonucleotide
atccggaaaaaaggtgcggactcattacgtacggg

SEQ ID NO: 11837 - DNA, 35 bp, Artificial Sequence
  Synthetic oligonucleotide
ctaccgacggacaaagggcacgtctttaaatgtac

SEQ ID NO: 11838 - DNA, 36 bp, Artificial Sequence
  Synthetic oligonucleotide
ctcaaccgagaaggttaattagttcgttgctaagga

SEQ ID NO: 11839 - DNA, 37 bp, Artificial Sequence
  Synthetic oligonucleotide
ctcccggactggatacgggagcagatcagtccagcga

SEQ ID NO: 11840 - DNA, 35 bp, Artificial Sequence
  Synthetic oligonucleotide
gaacaaggtggtcgagtagtaataagttactccgc

SEQ ID NO: 11841 - DNA, 36 bp, Artificial Sequence
  Synthetic oligonucleotide
gaagagtaaggcgggagcccgccggagatcgaagta

SEQ ID NO: 11842 - DNA, 38 bp, Artificial Sequence
  Synthetic oligonucleotide
gcaactggaacttaagggtccgatcaggctctgggtga

SEQ ID NO: 11843 - DNA, 36 bp, Artificial Sequence
  Synthetic oligonucleotide
gtaggtcgacaagggactcttggagtttagctaaaa

SEQ ID NO: 11844 - DNA, 35 bp, Artificial Sequence
  Synthetic oligonucleotide
gtgagccggtccagtagtattccagtcaagatagc

SEQ ID NO: 11845 - DNA, 35 bp, Artificial Sequence
  Synthetic oligonucleotide
gtgaggtaagtcaagcatgtagggccttatatggg

SEQ ID NO: 11846 - DNA, 38 bp, Artificial Sequence
  Synthetic oligonucleotide
gtttaggtcatcgtgtctttgttgtattatgggtgtga

SEQ ID NO: 11847 - DNA, 35 bp, Artificial Sequence
  Synthetic oligonucleotide
tccgccccgacgtgcattcagggtgatggacgacc

SEQ ID NO: 11848 - DNA, 36 bp, Artificial Sequence
  Synthetic oligonucleotide
ttagtcagattgcggacggttgcgaaggttaggcta

SEQ ID NO: 11849 - DNA, 37 bp, Artificial Sequence
  Synthetic oligonucleotide
ttgccgctaggcctgtcagataatgagctctggtgga

SEQ ID NO: 11850 - DNA, 36 bp, Artificial Sequence
  Synthetic oligonucleotide
ttgggagcaaacttccgggagtagggaaggttaaga

SEQ ID NO: 11851 - DNA, 38 bp, Artificial Sequence
  Synthetic oligonucleotide
ggagcccagagcttaacttgcgccggttaacatgatga

SEQ ID NO: 11852 - DNA, 35 bp, Artificial Sequence
  Synthetic oligonucleotide
ttcaagtctgcgcattagaacaaggtgtctcagag

SEQ ID NO: 11853 - DNA, 35 bp, Artificial Sequence
  Synthetic oligonucleotide
gatcgacacgagcatcccctctcagagcgctacga

SEQ ID NO: 11854 - DNA, 35 bp, Artificial Sequence
  Synthetic oligonucleotide
taataccacgccgcttctacacgtgggatactatg

SEQ ID NO: 11855 - DNA, 37 bp, Artificial Sequence
  Synthetic oligonucleotide
atatcattcccgccgcctcttgtcacaacgcggaaga

SEQ ID NO: 11856 - DNA, 35 bp, Artificial Sequence
  Synthetic oligonucleotide
ccgtatgcagacgtgttcatctcgggatccgacgt

SEQ ID NO: 11857 - DNA, 36 bp, Artificial Sequence
  Synthetic oligonucleotide
ggggacggccgtaagtctttttggttatcgttgcta

SEQ ID NO: 11858 - DNA, 37 bp, Artificial Sequence
  Synthetic oligonucleotide
tacgtcgcatatcctatccagggtagagtaggatgga

SEQ ID NO: 11859 - DNA, 35 bp, Artificial Sequence
  Synthetic oligonucleotide
acaactgacgcacacagccggtgacgggtgaggaa

SEQ ID NO: 11860 - DNA, 38 bp, Artificial Sequence
  Synthetic oligonucleotide
acatgctgaatgcatcgagtgtaaaggctaaaaactga

SEQ ID NO: 11861 - DNA, 37 bp, Artificial Sequence
  Synthetic oligonucleotide
accctcggctcacagggggtattactcagccatgcga

SEQ ID NO: 11862 - DNA, 36 bp, Artificial Sequence
  Synthetic oligonucleotide
acgcaacaaagtaacataccttgtggacttactaaa

SEQ ID NO: 11863 - DNA, 35 bp, Artificial Sequence
  Synthetic oligonucleotide
agaagagagcgctagtgtcattaggtcccgcagtc

SEQ ID NO: 11864 - DNA, 36 bp, Artificial Sequence
  Synthetic oligonucleotide
agactgcatagtgccaggtgacgggtagttttaaca

SEQ ID NO: 11865 - DNA, 38 bp, Artificial Sequence
  Synthetic oligonucleotide
aggtagatcggtggtcattcctcgtcgtacgttcgtga

SEQ ID NO: 11866 - DNA, 36 bp, Artificial Sequence
  Synthetic oligonucleotide
atccgtcattgggacgagctcatctctggtatcgga

SEQ ID NO: 11867 - DNA, 36 bp, Artificial Sequence
  Synthetic oligonucleotide
atgcggaccacatgagttctcttaccacgtatggga

SEQ ID NO: 11868 - DNA, 38 bp, Artificial Sequence
  Synthetic oligonucleotide
atgtcctgtttggggtcactatcttgacttacgagtga

SEQ ID NO: 11869 - DNA, 38 bp, Artificial Sequence
  Synthetic oligonucleotide
catcaggacgcactgcctcaagtgtttacattcgctga

SEQ ID NO: 11870 - DNA, 35 bp, Artificial Sequence
  Synthetic oligonucleotide
gaacctacaatattataccgagaaacaagcgcctc

SEQ ID NO: 11871 - DNA, 35 bp, Artificial Sequence
  Synthetic oligonucleotide
gaacttgtagttaattcacttagttggtgcgtatt

SEQ ID NO: 11872 - DNA, 37 bp, Artificial Sequence
  Synthetic oligonucleotide
gacacactatgaaacagcctaggtcgccagtcttaga

SEQ ID NO: 11873 - DNA, 38 bp, Artificial Sequence
  Synthetic oligonucleotide
gacgtaactcgacagactaccagaaacgtttcaggtga

SEQ ID NO: 11874 - DNA, 37 bp, Artificial Sequence
  Synthetic oligonucleotide
gccgtcgttcccgaatcgtttccggggaacgaggaga

SEQ ID NO: 11875 - DNA, 35 bp, Artificial Sequence
  Synthetic oligonucleotide
gcctccggccacgtgacggtccccatactcactgt

SEQ ID NO: 11876 - DNA, 36 bp, Artificial Sequence
  Synthetic oligonucleotide
gctgactgcgccagggggttttcgggatatggtcaa

SEQ ID NO: 11877 - DNA, 37 bp, Artificial Sequence
  Synthetic oligonucleotide
gcttaatggtgggttttcgacacacatgtgtgttcga

SEQ ID NO: 11878 - DNA, 37 bp, Artificial Sequence
  Synthetic oligonucleotide
gcttcagagtagaggacgggtggaggactctgaaaga

SEQ ID NO: 11879 - DNA, 35 bp, Artificial Sequence
  Synthetic oligonucleotide
gggaacgtcagcttccgtgcgatagaacggccgaa

SEQ ID NO: 11880 - DNA, 36 bp, Artificial Sequence
  Synthetic oligonucleotide
ggtctgcatttgtacatcaacgaaggggggaaaata

SEQ ID NO: 11881 - DNA, 35 bp, Artificial Sequence
  Synthetic oligonucleotide
gtacacgaggcatcacgtttgggatcagtactagt

SEQ ID NO: 11882 - DNA, 37 bp, Artificial Sequence
  Synthetic oligonucleotide
gtaccaggtaatagcgttttactggtcatagcgtaga

SEQ ID NO: 11883 - DNA, 36 bp, Artificial Sequence
  Synthetic oligonucleotide
gtgggacttggtcgtgtggctgaaaggaaggcagga

SEQ ID NO: 11884 - DNA, 35 bp, Artificial Sequence
  Synthetic oligonucleotide
gtttcaccggttattaaaccaatggcgtcactggc

SEQ ID NO: 11885 - DNA, 37 bp, Artificial Sequence
  Synthetic oligonucleotide
taacgccaaagggattatgagagggacattaagtcga

SEQ ID NO: 11886 - DNA, 38 bp, Artificial Sequence
  Synthetic oligonucleotide
tacgcggccatacagaatgataatctggtatggtttga

SEQ ID NO: 11887 - DNA, 38 bp, Artificial Sequence
  Synthetic oligonucleotide
tactcctcgctggaaaagacgttcgtctgacagtttga

SEQ ID NO: 11888 - DNA, 36 bp, Artificial Sequence
  Synthetic oligonucleotide
tacttgagggaagtggtgttgcttcgggaacgtata

SEQ ID NO: 11889 - DNA, 38 bp, Artificial Sequence
  Synthetic oligonucleotide
tagcccctccggagttcggtgggacagaggggtcctga

SEQ ID NO: 11890 - DNA, 37 bp, Artificial Sequence
  Synthetic oligonucleotide
tcaaggagcaagcagttggttaatgatcaattgtgga

SEQ ID NO: 11891 - DNA, 35 bp, Artificial Sequence
  Synthetic oligonucleotide
tcaatgagattatcagtcccgggtaatgctgcagg

SEQ ID NO: 11892 - DNA, 35 bp, Artificial Sequence
  Synthetic oligonucleotide
tcagtactggttttttgaggcttacggattcatcc

SEQ ID NO: 11893 - DNA, 37 bp, Artificial Sequence
  Synthetic oligonucleotide
tctcagtgcacttgcgcatacacacacgctacaagga

SEQ ID NO: 11894 - DNA, 37 bp, Artificial Sequence
  Synthetic oligonucleotide
tctttacacgtaagcgctgcctacgacggggaaccga

SEQ ID NO: 11895 - DNA, 38 bp, Artificial Sequence
  Synthetic oligonucleotide
tctttgggcggctggtggcaacccagactttgtactga

SEQ ID NO: 11896 - DNA, 37 bp, Artificial Sequence
  Synthetic oligonucleotide
tgtcatcctgggcattccgtacgcgattatcaagaga

SEQ ID NO: 11897 - DNA, 35 bp, Artificial Sequence
  Synthetic oligonucleotide
ttgccctgcggccctgacgtagctatactgcgtta

SEQ ID NO: 11898 - DNA, 35 bp, Artificial Sequence
  Synthetic oligonucleotide
ttgtatggcatttgattgtcgcagggtgtccaatc

SEQ ID NO: 11899 - DNA, 37 bp, Artificial Sequence
  Synthetic oligonucleotide
tacgttacttccagcatgtcatgatccgagtatggga

SEQ ID NO: 11900 - DNA, 36 bp, Artificial Sequence
  Synthetic oligonucleotide
tgaaggctgtaggtcttccatgtccagttctgcaga

SEQ ID NO: 11901 - DNA, 35 bp, Artificial Sequence
  Synthetic oligonucleotide
tgcaacccgaaggatatgctatatggttcaatgca

SEQ ID NO: 11902 - DNA, 35 bp, Artificial Sequence
  Synthetic oligonucleotide
aattggcattcgatcgccatgagtacctgggtctg

SEQ ID NO: 11903 - DNA, 35 bp, Artificial Sequence
  Synthetic oligonucleotide
acaacgtgggggagggtgatgtaactcacttaagt

SEQ ID NO: 11904 - DNA, 35 bp, Artificial Sequence
  Synthetic oligonucleotide
accaagtaacatgccgcgtgtcgcgatcgcgagcg

SEQ ID NO: 11905 - DNA, 37 bp, Artificial Sequence
  Synthetic oligonucleotide
agacgtcggaggtatacgtttgcagttgatacatgga

SEQ ID NO: 11906 - DNA, 38 bp, Artificial Sequence
  Synthetic oligonucleotide
agtactggctgatccgggaaggggctccagagtcctga

SEQ ID NO: 11907 - DNA, 35 bp, Artificial Sequence
  Synthetic oligonucleotide
atgatcgtaaatgcggtgtcgcgagtgttttacgc

SEQ ID NO: 11908 - DNA, 35 bp, Artificial Sequence
  Synthetic oligonucleotide
gcccccctccagtgtattacgagtaggggatcctg

SEQ ID NO: 11909 - DNA, 37 bp, Artificial Sequence
  Synthetic oligonucleotide
gcgaaccgaggtcgagttgattagttgaatcacttga

SEQ ID NO: 11910 - DNA, 37 bp, Artificial Sequence
  Synthetic oligonucleotide
gcgaattaaaaacgtacacttagctaggtccgaagga

SEQ ID NO: 11911 - DNA, 38 bp, Artificial Sequence
  Synthetic oligonucleotide
tgataccacctactggggcgtgtgactgtctgcgatga

SEQ ID NO: 11912 - DNA, 36 bp, Artificial Sequence
  Synthetic oligonucleotide
tggggacacctacgccccgtactggccccagcctta

SEQ ID NO: 11913 - DNA, 35 bp, Artificial Sequence
  Synthetic oligonucleotide
ttccccagcctcataggttccggagcgaaacatcc

SEQ ID NO: 11914 - DNA, 36 bp, Artificial Sequence
  Synthetic oligonucleotide
gcaacgctacttgtagaaacttccgccgtgcggaga

SEQ ID NO: 11915 - DNA, 37 bp, Artificial Sequence
  Synthetic oligonucleotide
aaacaagtcggacatcaacccggcttgtcaaggaaga

SEQ ID NO: 11916 - DNA, 38 bp, Artificial Sequence
  Synthetic oligonucleotide
aagaagagtccatgtaagggagcctgggattgaattga

SEQ ID NO: 11917 - DNA, 37 bp, Artificial Sequence
  Synthetic oligonucleotide
aaggtcgaattcagtcgtggggtagggtgccagtgga

SEQ ID NO: 11918 - DNA, 35 bp, Artificial Sequence
  Synthetic oligonucleotide
aagtctggaagcggagttaggacctgatactcgta

SEQ ID NO: 11919 - DNA, 35 bp, Artificial Sequence
  Synthetic oligonucleotide
aatgagtgggaagacctccccgtgagggcttatgc

SEQ ID NO: 11920 - DNA, 35 bp, Artificial Sequence
  Synthetic oligonucleotide
aatgtcactgtacggcggactatttggccattggc

SEQ ID NO: 11921 - DNA, 37 bp, Artificial Sequence
  Synthetic oligonucleotide
acagtatgggctcgatgggtcaggcatgtgggtggga

SEQ ID NO: 11922 - DNA, 38 bp, Artificial Sequence
  Synthetic oligonucleotide
acgaacctagaacttgtcgagggagtgagccgtagtga

SEQ ID NO: 11923 - DNA, 36 bp, Artificial Sequence
  Synthetic oligonucleotide
acgcgcccgatcataagtgcggtcacgctgcactaa

SEQ ID NO: 11924 - DNA, 37 bp, Artificial Sequence
  Synthetic oligonucleotide
actctcgataacgagcagtttagggtatctcacgtga

SEQ ID NO: 11925 - DNA, 36 bp, Artificial Sequence
  Synthetic oligonucleotide
acttcaaggagtacgattgagaattatactatcgta

SEQ ID NO: 11926 - DNA, 37 bp, Artificial Sequence
  Synthetic oligonucleotide
agctccggtttgttaactacggcccaggctgtaatga

SEQ ID NO: 11927 - DNA, 36 bp, Artificial Sequence
  Synthetic oligonucleotide
agggacgagcgcactatcttagcactcagaggtaga

SEQ ID NO: 11928 - DNA, 35 bp, Artificial Sequence
  Synthetic oligonucleotide
aggtcgacttatgccaccatcaaggttctgttagt

SEQ ID NO: 11929 - DNA, 35 bp, Artificial Sequence
  Synthetic oligonucleotide
agttggccaagccccacgtacggcacgatggaata

SEQ ID NO: 11930 - DNA, 38 bp, Artificial Sequence
  Synthetic oligonucleotide
atacccgcgattagtatacacggtctggagccatgtga

SEQ ID NO: 11931 - DNA, 36 bp, Artificial Sequence
  Synthetic oligonucleotide
atatcggagttcagaatcagtcattgctgcactcaa

SEQ ID NO: 11932 - DNA, 37 bp, Artificial Sequence
  Synthetic oligonucleotide
atgaaagcataggacttgtgtaacgctgcacattgga

SEQ ID NO: 11933 - DNA, 35 bp, Artificial Sequence
  Synthetic oligonucleotide
attaagagctcacacttacgtatgtaggtggacaa

SEQ ID NO: 11934 - DNA, 36 bp, Artificial Sequence
  Synthetic oligonucleotide
attggggacgcgagggggttcctgtgaaccttcata

SEQ ID NO: 11935 - DNA, 38 bp, Artificial Sequence
  Synthetic oligonucleotide
cagtgcgctcgcgcgacaagcactttcccccgtgttga

SEQ ID NO: 11936 - DNA, 38 bp, Artificial Sequence
  Synthetic oligonucleotide
ccaaagtctccccaactgcagactggagggggctctga

SEQ ID NO: 11937 - DNA, 36 bp, Artificial Sequence
  Synthetic oligonucleotide
cctctaatgccccagaaggaggtgcaagtccatcga

SEQ ID NO: 11938 - DNA, 35 bp, Artificial Sequence
  Synthetic oligonucleotide
cgacttattagtgagctgtgcccaagagttgccca

SEQ ID NO: 11939 - DNA, 38 bp, Artificial Sequence
  Synthetic oligonucleotide
cgagtgggacaagtcgcatgtaaactctgcaggcatga

SEQ ID NO: 11940 - DNA, 38 bp, Artificial Sequence
  Synthetic oligonucleotide
cttacgggaagaactatctaccatggttccgggggtga

SEQ ID NO: 11941 - DNA, 37 bp, Artificial Sequence
  Synthetic oligonucleotide
gaacgggaattagggtgttggctccgtcatgattaga

SEQ ID NO: 11942 - DNA, 35 bp, Artificial Sequence
  Synthetic oligonucleotide
gaagttaaatactacaacggactcctcatctattc

SEQ ID NO: 11943 - DNA, 35 bp, Artificial Sequence
  Synthetic oligonucleotide
gaatggtggccaagtcgtgtttccgtgtacgcggg

SEQ ID NO: 11944 - DNA, 35 bp, Artificial Sequence
  Synthetic oligonucleotide
gaattggacatcgcgttacattcgcttattgtctg

SEQ ID NO: 11945 - DNA, 38 bp, Artificial Sequence
  Synthetic oligonucleotide
gacataggacagattgtgaggaaactttaacatcatga

SEQ ID NO: 11946 - DNA, 36 bp, Artificial Sequence
  Synthetic oligonucleotide
gacatcaatcacatttgtgccaggcatttgagaaga

SEQ ID NO: 11947 - DNA, 37 bp, Artificial Sequence
  Synthetic oligonucleotide
gagggtctggttatatgctcgtctacaacttctttga

SEQ ID NO: 11948 - DNA, 35 bp, Artificial Sequence
  Synthetic oligonucleotide
gagtattccacactgtgctcaacccctggatcggg

SEQ ID NO: 11949 - DNA, 35 bp, Artificial Sequence
  Synthetic oligonucleotide
gatctgagcttacggaaggtattactgtcatcggc

SEQ ID NO: 11950 - DNA, 37 bp, Artificial Sequence
  Synthetic oligonucleotide
gatcttgactatgcgatcgctcgtagagcccttgaga

SEQ ID NO: 11951 - DNA, 35 bp, Artificial Sequence
  Synthetic oligonucleotide
gatgcactatcttagcatccataggggacacctga

SEQ ID NO: 11952 - DNA, 37 bp, Artificial Sequence
  Synthetic oligonucleotide
gcagcccagcaccaatgatccgcggagcgatccaata

SEQ ID NO: 11953 - DNA, 38 bp, Artificial Sequence
  Synthetic oligonucleotide
gccaacggaacagtagtctcagaaattgctgtatatga

SEQ ID NO: 11954 - DNA, 38 bp, Artificial Sequence
  Synthetic oligonucleotide
gccatacttccactacgtgactgctgagttaaggctga

SEQ ID NO: 11955 - DNA, 37 bp, Artificial Sequence
  Synthetic oligonucleotide
gcccagttctcgagggtgcgactaagtgggtgatcga

SEQ ID NO: 11956 - DNA, 37 bp, Artificial Sequence
  Synthetic oligonucleotide
gccgacaaaaggttgggtgccctcgagtgaggatcga

SEQ ID NO: 11957 - DNA, 35 bp, Artificial Sequence
  Synthetic oligonucleotide
gccgcggggctctccatagcagggtctcgtacgat

SEQ ID NO: 11958 - DNA, 37 bp, Artificial Sequence
  Synthetic oligonucleotide
gccgctattcccccgggttctgtgaaacctgccggga

SEQ ID NO: 11959 - DNA, 38 bp, Artificial Sequence
  Synthetic oligonucleotide
gcctaagacggaagataatgcatgttggactcaggtga

SEQ ID NO: 11960 - DNA, 37 bp, Artificial Sequence
  Synthetic oligonucleotide
gctaactaggtgccaattgaaacttacaggcgccaga

SEQ ID NO: 11961 - DNA, 38 bp, Artificial Sequence
  Synthetic oligonucleotide
gctaagtgtttaacaggacataggataagcggaggtga

SEQ ID NO: 11962 - DNA, 37 bp, Artificial Sequence
  Synthetic oligonucleotide
gctatctttcatgtcggagtcctaaagaggagccaga

SEQ ID NO: 11963 - DNA, 36 bp, Artificial Sequence
  Synthetic oligonucleotide
gctcaagaagcgtgggcgggggaagttaggagtcta

SEQ ID NO: 11964 - DNA, 35 bp, Artificial Sequence
  Synthetic oligonucleotide
gctgtctatatgtgggtgaagcaattcggaccgtt

SEQ ID NO: 11965 - DNA, 35 bp, Artificial Sequence
  Synthetic oligonucleotide
gcttttgtggagtctagctcccagagttctttgtc

SEQ ID NO: 11966 - DNA, 36 bp, Artificial Sequence
  Synthetic oligonucleotide
ggaggtaccacaggatagatccataggacggttgaa

SEQ ID NO: 11967 - DNA, 35 bp, Artificial Sequence
  Synthetic oligonucleotide
ggatggagcacctgatactgcaatggtgcgaccaa

SEQ ID NO: 11968 - DNA, 37 bp, Artificial Sequence
  Synthetic oligonucleotide
gggctctctgagggttaatttaagaccagactgcgga

SEQ ID NO: 11969 - DNA, 36 bp, Artificial Sequence
  Synthetic oligonucleotide
gggctttaagctccgaagagcaagctgcgacgagta

SEQ ID NO: 11970 - DNA, 36 bp, Artificial Sequence
  Synthetic oligonucleotide
ggtcaaaagggagggcacaactatgagacaactcca

SEQ ID NO: 11971 - DNA, 37 bp, Artificial Sequence
  Synthetic oligonucleotide
ggtgttctgcgccattgtacttctcgttccttagaga

SEQ ID NO: 11972 - DNA, 36 bp, Artificial Sequence
  Synthetic oligonucleotide
ggttacctttctagctcgagcgctggttgatcgtca

SEQ ID NO: 11973 - DNA, 38 bp, Artificial Sequence
  Synthetic oligonucleotide
gtacgcgtctgcgcgtacgcgccgtgccacaggtttga

SEQ ID NO: 11974 - DNA, 35 bp, Artificial Sequence
  Synthetic oligonucleotide
gtcccgcactgcctaattaagtgcgtggagacaag

SEQ ID NO: 11975 - DNA, 38 bp, Artificial Sequence
  Synthetic oligonucleotide
gtccgcgggccgtggatgcctactatggcacgcattga

SEQ ID NO: 11976 - DNA, 36 bp, Artificial Sequence
  Synthetic oligonucleotide
gtgcagaagcgttcaaaattggacccctcgtagtca

SEQ ID NO: 11977 - DNA, 38 bp, Artificial Sequence
  Synthetic oligonucleotide
gtgcccctccgacatggaatgtagtaatttatatctga

SEQ ID NO: 11978 - DNA, 36 bp, Artificial Sequence
  Synthetic oligonucleotide
gtggattgcagtccgggtgcgaaaactagtgcaaaa

SEQ ID NO: 11979 - DNA, 37 bp, Artificial Sequence
  Synthetic oligonucleotide
taacaaaagggtatgacgacaggagtttgtttaggga

SEQ ID NO: 11980 - DNA, 37 bp, Artificial Sequence
  Synthetic oligonucleotide
taacaaagcgcgcggttcttcattctatgctattgga

SEQ ID NO: 11981 - DNA, 36 bp, Artificial Sequence
  Synthetic oligonucleotide
taagcatataatacaagagagctgtctacttgctga

SEQ ID NO: 11982 - DNA, 31 bp, Artificial Sequence
  Synthetic oligonucleotide
tagcatcgactggcaaggttcctagtacact

SEQ ID NO: 11983 - DNA, 36 bp, Artificial Sequence
  Synthetic oligonucleotide
tagggttatagtaggcaatttcgacgtcgtgtttta

SEQ ID NO: 11984 - DNA, 35 bp, Artificial Sequence
  Synthetic oligonucleotide
taggtcagacaggcttaacacgtgtagctaccggt

SEQ ID NO: 11985 - DNA, 35 bp, Artificial Sequence
  Synthetic oligonucleotide
tatcctggatttcgataacaccagacccacaagac

SEQ ID NO: 11986 - DNA, 36 bp, Artificial Sequence
  Synthetic oligonucleotide
tatgaaaacatgaccgcgccagccttggttctctca

SEQ ID NO: 11987 - DNA, 35 bp, Artificial Sequence
  Synthetic oligonucleotide
tatgaagtagctagtccacggtttgggtccggggt

SEQ ID NO: 11988 - DNA, 35 bp, Artificial Sequence
  Synthetic oligonucleotide
tatgagccgccggcgcgttttacaagtcacggcta

SEQ ID NO: 11989 - DNA, 35 bp, Artificial Sequence
  Synthetic oligonucleotide
tcacgcaaagaggctaggttaaattaactcgatcc

SEQ ID NO: 11990 - DNA, 36 bp, Artificial Sequence
  Synthetic oligonucleotide
tcgatagtcgagaaaaatatctacttccgggaaaga

SEQ ID NO: 11991 - DNA, 36 bp, Artificial Sequence
  Synthetic oligonucleotide
tcgctgactccatgtgggctgagaaagactgtccaa

SEQ ID NO: 11992 - DNA, 36 bp, Artificial Sequence
  Synthetic oligonucleotide
tgagtgctagtcccaagtgcgccccccgtatgtgca

SEQ ID NO: 11993 - DNA, 36 bp, Artificial Sequence
  Synthetic oligonucleotide
tgcgcgcacccccggcttcggtaccctctcgcagta

SEQ ID NO: 11994 - DNA, 33 bp, Artificial Sequence
  Synthetic oligonucleotide
tggatccatacggccaatcagaaagcagtgatg

SEQ ID NO: 11995 - DNA, 35 bp, Artificial Sequence
  Synthetic oligonucleotide
tgggcgttcctatcatgtacaggaggatcacagaa

SEQ ID NO: 11996 - DNA, 35 bp, Artificial Sequence
  Synthetic oligonucleotide
tgtgagttgacctgatgatcataggggggtaagga

SEQ ID NO: 11997 - DNA, 38 bp, Artificial Sequence
  Synthetic oligonucleotide
ttagaaggacaatggcaggatcacctcacatctcttga

SEQ ID NO: 11998 - DNA, 35 bp, Artificial Sequence
  Synthetic oligonucleotide
ttatgtcgcgttatgcgaaagagaagcggagagtt

SEQ ID NO: 11999 - DNA, 38 bp, Artificial Sequence
  Synthetic oligonucleotide
ttcgacacggttattatgcttctgaggcgaaacgatga

SEQ ID NO: 12000 - DNA, 38 bp, Artificial Sequence
  Synthetic oligonucleotide
ttcgtaccgacgactgcggatctaaaatcaatgagtga

SEQ ID NO: 12001 - DNA, 35 bp, Artificial Sequence
  Synthetic oligonucleotide
ttgaacaaattaccctaaggtttgcacgtgcttgc

SEQ ID NO: 12002 - DNA, 37 bp, Artificial Sequence
  Synthetic oligonucleotide
ttggtaccgggccttacgttgataataacctggtcga

SEQ ID NO: 12003 - DNA, 35 bp, Artificial Sequence
  Synthetic oligonucleotide
tttgcccgcgggagacttccgagtgcctgtgagta

SEQ ID NO: 12004 - DNA, 36 bp, Artificial Sequence
  Synthetic oligonucleotide
tccatggaggtactggtacgtattggggtcttacaa

SEQ ID NO: 12005 - DNA, 36 bp, Artificial Sequence
  Synthetic oligonucleotide
aaagtcgtacccgactcgattggaggataggggtga

SEQ ID NO: 12006 - DNA, 35 bp, Artificial Sequence
  Synthetic oligonucleotide
aaagtgggtcccttcgtattccaacatggctttga

SEQ ID NO: 12007 - DNA, 37 bp, Artificial Sequence
  Synthetic oligonucleotide
aacggcgaaacgaggattggtgtctgagttcggacga

SEQ ID NO: 12008 - DNA, 36 bp, Artificial Sequence
  Synthetic oligonucleotide
acgcttggcgagaacacgataggttaagttggtata

SEQ ID NO: 12009 - DNA, 35 bp, Artificial Sequence
  Synthetic oligonucleotide
actctgctccccttccttactgctgtctgtgaggc

SEQ ID NO: 12010 - DNA, 37 bp, Artificial Sequence
  Synthetic oligonucleotide
gaaaacccgtgactagtatggtatctagagactcaga

SEQ ID NO: 12011 - DNA, 35 bp, Artificial Sequence
  Synthetic oligonucleotide
gaacagtcagtttcttgggttgtcagttggctctc

SEQ ID NO: 12012 - DNA, 38 bp, Artificial Sequence
  Synthetic oligonucleotide
gacgtagattgcagaaacaaactgcgtcggattgatga

SEQ ID NO: 12013 - DNA, 35 bp, Artificial Sequence
  Synthetic oligonucleotide
gagccgtgaccagataagtcttattttaggccatc

SEQ ID NO: 12014 - DNA, 36 bp, Artificial Sequence
  Synthetic oligonucleotide
gagtcgcgtactgattatctgccagtcgactacgga

SEQ ID NO: 12015 - DNA, 35 bp, Artificial Sequence
  Synthetic oligonucleotide
gcccactgagcgggttacgtcacaggtggggtacg

SEQ ID NO: 12016 - DNA, 37 bp, Artificial Sequence
  Synthetic oligonucleotide
ggacagtaagcgtgtcctacgttactcagggggctga

SEQ ID NO: 12017 - DNA, 37 bp, Artificial Sequence
  Synthetic oligonucleotide
ggagaaccataacagtactatgtgaatagaacggtga

SEQ ID NO: 12018 - DNA, 37 bp, Artificial Sequence
  Synthetic oligonucleotide
ggagaacctcatctgcagcaacgcggctgacattgga

SEQ ID NO: 12019 - DNA, 35 bp, Artificial Sequence
  Synthetic oligonucleotide
gggtggaccgtagattagattcacacgctttgagg

SEQ ID NO: 12020 - DNA, 38 bp, Artificial Sequence
  Synthetic oligonucleotide
ggtcctggggaccatctgttactttgccgattgtttga

SEQ ID NO: 12021 - DNA, 35 bp, Artificial Sequence
  Synthetic oligonucleotide
ggtggtacgcatctgaacggtaaatggcccggggc

SEQ ID NO: 12022 - DNA, 37 bp, Artificial Sequence
  Synthetic oligonucleotide
gtaaatgaactagcgcttgaggctagaggcgaaatga

SEQ ID NO: 12023 - DNA, 38 bp, Artificial Sequence
  Synthetic oligonucleotide
gtaactggcgttcctcgttggagcccacaaggctttga

SEQ ID NO: 12024 - DNA, 37 bp, Artificial Sequence
  Synthetic oligonucleotide
taaggcaaaacaagggcgcgttaaggataaggggaga

SEQ ID NO: 12025 - DNA, 37 bp, Artificial Sequence
  Synthetic oligonucleotide
tagacgcttcatgtaccggttttgaaaccccgccaga

SEQ ID NO: 12026 - DNA, 34 bp, Artificial Sequence
  Synthetic oligonucleotide
tatcgctgctaaatcgctagctcacaaaatctta

SEQ ID NO: 12027 - DNA, 38 bp, Artificial Sequence
  Synthetic oligonucleotide
tcgtacgcttgtctcatttctttcaaggagggttgtga

SEQ ID NO: 12028 - DNA, 38 bp, Artificial Sequence
  Synthetic oligonucleotide
tcgtgagctgaggttagaaacactgcaggataggttga

SEQ ID NO: 12029 - DNA, 36 bp, Artificial Sequence
  Synthetic oligonucleotide
tgaccaagttgtacggtatacaggtggtgttgcgca

SEQ ID NO: 12030 - DNA, 37 bp, Artificial Sequence
  Synthetic oligonucleotide
tgcacaacacaaatttagtggggcggtcacgatacga

SEQ ID NO: 12031 - DNA, 38 bp, Artificial Sequence
  Synthetic oligonucleotide
ttgcgctttgattgagttatacgggcgcaaaagactga

SEQ ID NO: 12032 - DNA, 35 bp, Artificial Sequence
  Synthetic oligonucleotide
ttggctcggaacaactaagagtctgcaacggagac

SEQ ID NO: 12033 - DNA, 36 bp, Artificial Sequence
  Synthetic oligonucleotide
tttaaggaagctatggctctgggcgatcgttagtca

SEQ ID NO: 12034 - DNA, 36 bp, Artificial Sequence
  Synthetic oligonucleotide
actctgacgactgtgggccgacatgagacgagtata

SEQ ID NO: 12035 - DNA, 36 bp, Artificial Sequence
  Synthetic oligonucleotide
gtgctacctgcccaaaatgcacaaggtcgtgaggta

SEQ ID NO: 12036 - DNA, 37 bp, Artificial Sequence
  Synthetic oligonucleotide
aaacctacgtgccgccatatgatttccatggagacga

SEQ ID NO: 12037 - DNA, 35 bp, Artificial Sequence
  Synthetic oligonucleotide
aaccaactggaacagtggaatgaatcgagccggtg

SEQ ID NO: 12038 - DNA, 38 bp, Artificial Sequence
  Synthetic oligonucleotide
agcggagcatccgggctcatgcaaccgggcgtccctga

SEQ ID NO: 12039 - DNA, 38 bp, Artificial Sequence
  Synthetic oligonucleotide
agtacgtgattcgggtcatgtggtatagtagcatttga

SEQ ID NO: 12040 - DNA, 37 bp, Artificial Sequence
  Synthetic oligonucleotide
agtggcgtagtcatgtgggtaaatgtgaacatagcga

SEQ ID NO: 12041 - DNA, 35 bp, Artificial Sequence
  Synthetic oligonucleotide
atgaacgggcgttggtgcgggcgttaataagtcct

SEQ ID NO: 12042 - DNA, 38 bp, Artificial Sequence
  Synthetic oligonucleotide
attatgtctatcgtactgtgtcagccaccatggtctga

SEQ ID NO: 12043 - DNA, 35 bp, Artificial Sequence
  Synthetic oligonucleotide
ctttgatactcgaatgggttgcacagtacgaccgc

SEQ ID NO: 12044 - DNA, 38 bp, Artificial Sequence
  Synthetic oligonucleotide
ggacactgggagggtgaaaaggccttagtctcctttga

SEQ ID NO: 12045 - DNA, 35 bp, Artificial Sequence
  Synthetic oligonucleotide
gtacccccagattgaagaatatggacttgtaggat

SEQ ID NO: 12046 - DNA, 38 bp, Artificial Sequence
  Synthetic oligonucleotide
tgtggattattacctgagcacttaaactcgctgagtga

SEQ ID NO: 12047 - DNA, 38 bp, Artificial Sequence
  Synthetic oligonucleotide
ttgcgatgcgagtccatcttaagtgtataggccggtga

SEQ ID NO: 12048 - DNA, 35 bp, Artificial Sequence
  Synthetic oligonucleotide
gtcgttgtaagtagtaagacgttgcgaagatggag

SEQ ID NO: 12049 - DNA, 35 bp, Artificial Sequence
  Synthetic oligonucleotide
tcactgaaaagttgtgtgggcactgccttaaaggg

SEQ ID NO: 12050 - DNA, 35 bp, Artificial Sequence
  Synthetic oligonucleotide
aaaactagtgctagcatgacttccaacagtcccac

SEQ ID NO: 12051 - DNA, 38 bp, Artificial Sequence
  Synthetic oligonucleotide
aaatgtacgcgcagtcgttatgcgttcacgatgactga

SEQ ID NO: 12052 - DNA, 35 bp, Artificial Sequence
  Synthetic oligonucleotide
actgtatgggtgcagtatccgtgttggatgttttg

SEQ ID NO: 12053 - DNA, 35 bp, Artificial Sequence
  Synthetic oligonucleotide
agccctgtaatcattggatacaaggttaaaaacag

SEQ ID NO: 12054 - DNA, 37 bp, Artificial Sequence
  Synthetic oligonucleotide
atagcaacacattgcgcgatacgatactccgtgggga

SEQ ID NO: 12055 - DNA, 35 bp, Artificial Sequence
  Synthetic oligonucleotide
cgacctgcccccccctcgacgatagggaggccgca

SEQ ID NO: 12056 - DNA, 38 bp, Artificial Sequence
  Synthetic oligonucleotide
gtcgcacgacacgtgcctagggaagtgattactactga

SEQ ID NO: 12057 - DNA, 35 bp, Artificial Sequence
  Synthetic oligonucleotide
taacggaagagagccaaaggagtttgaagtggtgc

SEQ ID NO: 12058 - DNA, 35 bp, Artificial Sequence
  Synthetic oligonucleotide
aaaaatccggcacctgtgtcgaagtacgttgactt

SEQ ID NO: 12059 - DNA, 37 bp, Artificial Sequence
  Synthetic oligonucleotide
aaatgggctagcatcctgaaatgttagtatcttccga

SEQ ID NO: 12060 - DNA, 35 bp, Artificial Sequence
  Synthetic oligonucleotide
aactcgataaagaaggcctatagattacttttgca

SEQ ID NO: 12061 - DNA, 37 bp, Artificial Sequence
  Synthetic oligonucleotide
aactgcgatgtcgtagggtaaggttgatagaacggga

SEQ ID NO: 12062 - DNA, 36 bp, Artificial Sequence
  Synthetic oligonucleotide
aaggtgtcgggataagtcccattgcgggcctgctaa

SEQ ID NO: 12063 - DNA, 36 bp, Artificial Sequence
  Synthetic oligonucleotide
aagtggggagttgtattaagtgagtgcgtgtaagga

SEQ ID NO: 12064 - DNA, 35 bp, Artificial Sequence
  Synthetic oligonucleotide
aattgaaacatgtccctccgaagcgccacgcacgt

SEQ ID NO: 12065 - DNA, 36 bp, Artificial Sequence
  Synthetic oligonucleotide
aattgaccgcatgaagtattcggctcacattacgaa

SEQ ID NO: 12066 - DNA, 36 bp, Artificial Sequence
  Synthetic oligonucleotide
acacagggcttaaccgcacaccgcaattggtacgaa

SEQ ID NO: 12067 - DNA, 36 bp, Artificial Sequence
  Synthetic oligonucleotide
acatggggggatagactatttgaagagggtaagtga

SEQ ID NO: 12068 - DNA, 35 bp, Artificial Sequence
  Synthetic oligonucleotide
accaaatagggtagggttctaagtacggcgtaggg

SEQ ID NO: 12069 - DNA, 37 bp, Artificial Sequence
  Synthetic oligonucleotide
accggccgtttattcataaatccagcgatgtccgcga

SEQ ID NO: 12070 - DNA, 38 bp, Artificial Sequence
  Synthetic oligonucleotide
acctgcagacccgagtatgggtgtacagatgagactga

SEQ ID NO: 12071 - DNA, 37 bp, Artificial Sequence
  Synthetic oligonucleotide
acgagccagtgactacgccagataaaggcgatgctga

SEQ ID NO: 12072 - DNA, 35 bp, Artificial Sequence
  Synthetic oligonucleotide
acgcaagtaaacgcaaggacggcctgccacataag

SEQ ID NO: 12073 - DNA, 35 bp, Artificial Sequence
  Synthetic oligonucleotide
acgtaggggtcacccagcagacatgtggtaatcat

SEQ ID NO: 12074 - DNA, 36 bp, Artificial Sequence
  Synthetic oligonucleotide
acgtatccaggtggtaaggtatgtttccgccctgca

SEQ ID NO: 12075 - DNA, 36 bp, Artificial Sequence
  Synthetic oligonucleotide
actctgtcgcagtaggatgcacgattcgggtcggga

SEQ ID NO: 12076 - DNA, 35 bp, Artificial Sequence
  Synthetic oligonucleotide
actgcattgtagttcctttagtaaggattcaccgg

SEQ ID NO: 12077 - DNA, 38 bp, Artificial Sequence
  Synthetic oligonucleotide
acttacggctccagcgatgcttttaattctgtctctga

SEQ ID NO: 12078 - DNA, 36 bp, Artificial Sequence
  Synthetic oligonucleotide
agcctgtggggatcgtgctgctactcgaacctgtta

SEQ ID NO: 12079 - DNA, 37 bp, Artificial Sequence
  Synthetic oligonucleotide
agcgagagtaggtgagcacgatgcagattacagtgga

SEQ ID NO: 12080 - DNA, 35 bp, Artificial Sequence
  Synthetic oligonucleotide
agcggagtgacctaaggtagaaacgcgcgggtgta

SEQ ID NO: 12081 - DNA, 38 bp, Artificial Sequence
  Synthetic oligonucleotide
agctcccgtaactggattcagagctgcttatacattga

SEQ ID NO: 12082 - DNA, 37 bp, Artificial Sequence
  Synthetic oligonucleotide
aggactgtggatatgcattactgactggaaacgcgga

SEQ ID NO: 12083 - DNA, 36 bp, Artificial Sequence
  Synthetic oligonucleotide
aggcggaaggctaacgttacattccctaccgaacgg

SEQ ID NO: 12084 - DNA, 35 bp, Artificial Sequence
  Synthetic oligonucleotide
agtcaaagttatcgtaaaccgagtttaagctccgt

SEQ ID NO: 12085 - DNA, 35 bp, Artificial Sequence
  Synthetic oligonucleotide
ataaacccaggttgtttaggctatagccaacgcat

SEQ ID NO: 12086 - DNA, 36 bp, Artificial Sequence
  Synthetic oligonucleotide
atgagactaactgcatattgggcgtgagtctggcca

SEQ ID NO: 12087 - DNA, 35 bp, Artificial Sequence
  Synthetic oligonucleotide
atgctcgcgagcgcatacgttgtaggcgtatgtta

SEQ ID NO: 12088 - DNA, 38 bp, Artificial Sequence
  Synthetic oligonucleotide
atggagcacagatttagatcttatcggattggccctga

SEQ ID NO: 12089 - DNA, 35 bp, Artificial Sequence
  Synthetic oligonucleotide
atggagcatttggtggctagtacctatgtagagcg

SEQ ID NO: 12090 - DNA, 37 bp, Artificial Sequence
  Synthetic oligonucleotide
atgtgagtgctgcccaagaccactctgacgttgatga

SEQ ID NO: 12091 - DNA, 38 bp, Artificial Sequence
  Synthetic oligonucleotide
atgttttgcaatactcgtagcgccgttctttttggtga

SEQ ID NO: 12092 - DNA, 37 bp, Artificial Sequence
  Synthetic oligonucleotide
caaactgttgtttggacaggccaaggagtttgacgga

SEQ ID NO: 12093 - DNA, 36 bp, Artificial Sequence
  Synthetic oligonucleotide
ccagtctcgttgttggagggggtttattggacgcta

SEQ ID NO: 12094 - DNA, 37 bp, Artificial Sequence
  Synthetic oligonucleotide
cccatgctgatgggatgcgttcgaactcccttcgtga

SEQ ID NO: 12095 - DNA, 36 bp, Artificial Sequence
  Synthetic oligonucleotide
gaacgagataggccgagattgatgttgtccgcacta

SEQ ID NO: 12096 - DNA, 37 bp, Artificial Sequence
  Synthetic oligonucleotide
gaacgcgagaatcacaggagaagtagtgattataaga

SEQ ID NO: 12097 - DNA, 38 bp, Artificial Sequence
  Synthetic oligonucleotide
gaactgtcggagaggagtccttggagagcgccccttga

SEQ ID NO: 12098 - DNA, 35 bp, Artificial Sequence
  Synthetic oligonucleotide
gaagggtagtgctactgttgtagggttaagacaag

SEQ ID NO: 12099 - DNA, 36 bp, Artificial Sequence
  Synthetic oligonucleotide
gaccagggtgtacctaggatacgacgcgttgaaaga

SEQ ID NO: 12100 - DNA, 35 bp, Artificial Sequence
  Synthetic oligonucleotide
gacggtcctgttcgttccctggtggagtaattggc

SEQ ID NO: 12101 - DNA, 36 bp, Artificial Sequence
  Synthetic oligonucleotide
gacgttaaggggtatttatgttggtccgtgtcttca

SEQ ID NO: 12102 - DNA, 37 bp, Artificial Sequence
  Synthetic oligonucleotide
gagtggttataccggactgtgagctgcatcggacgga

SEQ ID NO: 12103 - DNA, 38 bp, Artificial Sequence
  Synthetic oligonucleotide
gatttcgtggctctgggaggatttctaggacacaatga

SEQ ID NO: 12104 - DNA, 35 bp, Artificial Sequence
  Synthetic oligonucleotide
gcacaaattccgtatactggctctccacctgcaag

SEQ ID NO: 12105 - DNA, 38 bp, Artificial Sequence
  Synthetic oligonucleotide
gcccaaaagatttgtccttaagccaagtcgtctcatga

SEQ ID NO: 12106 - DNA, 37 bp, Artificial Sequence
  Synthetic oligonucleotide
gcccaggtcgtactcgttgcgttagggcatggactga

SEQ ID NO: 12107 - DNA, 38 bp, Artificial Sequence
  Synthetic oligonucleotide
gcctgttacgaaaaagacagggagcggataccggctga

SEQ ID NO: 12108 - DNA, 37 bp, Artificial Sequence
  Synthetic oligonucleotide
gcgctcatactctgacttttaaatgacgagagtggga

SEQ ID NO: 12109 - DNA, 37 bp, Artificial Sequence
  Synthetic oligonucleotide
gctatgggatacgtaatggggagtaagccccatgcga

SEQ ID NO: 12110 - DNA, 35 bp, Artificial Sequence
  Synthetic oligonucleotide
ggaacactgtactagccgggttacaactaagtgtg

SEQ ID NO: 12111 - DNA, 37 bp, Artificial Sequence
  Synthetic oligonucleotide
ggcttagtcatcatccaggtctaggcttctgatccga

SEQ ID NO: 12112 - DNA, 36 bp, Artificial Sequence
  Synthetic oligonucleotide
ggggaatactgttgatcgttgtattagggagggaga

SEQ ID NO: 12113 - DNA, 36 bp, Artificial Sequence
  Synthetic oligonucleotide
gtaaggtgcgcagtccaaggcataccatttggagca

SEQ ID NO: 12114 - DNA, 37 bp, Artificial Sequence
  Synthetic oligonucleotide
gtaggtgtctcatgctcgactcagctgcccggtagga

SEQ ID NO: 12115 - DNA, 35 bp, Artificial Sequence
  Synthetic oligonucleotide
gtatggaattcctcagttgtaaagggaatgttcga

SEQ ID NO: 12116 - DNA, 38 bp, Artificial Sequence
  Synthetic oligonucleotide
gtatggggatgctaaattactgtaactcggcgaattga

SEQ ID NO: 12117 - DNA, 35 bp, Artificial Sequence
  Synthetic oligonucleotide
gtcctggctacttacaaaaggggggttccccgttc

SEQ ID NO: 12118 - DNA, 37 bp, Artificial Sequence
  Synthetic oligonucleotide
gtgactgggagtgggaaaatcggatggggataacgga

SEQ ID NO: 12119 - DNA, 36 bp, Artificial Sequence
  Synthetic oligonucleotide
gtgatttacgaagatgtatccaacgtctggttggaa

SEQ ID NO: 12120 - DNA, 36 bp, Artificial Sequence
  Synthetic oligonucleotide
gtgcgatgtaagctcgtttcctaacgcgctatcgca

SEQ ID NO: 12121 - DNA, 36 bp, Artificial Sequence
  Synthetic oligonucleotide
gtgtcggataaagcgcccttttggccgtgacgttca

SEQ ID NO: 12122 - DNA, 36 bp, Artificial Sequence
  Synthetic oligonucleotide
gttgaaccaatgctcgtgcctacacgctccatctaa

SEQ ID NO: 12123 - DNA, 37 bp, Artificial Sequence
  Synthetic oligonucleotide
gttgagttgtgctccagtgaagcgacctcatggtgga

SEQ ID NO: 12124 - DNA, 35 bp, Artificial Sequence
  Synthetic oligonucleotide
taaggcccaagtgatctgcggttctacgggaaggc

SEQ ID NO: 12125 - DNA, 36 bp, Artificial Sequence
  Synthetic oligonucleotide
taatccggacttgttgtgcctgctgagcagtataga

SEQ ID NO: 12126 - DNA, 37 bp, Artificial Sequence
  Synthetic oligonucleotide
taccacacacggacgatcctgtattatgtgttgcaga

SEQ ID NO: 12127 - DNA, 36 bp, Artificial Sequence
  Synthetic oligonucleotide
tacggcggagcacgagtaacttattaagtaggttta

SEQ ID NO: 12128 - DNA, 37 bp, Artificial Sequence
  Synthetic oligonucleotide
tacgggaatccttggttgtcgctgacgcatcctttga

SEQ ID NO: 12129 - DNA, 36 bp, Artificial Sequence
  Synthetic oligonucleotide
tacgtaggttaacctacctgtttcccaaggtcaata

SEQ ID NO: 12130 - DNA, 36 bp, Artificial Sequence
  Synthetic oligonucleotide
tagatcgtgcagtcagcggttgataccggaataaaa

SEQ ID NO: 12131 - DNA, 38 bp, Artificial Sequence
  Synthetic oligonucleotide
tagcatgccaggatgctagccaccttatgtattcttga

SEQ ID NO: 12132 - DNA, 37 bp, Artificial Sequence
  Synthetic oligonucleotide
tagcgagaggcgctaagccgtactcgggtggacatga

SEQ ID NO: 12133 - DNA, 38 bp, Artificial Sequence
  Synthetic oligonucleotide
taggtccctgccctttgtattcagttctctgaccatga

SEQ ID NO: 12134 - DNA, 38 bp, Artificial Sequence
  Synthetic oligonucleotide
tatcgacggagcgcatagcgaagtcgatctcaacttga

SEQ ID NO: 12135 - DNA, 38 bp, Artificial Sequence
  Synthetic oligonucleotide
tatgtccaacgatagcggacggacgtatcacattttga

SEQ ID NO: 12136 - DNA, 35 bp, Artificial Sequence
  Synthetic oligonucleotide
tccccagtgtaatagaggggggttaagagttggag

SEQ ID NO: 12137 - DNA, 37 bp, Artificial Sequence
  Synthetic oligonucleotide
tcgtaagcagtcagagttggtggcaaatatcattgga

SEQ ID NO: 12138 - DNA, 35 bp, Artificial Sequence
  Synthetic oligonucleotide
tcgtcaagtgtaagcacaccccggacctactagca

SEQ ID NO: 12139 - DNA, 37 bp, Artificial Sequence
  Synthetic oligonucleotide
tctccccccattctcggtgggtaattagaggaaacga

SEQ ID NO: 12140 - DNA, 36 bp, Artificial Sequence
  Synthetic oligonucleotide
tcttggctggaactctattacaccacgtaccacgca

SEQ ID NO: 12141 - DNA, 35 bp, Artificial Sequence
  Synthetic oligonucleotide
tgcttgcgactcagaagtagatagcatgccctgta

SEQ ID NO: 12142 - DNA, 35 bp, Artificial Sequence
  Synthetic oligonucleotide
tggacgggtggttaggtcgtccaataaggacaggc

SEQ ID NO: 12143 - DNA, 38 bp, Artificial Sequence
  Synthetic oligonucleotide
tgggtctattgctccacgtctttaggtagtcatagtga

SEQ ID NO: 12144 - DNA, 38 bp, Artificial Sequence
  Synthetic oligonucleotide
tgtctcccgtcacgtgtgaatttgagatttgcgtttga

SEQ ID NO: 12145 - DNA, 37 bp, Artificial Sequence
  Synthetic oligonucleotide
ttacgaggcgagggctgtggtcgttgatatagtcaga

SEQ ID NO: 12146 - DNA, 35 bp, Artificial Sequence
  Synthetic oligonucleotide
ttagtctagctggactaagggggcgttacaaagtt

SEQ ID NO: 12147 - DNA, 36 bp, Artificial Sequence
  Synthetic oligonucleotide
ttatacgcacaaaaagcggctcggggggctaccgca

SEQ ID NO: 12148 - DNA, 35 bp, Artificial Sequence
  Synthetic oligonucleotide
ttattagtcgttgaagtggttttcacagggtgtag

SEQ ID NO: 12149 - DNA, 37 bp, Artificial Sequence
  Synthetic oligonucleotide
ttccacgccctcacgatagtaatggagacaactgaga

SEQ ID NO: 12150 - DNA, 35 bp, Artificial Sequence
  Synthetic oligonucleotide
ttgacaacgtgagagtcgtgatggccccgccccaa

SEQ ID NO: 12151 - DNA, 38 bp, Artificial Sequence
  Synthetic oligonucleotide
ttgataccctttacacgggaatctgtcggtgattatga

SEQ ID NO: 12152 - DNA, 35 bp, Artificial Sequence
  Synthetic oligonucleotide
tttgccttgtaagcgtgttactgcattgtaaccac

SEQ ID NO: 12153 - DNA, 36 bp, Artificial Sequence
  Synthetic oligonucleotide
tttggccaagtttatcagttggaatggtttgaaaaa

SEQ ID NO: 12154 - DNA, 38 bp, Artificial Sequence
  Synthetic oligonucleotide
agagcgccatgtcaccgcataatggccttaggctatga

SEQ ID NO: 12155 - DNA, 37 bp, Artificial Sequence
  Synthetic oligonucleotide
tgtacggtctcctcatcgtctttgttttttagggcga

SEQ ID NO: 12156 - DNA, 37 bp, Artificial Sequence
  Synthetic oligonucleotide
gacatagtacatggttggaacagtggtccattaagga

SEQ ID NO: 12157 - DNA, 36 bp, Artificial Sequence
  Synthetic oligonucleotide
gcccagtcataagtcctttctctccgggttggaaaa

SEQ ID NO: 12158 - DNA, 38 bp, Artificial Sequence
  Synthetic oligonucleotide
tcctccgtcgcagatactgccgagcacccccggtctga

SEQ ID NO: 12159 - DNA, 38 bp, Artificial Sequence
  Synthetic oligonucleotide
gcctggaccctgggaactccctagtactgccgggatga

SEQ ID NO: 12160 - DNA, 36 bp, Artificial Sequence
  Synthetic oligonucleotide
ggccaccacgcaagtgaaaccgcccgcttccccgta

SEQ ID NO: 12161 - DNA, 38 bp, Artificial Sequence
  Synthetic oligonucleotide
acgtggccattcatataggtataaaaggacccagttga

SEQ ID NO: 12162 - DNA, 38 bp, Artificial Sequence
  Synthetic oligonucleotide
actggtcacctgtgaacacggtgacgtgggtgggctga

SEQ ID NO: 12163 - DNA, 36 bp, Artificial Sequence
  Synthetic oligonucleotide
atagggacgaagttgggcgtgactttgaggaggata

SEQ ID NO: 12164 - DNA, 37 bp, Artificial Sequence
  Synthetic oligonucleotide
atagggaggtgtggatcctacaatttcaggtgtgaga

SEQ ID NO: 12165 - DNA, 37 bp, Artificial Sequence
  Synthetic oligonucleotide
gaaatcgattcgaagcgaccgaactgcatgtcaacga

SEQ ID NO: 12166 - DNA, 35 bp, Artificial Sequence
  Synthetic oligonucleotide
gacgggtcaaccttcggtcttaacggtgcttaatg

SEQ ID NO: 12167 - DNA, 35 bp, Artificial Sequence
  Synthetic oligonucleotide
gatcaagaactaatgtattctggggcgtcctgcac

SEQ ID NO: 12168 - DNA, 37 bp, Artificial Sequence
  Synthetic oligonucleotide
gcatgtagggtctaacagccccgacacaccggtggga

SEQ ID NO: 12169 - DNA, 36 bp, Artificial Sequence
  Synthetic oligonucleotide
gggtgcaacggcattagcatatttaatggtgtcaga

SEQ ID NO: 12170 - DNA, 38 bp, Artificial Sequence
  Synthetic oligonucleotide
ggtttgcatccgagggcaccagttaccatcttctgtga

SEQ ID NO: 12171 - DNA, 35 bp, Artificial Sequence
  Synthetic oligonucleotide
tatcaaggcttgtcgagatatctatcgagcgcatg

SEQ ID NO: 12172 - DNA, 36 bp, Artificial Sequence
  Synthetic oligonucleotide
tgggtgtcgggggggacacgcagctttgtaaagtta

SEQ ID NO: 12173 - DNA, 38 bp, Artificial Sequence
  Synthetic oligonucleotide
accactttcgtaaggtatggtgggagtgacgtacttga

SEQ ID NO: 12174 - DNA, 35 bp, Artificial Sequence
  Synthetic oligonucleotide
tatggggcccgggagtatggccgtgtgcaagggtg

SEQ ID NO: 12175 - DNA, 36 bp, Artificial Sequence
  Synthetic oligonucleotide
aaaggacggactttctggtcactcccgctgcagtta

SEQ ID NO: 12176 - DNA, 38 bp, Artificial Sequence
  Synthetic oligonucleotide
aacccataggcgtttcaggcttcagcgcatacatatga

SEQ ID NO: 12177 - DNA, 38 bp, Artificial Sequence
  Synthetic oligonucleotide
aatagctaaggagattctgagctacgtctttgacgtga

SEQ ID NO: 12178 - DNA, 38 bp, Artificial Sequence
  Synthetic oligonucleotide
aatgtcgaggcttttgactagtgcacggactagcttga

SEQ ID NO: 12179 - DNA, 37 bp, Artificial Sequence
  Synthetic oligonucleotide
accctgaaccaatccgggcatgtcaaacttgcatgga

SEQ ID NO: 12180 - DNA, 38 bp, Artificial Sequence
  Synthetic oligonucleotide
actgcaagtggacaaaacggcgccaccgcaagtgctga

SEQ ID NO: 12181 - DNA, 37 bp, Artificial Sequence
  Synthetic oligonucleotide
atcttacagccttgatgtaaaccaatgaaatgaagga

SEQ ID NO: 12182 - DNA, 35 bp, Artificial Sequence
  Synthetic oligonucleotide
ccaagttccgcgtggttataagcttgccaccggtc

SEQ ID NO: 12183 - DNA, 34 bp, Artificial Sequence
  Synthetic oligonucleotide
ctaaccaaggcaagggaaactggacacgtaactt

SEQ ID NO: 12184 - DNA, 35 bp, Artificial Sequence
  Synthetic oligonucleotide
ctgccgagttgggttagctgcagtctgttgggatg

SEQ ID NO: 12185 - DNA, 38 bp, Artificial Sequence
  Synthetic oligonucleotide
gaaggaccaccgaacattggtgggttctactaggctga

SEQ ID NO: 12186 - DNA, 35 bp, Artificial Sequence
  Synthetic oligonucleotide
gaaggcctagagacgcacgtgtgtactggtatacg

SEQ ID NO: 12187 - DNA, 37 bp, Artificial Sequence
  Synthetic oligonucleotide
gacatccggcgttatgggtgcactacctgagatgcga

SEQ ID NO: 12188 - DNA, 38 bp, Artificial Sequence
  Synthetic oligonucleotide
gaggggaccgggagatgtagggatggccaccgggatga

SEQ ID NO: 12189 - DNA, 35 bp, Artificial Sequence
  Synthetic oligonucleotide
gagtattttaacccgtagttcgaatcgaggacgga

SEQ ID NO: 12190 - DNA, 38 bp, Artificial Sequence
  Synthetic oligonucleotide
gatgcttgcgtgtcagtgcttaaaacacacgctggtga

SEQ ID NO: 12191 - DNA, 38 bp, Artificial Sequence
  Synthetic oligonucleotide
gattcaatggagcgggaatacgtacagttgacaattga

SEQ ID NO: 12192 - DNA, 36 bp, Artificial Sequence
  Synthetic oligonucleotide
gattgtctccgggctgtagtgagcaaagaagtataa

SEQ ID NO: 12193 - DNA, 37 bp, Artificial Sequence
  Synthetic oligonucleotide
gctgacgcagtctgcattacgaaagtagaaccttgga

SEQ ID NO: 12194 - DNA, 35 bp, Artificial Sequence
  Synthetic oligonucleotide
ggaggggctttttgacaggagtagcattatagttg

SEQ ID NO: 12195 - DNA, 35 bp, Artificial Sequence
  Synthetic oligonucleotide
gtcgtttgtcgttggtgtagtgcggtcacgtattg

SEQ ID NO: 12196 - DNA, 37 bp, Artificial Sequence
  Synthetic oligonucleotide
gttgcatcacttaatctcttggacggtatcctgccga

SEQ ID NO: 12197 - DNA, 38 bp, Artificial Sequence
  Synthetic oligonucleotide
taactgctcgcatggcgctaaacaccggggatgtgtga

SEQ ID NO: 12198 - DNA, 35 bp, Artificial Sequence
  Synthetic oligonucleotide
taccatggtctcttttgaggcttccggaagggtat

SEQ ID NO: 12199 - DNA, 38 bp, Artificial Sequence
  Synthetic oligonucleotide
tattgacgccgctgtaagagattgccagaacctctaga

SEQ ID NO: 12200 - DNA, 36 bp, Artificial Sequence
  Synthetic oligonucleotide
tgactgcggttggcgcccaaaacaacgagcctacta

SEQ ID NO: 12201 - DNA, 38 bp, Artificial Sequence
  Synthetic oligonucleotide
tgccagagataacggggtcgaagttatagaccctttga

SEQ ID NO: 12202 - DNA, 37 bp, Artificial Sequence
  Synthetic oligonucleotide
tgccattgccaacgtggtggagcagtgctttggttga

SEQ ID NO: 12203 - DNA, 36 bp, Artificial Sequence
  Synthetic oligonucleotide
ttaccgtgcgcggggtttgcaagagagcaaatggta

SEQ ID NO: 12204 - DNA, 38 bp, Artificial Sequence
  Synthetic oligonucleotide
ttcgtcatgtcgatcgaccaggattctctcgtaggtga

SEQ ID NO: 12205 - DNA, 36 bp, Artificial Sequence
  Synthetic oligonucleotide
tttgggtcaatgaaccctccagtgtgttactgacta

SEQ ID NO: 12206 - DNA, 35 bp, Artificial Sequence
  Synthetic oligonucleotide
gacttcgacactagttcatggtgccatgtgtaacg

SEQ ID NO: 12207 - DNA, 35 bp, Artificial Sequence
  Synthetic oligonucleotide
tgactggtgcatgggtgcacaaggttccacgactg

SEQ ID NO: 12208 - DNA, 36 bp, Artificial Sequence
  Synthetic oligonucleotide
aagtacgcctggggggctcctccgcattagatttaa

SEQ ID NO: 12209 - DNA, 35 bp, Artificial Sequence
  Synthetic oligonucleotide
aatactggaggtcagttaaaatttgataacgcaag

SEQ ID NO: 12210 - DNA, 38 bp, Artificial Sequence
  Synthetic oligonucleotide
gcaactagtctagtcatgaatccatgtctgtaggctga

SEQ ID NO: 12211 - DNA, 37 bp, Artificial Sequence
  Synthetic oligonucleotide
ggtaagttgggagatgttaggagtcgcaccaaggtga

SEQ ID NO: 12212 - DNA, 36 bp, Artificial Sequence
  Synthetic oligonucleotide
ggtcaagacgcagccgataatgaggctggcgcccta

SEQ ID NO: 12213 - DNA, 35 bp, Artificial Sequence
  Synthetic oligonucleotide
gtgcgcctcccactcatgcgttttattcaaggata

SEQ ID NO: 12214 - DNA, 35 bp, Artificial Sequence
  Synthetic oligonucleotide
tcaagctgcaaatattttcgaggcgaagtatgaag

SEQ ID NO: 12215 - DNA, 37 bp, Artificial Sequence
  Synthetic oligonucleotide
ttggttgtctgccctcaccgagtttaagctagggcga

SEQ ID NO: 12216 - DNA, 38 bp, Artificial Sequence
  Synthetic oligonucleotide
gaaccgtgcgattgctccgggttacaagcgctccgtga

SEQ ID NO: 12217 - DNA, 35 bp, Artificial Sequence
  Synthetic oligonucleotide
gattgggccgcaggtacgccagctgcaccaatgtc

SEQ ID NO: 12218 - DNA, 36 bp, Artificial Sequence
  Synthetic oligonucleotide
tcaacttgtaacactcgtagtacaagcctgaccgaa

SEQ ID NO: 12219 - DNA, 37 bp, Artificial Sequence
  Synthetic oligonucleotide
aacccgacctcgaaacgacaacaaggcatccctggga

SEQ ID NO: 12220 - DNA, 36 bp, Artificial Sequence
  Synthetic oligonucleotide
aacgttatgaaaacatggggccggagtcacgacata

SEQ ID NO: 12221 - DNA, 35 bp, Artificial Sequence
  Synthetic oligonucleotide
aatctgagtataccccagaagccttgattacggta

SEQ ID NO: 12222 - DNA, 35 bp, Artificial Sequence
  Synthetic oligonucleotide
aatgcaagaggacactgctcccacggttccagtcg

SEQ ID NO: 12223 - DNA, 38 bp, Artificial Sequence
  Synthetic oligonucleotide
acatgtagagcgagcgttgggtctgtggctctatttga

SEQ ID NO: 12224 - DNA, 35 bp, Artificial Sequence
  Synthetic oligonucleotide
actccattctacaaatgggggagtggggcacatgg

SEQ ID NO: 12225 - DNA, 35 bp, Artificial Sequence
  Synthetic oligonucleotide
agagcacgactacgttacaagctggcatgggctcc

SEQ ID NO: 12226 - DNA, 37 bp, Artificial Sequence
  Synthetic oligonucleotide
agtgcgactgtaatcatgtgcccggggacgtttaaga

SEQ ID NO: 12227 - DNA, 35 bp, Artificial Sequence
  Synthetic oligonucleotide
atagggcaataaagttgtacgggtttgtgttgccc

SEQ ID NO: 12228 - DNA, 38 bp, Artificial Sequence
  Synthetic oligonucleotide
attcgggcctgtcgggttacgattgtccgtactgctga

SEQ ID NO: 12229 - DNA, 38 bp, Artificial Sequence
  Synthetic oligonucleotide
cacgcactagggggcctacacttgtgcaagagttctga

SEQ ID NO: 12230 - DNA, 38 bp, Artificial Sequence
  Synthetic oligonucleotide
gcagttcttccagtggcgggaaccgtaactgggcttga

SEQ ID NO: 12231 - DNA, 37 bp, Artificial Sequence
  Synthetic oligonucleotide
taatgcgcggacatagtgttttgcactgtcgccaaga

SEQ ID NO: 12232 - DNA, 38 bp, Artificial Sequence
  Synthetic oligonucleotide
tccctgcaaaggttggtcgggtacagtctggcaagtga

SEQ ID NO: 12233 - DNA, 36 bp, Artificial Sequence
  Synthetic oligonucleotide
tctaccaacgttcgctggcataagtgttctcaggga

SEQ ID NO: 12234 - DNA, 36 bp, Artificial Sequence
  Synthetic oligonucleotide
tgtccggtcgtcatgagaaggacggggcatcaacca

SEQ ID NO: 12235 - DNA, 38 bp, Artificial Sequence
  Synthetic oligonucleotide
ttgttggtcgaacgccaagggcgtgcaatgcgacgcta

SEQ ID NO: 12236 - DNA, 37 bp, Artificial Sequence
  Synthetic oligonucleotide
ggatcatatcgggggtagtgatcccgtagtcagtgga

SEQ ID NO: 12237 - DNA, 37 bp, Artificial Sequence
  Synthetic oligonucleotide
tagtgtactgacagacgactttcatcccccccgtaga

SEQ ID NO: 12238 - DNA, 36 bp, Artificial Sequence
  Synthetic oligonucleotide
gacaattcggtagtgctgtcaaccgctgggacgtta

SEQ ID NO: 12239 - DNA, 38 bp, Artificial Sequence
  Synthetic oligonucleotide
gtcgcgagtacagctgacgaccgtacctcctggcgtga

SEQ ID NO: 12240 - DNA, 36 bp, Artificial Sequence
  Synthetic oligonucleotide
tgtgctaccgccatgatagttgaggtattgattgga

SEQ ID NO: 12241 - DNA, 36 bp, Artificial Sequence
  Synthetic oligonucleotide
gttgagtttgtagacggattatctaaggaactatga

SEQ ID NO: 12242 - DNA, 36 bp, Artificial Sequence
  Synthetic oligonucleotide
tatgacacggtaaaatgtacgatacgtatagggaga

SEQ ID NO: 12243 - DNA, 38 bp, Artificial Sequence
  Synthetic oligonucleotide
aatcccaggaacatccggggttcggattacgtgcgtga

SEQ ID NO: 12244 - DNA, 35 bp, Artificial Sequence
  Synthetic oligonucleotide
gtctcatcattgggacatctacagtcagtaatgta

SEQ ID NO: 12245 - DNA, 36 bp, Artificial Sequence
  Synthetic oligonucleotide
aatgagattgcatgtactcacaggtccgtgttcgta

SEQ ID NO: 12246 - DNA, 38 bp, Artificial Sequence
  Synthetic oligonucleotide
aatgcacggcggactgtagtagcttgatcagttcctga

SEQ ID NO: 12247 - DNA, 35 bp, Artificial Sequence
  Synthetic oligonucleotide
acagtgtagtttctcctggttctgagatcggtacc

SEQ ID NO: 12248 - DNA, 35 bp, Artificial Sequence
  Synthetic oligonucleotide
acctcagtctgttgacagtatgatagtattgcttg

SEQ ID NO: 12249 - DNA, 37 bp, Artificial Sequence
  Synthetic oligonucleotide
actaccacaactaagttgttgttagagcactgtggga

SEQ ID NO: 12250 - DNA, 36 bp, Artificial Sequence
  Synthetic oligonucleotide
actacgattggaagacgattgagcctgcagggctta

SEQ ID NO: 12251 - DNA, 37 bp, Artificial Sequence
  Synthetic oligonucleotide
actgtggtactgcaacgttgccactcataaagaaaga

SEQ ID NO: 12252 - DNA, 36 bp, Artificial Sequence
  Synthetic oligonucleotide
agagatgccgcatgtggctagcggtgccccttaaaa

SEQ ID NO: 12253 - DNA, 38 bp, Artificial Sequence
  Synthetic oligonucleotide
agatctacaattgccattgtagatcacaacggatatga

SEQ ID NO: 12254 - DNA, 37 bp, Artificial Sequence
  Synthetic oligonucleotide
agcacggtgggaaacttttcacatcggtcaggaccga

SEQ ID NO: 12255 - DNA, 37 bp, Artificial Sequence
  Synthetic oligonucleotide
agccgcacctgaaacccgccgcttcttaagcgcagga

SEQ ID NO: 12256 - DNA, 38 bp, Artificial Sequence
  Synthetic oligonucleotide
agcgaattactagggtgtactccagagataggttctga

SEQ ID NO: 12257 - DNA, 35 bp, Artificial Sequence
  Synthetic oligonucleotide
agctgaaaaatggattgttcctaggctggatccag

SEQ ID NO: 12258 - DNA, 36 bp, Artificial Sequence
  Synthetic oligonucleotide
agttatcgtgtgatgcacctaggacgaaaggagcca

SEQ ID NO: 12259 - DNA, 36 bp, Artificial Sequence
  Synthetic oligonucleotide
atgaaggttgagttatgtcgtaagcggttaccgata

SEQ ID NO: 12260 - DNA, 35 bp, Artificial Sequence
  Synthetic oligonucleotide
attccacgactgtatcgaggaagacgacaacgcac

SEQ ID NO: 12261 - DNA, 36 bp, Artificial Sequence
  Synthetic oligonucleotide
cacggacaaatgtcgaatggatatactacagggtta

SEQ ID NO: 12262 - DNA, 35 bp, Artificial Sequence
  Synthetic oligonucleotide
cagcccaaggcactggcctgactgctggggcaata

SEQ ID NO: 12263 - DNA, 37 bp, Artificial Sequence
  Synthetic oligonucleotide
cgaatgttttcgctagagcgttagtccacctcaaaga

SEQ ID NO: 12264 - DNA, 36 bp, Artificial Sequence
  Synthetic oligonucleotide
gaaccacgacaggtctatggaacatgatcggctgga

SEQ ID NO: 12265 - DNA, 36 bp, Artificial Sequence
  Synthetic oligonucleotide
gacagagcgttgtccgtacgtagttgggtgctcaca

SEQ ID NO: 12266 - DNA, 36 bp, Artificial Sequence
  Synthetic oligonucleotide
gacatatgaggtgtgatcggaccacactccgctgta

SEQ ID NO: 12267 - DNA, 35 bp, Artificial Sequence
  Synthetic oligonucleotide
gacgcgtgcaggctctttccccgtattcaaggcca

SEQ ID NO: 12268 - DNA, 36 bp, Artificial Sequence
  Synthetic oligonucleotide
gatagacgctgccctcgtgagttgaaacgggggtca

SEQ ID NO: 12269 - DNA, 36 bp, Artificial Sequence
  Synthetic oligonucleotide
gatccaaacgtggtagatcgagatttgtgccgggca

SEQ ID NO: 12270 - DNA, 35 bp, Artificial Sequence
  Synthetic oligonucleotide
gcatcagtccggccaaccgtcgttcatcgaagatt

SEQ ID NO: 12271 - DNA, 38 bp, Artificial Sequence
  Synthetic oligonucleotide
gcattgagtacgtatgcagtcggaggaattaggagtga

SEQ ID NO: 12272 - DNA, 35 bp, Artificial Sequence
  Synthetic oligonucleotide
gccaacgcacggcatcattttctaggatgtgcgac

SEQ ID NO: 12273 - DNA, 37 bp, Artificial Sequence
  Synthetic oligonucleotide
gcctaaaccgcgagtgtaagacgacttgaaccagcga

SEQ ID NO: 12274 - DNA, 38 bp, Artificial Sequence
  Synthetic oligonucleotide
gcgacaattgggatagtgggtatgcaccggctatctga

SEQ ID NO: 12275 - DNA, 37 bp, Artificial Sequence
  Synthetic oligonucleotide
gcgtcggaacctacgctccggatacccttatggtaga

SEQ ID NO: 12276 - DNA, 38 bp, Artificial Sequence
  Synthetic oligonucleotide
gctcgcactctgaccaaaggaaccccccgctttgttga

SEQ ID NO: 12277 - DNA, 36 bp, Artificial Sequence
  Synthetic oligonucleotide
ggaaacacgcctttatacatttggtggttgagctta

SEQ ID NO: 12278 - DNA, 35 bp, Artificial Sequence
  Synthetic oligonucleotide
ggattgatcggaattttaacctgctatttaagcgg

SEQ ID NO: 12279 - DNA, 37 bp, Artificial Sequence
  Synthetic oligonucleotide
gggcgatctgtcaccacggatcggttaggtgtgacta

SEQ ID NO: 12280 - DNA, 38 bp, Artificial Sequence
  Synthetic oligonucleotide
ggtgcctagtctcgtgagggtgaaggttgtaagggtga

SEQ ID NO: 12281 - DNA, 36 bp, Artificial Sequence
  Synthetic oligonucleotide
ggtggaggacatgtgaacataattggcccggtccta

SEQ ID NO: 12282 - DNA, 37 bp, Artificial Sequence
  Synthetic oligonucleotide
gtaacagcaggcgggtatagtgcaaacacacatttga

SEQ ID NO: 12283 - DNA, 37 bp, Artificial Sequence
  Synthetic oligonucleotide
gtatgcagtgggagatcgactcccgacagtacccaga

SEQ ID NO: 12284 - DNA, 38 bp, Artificial Sequence
  Synthetic oligonucleotide
gtcaaagtcagtgggacaaccgacggtaatcgctatga

SEQ ID NO: 12285 - DNA, 37 bp, Artificial Sequence
  Synthetic oligonucleotide
gtcacgaggctagtattacgcctaaagggaaagtaga

SEQ ID NO: 12286 - DNA, 37 bp, Artificial Sequence
  Synthetic oligonucleotide
gtccagaactggcctgggatatcggtttcgacgggga

SEQ ID NO: 12287 - DNA, 35 bp, Artificial Sequence
  Synthetic oligonucleotide
gtcggaccgaaggttggaattcggagtgcgaagtc

SEQ ID NO: 12288 - DNA, 35 bp, Artificial Sequence
  Synthetic oligonucleotide
gtctggtctcggtgctgtgatgcgcaccggtgtgt

SEQ ID NO: 12289 - DNA, 36 bp, Artificial Sequence
  Synthetic oligonucleotide
gtgactgtttcagatagcacttaccttcggaagtca

SEQ ID NO: 12290 - DNA, 35 bp, Artificial Sequence
  Synthetic oligonucleotide
gtgctttaccggtgcaatattagttggggcgggtc

SEQ ID NO: 12291 - DNA, 35 bp, Artificial Sequence
  Synthetic oligonucleotide
gttagtgtcaaaaaccctcaaaattccctcagatt

SEQ ID NO: 12292 - DNA, 35 bp, Artificial Sequence
  Synthetic oligonucleotide
gttccgtgaccttactcaagggccgttgtcatgac

SEQ ID NO: 12293 - DNA, 37 bp, Artificial Sequence
  Synthetic oligonucleotide
taaccccgtggtaacgcggcgcggttgcgctggttga

SEQ ID NO: 12294 - DNA, 37 bp, Artificial Sequence
  Synthetic oligonucleotide
taagcgccgtaggacatggcgactaatacctccagga

SEQ ID NO: 12295 - DNA, 38 bp, Artificial Sequence
  Synthetic oligonucleotide
tactaaccgcaattacatcatcatcgaagcgctactga

SEQ ID NO: 12296 - DNA, 37 bp, Artificial Sequence
  Synthetic oligonucleotide
tagcattggaggggtgcgtgcagccgcttcggtagga

SEQ ID NO: 12297 - DNA, 38 bp, Artificial Sequence
  Synthetic oligonucleotide
tagtaacagggtgttcttaagtacctcctcatgggtga

SEQ ID NO: 12298 - DNA, 38 bp, Artificial Sequence
  Synthetic oligonucleotide
tagtggaactgtctgatttattgaaagtatatatctga

SEQ ID NO: 12299 - DNA, 38 bp, Artificial Sequence
  Synthetic oligonucleotide
tataacgcacgcgtagttatgtattgtataattactga

SEQ ID NO: 12300 - DNA, 38 bp, Artificial Sequence
  Synthetic oligonucleotide
tatagttgcgtggtatgacatgccagtatcgggtatga

SEQ ID NO: 12301 - DNA, 38 bp, Artificial Sequence
  Synthetic oligonucleotide
tattcagggcgccgttccggatctgaagaccagactga

SEQ ID NO: 12302 - DNA, 36 bp, Artificial Sequence
  Synthetic oligonucleotide
tcaaccagtacgcaagtcaacgaacacgggtccaga

SEQ ID NO: 12303 - DNA, 35 bp, Artificial Sequence
  Synthetic oligonucleotide
tcagtcgtactggtggtgcatgcgagcacccacct

SEQ ID NO: 12304 - DNA, 37 bp, Artificial Sequence
  Synthetic oligonucleotide
tcgcgtttgggcggtagacgcttacttctcggagtga

SEQ ID NO: 12305 - DNA, 35 bp, Artificial Sequence
  Synthetic oligonucleotide
tcttagggattcctgagggttatagtctctacgtg

SEQ ID NO: 12306 - DNA, 35 bp, Artificial Sequence
  Synthetic oligonucleotide
tgataagggaagccggttgtgtggtcacgccacaa

SEQ ID NO: 12307 - DNA, 35 bp, Artificial Sequence
  Synthetic oligonucleotide
tgcacaagggcttgaatagtaagcctaacatggag

SEQ ID NO: 12308 - DNA, 38 bp, Artificial Sequence
  Synthetic oligonucleotide
tgcagtcccggctagcagacaatctgtccgagaagtga

SEQ ID NO: 12309 - DNA, 35 bp, Artificial Sequence
  Synthetic oligonucleotide
tgctgactgggtccagtctggccacgagctgaaag

SEQ ID NO: 12310 - DNA, 38 bp, Artificial Sequence
  Synthetic oligonucleotide
tggacggtgcgagcgtccagtactgcggtacaagatga

SEQ ID NO: 12311 - DNA, 35 bp, Artificial Sequence
  Synthetic oligonucleotide
tggtgaccgggggaggttcccgtgtgtgatgtgga

SEQ ID NO: 12312 - DNA, 38 bp, Artificial Sequence
  Synthetic oligonucleotide
tgtagagtgatgtagtcatgctggtgtcgatacaatga

SEQ ID NO: 12313 - DNA, 35 bp, Artificial Sequence
  Synthetic oligonucleotide
tgtattcggacgcttgcgaaggtttgaaatgtgtc

SEQ ID NO: 12314 - DNA, 35 bp, Artificial Sequence
  Synthetic oligonucleotide
tgtcctacttggtaaagtattggggatgtgagctt

SEQ ID NO: 12315 - DNA, 37 bp, Artificial Sequence
  Synthetic oligonucleotide
tgtcgtcactgattgatggacgggaacaatattggga

SEQ ID NO: 12316 - DNA, 38 bp, Artificial Sequence
  Synthetic oligonucleotide
tgtcgtgccagtacccttagtggagctgcagattatga

SEQ ID NO: 12317 - DNA, 38 bp, Artificial Sequence
  Synthetic oligonucleotide
tgtgacgttaaagcgcatacgcatgttctcatttgtga

SEQ ID NO: 12318 - DNA, 38 bp, Artificial Sequence
  Synthetic oligonucleotide
ttaccccgaggtgcgagagggacggtccagacccctga

SEQ ID NO: 12319 - DNA, 35 bp, Artificial Sequence
  Synthetic oligonucleotide
ttcaacggccgagcgctaagggaaggcgtgaaaga

SEQ ID NO: 12320 - DNA, 35 bp, Artificial Sequence
  Synthetic oligonucleotide
ttcaagggccaggttattaacccccgggagaatta

SEQ ID NO: 12321 - DNA, 38 bp, Artificial Sequence
  Synthetic oligonucleotide
ttcattctagccgtggcttgacgtataaaactaactga

SEQ ID NO: 12322 - DNA, 36 bp, Artificial Sequence
  Synthetic oligonucleotide
ttctggtgaagtgtgtcgtcgcacccgcacgaggta

SEQ ID NO: 12323 - DNA, 36 bp, Artificial Sequence
  Synthetic oligonucleotide
ttgagtgctatgtcgtaactgcagtagcaattgtca

SEQ ID NO: 12324 - DNA, 35 bp, Artificial Sequence
  Synthetic oligonucleotide
ttggtacgcgcggttaatactcacttcctgataag

SEQ ID NO: 12325 - DNA, 35 bp, Artificial Sequence
  Synthetic oligonucleotide
tttgattacgtactgtgcgaaggaaagcaatttgg

SEQ ID NO: 12326 - DNA, 36 bp, Artificial Sequence
  Synthetic oligonucleotide
aagtggcacttaggggttacttaatcgtagatagta

SEQ ID NO: 12327 - DNA, 35 bp, Artificial Sequence
  Synthetic oligonucleotide
actaggcatcatggataaaagtggttgcattgtca

SEQ ID NO: 12328 - DNA, 35 bp, Artificial Sequence
  Synthetic oligonucleotide
agcatcctcatccgacctccaaattcgctggacga

SEQ ID NO: 12329 - DNA, 38 bp, Artificial Sequence
  Synthetic oligonucleotide
agtcctgcagaaattgtattacgggtcccacgtcctga

SEQ ID NO: 12330 - DNA, 36 bp, Artificial Sequence
  Synthetic oligonucleotide
atgtagacgatatcggtatatcacccaggttgcata

SEQ ID NO: 12331 - DNA, 38 bp, Artificial Sequence
  Synthetic oligonucleotide
atgttaaccgctgaacgtagtcgactacgtgacaatga

SEQ ID NO: 12332 - DNA, 35 bp, Artificial Sequence
  Synthetic oligonucleotide
cacaccaggatgttcagttgtggctcttataactg

SEQ ID NO: 12333 - DNA, 36 bp, Artificial Sequence
  Synthetic oligonucleotide
ctgaatacggaggttatttactctggagactacgga

SEQ ID NO: 12334 - DNA, 36 bp, Artificial Sequence
  Synthetic oligonucleotide
gccttgggagagacttataagcgtgatattccttaa

SEQ ID NO: 12335 - DNA, 36 bp, Artificial Sequence
  Synthetic oligonucleotide
ggtaacacgaaggacgccaggatgatcgggggttta

SEQ ID NO: 12336 - DNA, 38 bp, Artificial Sequence
  Synthetic oligonucleotide
ggttcgttgggcatcaagggtctaggttccgaaggtga

SEQ ID NO: 12337 - DNA, 37 bp, Artificial Sequence
  Synthetic oligonucleotide
taggaacgtgaatgtagtcataacgccacggggctga

SEQ ID NO: 12338 - DNA, 35 bp, Artificial Sequence
  Synthetic oligonucleotide
tgagtcgaggagcgacttggccagttatgactgct

SEQ ID NO: 12339 - DNA, 36 bp, Artificial Sequence
  Synthetic oligonucleotide
tgcgggcaaaagcaaaatcttctagggatgttaata

SEQ ID NO: 12340 - DNA, 35 bp, Artificial Sequence
  Synthetic oligonucleotide
tgtcactttggcaatcgtaaatatgaagcgatcag

SEQ ID NO: 12341 - DNA, 36 bp, Artificial Sequence
  Synthetic oligonucleotide
tgttggtgtctctgatacagggtacgttacattcta

SEQ ID NO: 12342 - DNA, 36 bp, Artificial Sequence
  Synthetic oligonucleotide
ttcgcgtgctgttaagcaggaatcaggagagctata

SEQ ID NO: 12343 - DNA, 38 bp, Artificial Sequence
  Synthetic oligonucleotide
accctgagtcctgacagtttttggtcctgtttcattga

SEQ ID NO: 12344 - DNA, 37 bp, Artificial Sequence
  Synthetic oligonucleotide
ggaaacgtcaaaatggttagatgtgtacagtcacgga

SEQ ID NO: 12345 - DNA, 36 bp, Artificial Sequence
  Synthetic oligonucleotide
gtccacagggtaatccagctgatgcggtggatacta

SEQ ID NO: 12346 - DNA, 35 bp, Artificial Sequence
  Synthetic oligonucleotide
tacctaaccagtggtagactggcacgtttgcgaaa

SEQ ID NO: 12347 - DNA, 36 bp, Artificial Sequence
  Synthetic oligonucleotide
tgtggcgcaagtgagcgaacattgttatgcggggaa

SEQ ID NO: 12348 - DNA, 37 bp, Artificial Sequence
  Synthetic oligonucleotide
ttgcgaccatggcccggactgggtgcaataacattga

SEQ ID NO: 12349 - DNA, 36 bp, Artificial Sequence
  Synthetic oligonucleotide
aaatctgtagcatgtggaaccactactgcagtcgga

SEQ ID NO: 12350 - DNA, 35 bp, Artificial Sequence
  Synthetic oligonucleotide
aactgttgactagtgtctagattaaatagcggggg

SEQ ID NO: 12351 - DNA, 36 bp, Artificial Sequence
  Synthetic oligonucleotide
aagagtgcaattgtgtactacagtataagtggtacg

SEQ ID NO: 12352 - DNA, 35 bp, Artificial Sequence
  Synthetic oligonucleotide
accaatgcgaaatacgcaagcgggtcaaagcaaag

SEQ ID NO: 12353 - DNA, 35 bp, Artificial Sequence
  Synthetic oligonucleotide
acgcacaccaacgtcatgcactaactctgtggaga

SEQ ID NO: 12354 - DNA, 36 bp, Artificial Sequence
  Synthetic oligonucleotide
actgaaagtcgacttcactctgttaaattctgacga

SEQ ID NO: 12355 - DNA, 35 bp, Artificial Sequence
  Synthetic oligonucleotide
actgtgtgggtacgcgcggttaaataagggatgtc

SEQ ID NO: 12356 - DNA, 38 bp, Artificial Sequence
  Synthetic oligonucleotide
agcgcggtaccgtttgggtatagtagcaaccgcactga

SEQ ID NO: 12357 - DNA, 37 bp, Artificial Sequence
  Synthetic oligonucleotide
aggcgactacctagattgggggagtgtcgtcttcgga

SEQ ID NO: 12358 - DNA, 35 bp, Artificial Sequence
  Synthetic oligonucleotide
agttacagttcgtcatgtctgggggaagttgtggg

SEQ ID NO: 12359 - DNA, 38 bp, Artificial Sequence
  Synthetic oligonucleotide
atagctcgggacacactgcgatggtgcgtacagtttga

SEQ ID NO: 12360 - DNA, 35 bp, Artificial Sequence
  Synthetic oligonucleotide
atgccagaacccgatccgcatggcttctgacgagt

SEQ ID NO: 12361 - DNA, 35 bp, Artificial Sequence
  Synthetic oligonucleotide
cattagatgacgggttgggatgtcacgattagaag

SEQ ID NO: 12362 - DNA, 36 bp, Artificial Sequence
  Synthetic oligonucleotide
gaaagcatcacgactaatgtgaatactgtgatttta

SEQ ID NO: 12363 - DNA, 38 bp, Artificial Sequence
  Synthetic oligonucleotide
gaaaggttggtgcgcagtctgaccacgaattttactga

SEQ ID NO: 12364 - DNA, 37 bp, Artificial Sequence
  Synthetic oligonucleotide
gacattctgaacggtgtagcaagggagggggtgccga

SEQ ID NO: 12365 - DNA, 37 bp, Artificial Sequence
  Synthetic oligonucleotide
gaccatgaaatgaaggcccactggtgcagtgcaccga

SEQ ID NO: 12366 - DNA, 35 bp, Artificial Sequence
  Synthetic oligonucleotide
gaccgcgcccacttgtgggtagctagcccctacag

SEQ ID NO: 12367 - DNA, 36 bp, Artificial Sequence
  Synthetic oligonucleotide
gacttgaccttgcctagctctaagtattcgcgcaga

SEQ ID NO: 12368 - DNA, 38 bp, Artificial Sequence
  Synthetic oligonucleotide
gatagtctttgaaaccaagtctctgggttacgaactga

SEQ ID NO: 12369 - DNA, 37 bp, Artificial Sequence
  Synthetic oligonucleotide
gatatgaaacgaatacaagcttggagacagccttaga

SEQ ID NO: 12370 - DNA, 35 bp, Artificial Sequence
  Synthetic oligonucleotide
gatcagtttcattgtacgaaattgactctggttag

SEQ ID NO: 12371 - DNA, 35 bp, Artificial Sequence
  Synthetic oligonucleotide
gattcgtggactttttgaagtaaagggctctatgc

SEQ ID NO: 12372 - DNA, 36 bp, Artificial Sequence
  Synthetic oligonucleotide
gcagttggagactttctttgatactcagagtaagga

SEQ ID NO: 12373 - DNA, 35 bp, Artificial Sequence
  Synthetic oligonucleotide
gccccgccctgacaggtcgattcaggctagttgat

SEQ ID NO: 12374 - DNA, 35 bp, Artificial Sequence
  Synthetic oligonucleotide
gccgaatctgggcattacgcgatcatcaagaaaag

SEQ ID NO: 12375 - DNA, 28 bp, Artificial Sequence
  Synthetic oligonucleotide
gcgaacggtagaccaaatcctaggcgga

SEQ ID NO: 12376 - DNA, 38 bp, Artificial Sequence
  Synthetic oligonucleotide
gcggggccttttagataatgctggtcgagtcgtgttga

SEQ ID NO: 12377 - DNA, 38 bp, Artificial Sequence
  Synthetic oligonucleotide
gcttgcggtgtctttcccaccgctatgttgactcttga

SEQ ID NO: 12378 - DNA, 35 bp, Artificial Sequence
  Synthetic oligonucleotide
ggacaacgcgagcgaatgctaggggtataaatgga

SEQ ID NO: 12379 - DNA, 37 bp, Artificial Sequence
  Synthetic oligonucleotide
ggccaatttcactgggattaggatggtgcagtcacga

SEQ ID NO: 12380 - DNA, 35 bp, Artificial Sequence
  Synthetic oligonucleotide
ggtaccggcctcgctgaaacagggtcccgggagta

SEQ ID NO: 12381 - DNA, 36 bp, Artificial Sequence
  Synthetic oligonucleotide
ggtatcgttccatagagctgtcatcatgtaccgaga

SEQ ID NO: 12382 - DNA, 35 bp, Artificial Sequence
  Synthetic oligonucleotide
ggtcaggatttttgaagtattcgtctgaatactgg

SEQ ID NO: 12383 - DNA, 35 bp, Artificial Sequence
  Synthetic oligonucleotide
gtaactcaaggtttgctgtcgtagtttaatgcggg

SEQ ID NO: 12384 - DNA, 37 bp, Artificial Sequence
  Synthetic oligonucleotide
gtactagtgcatgaaccgtatccagtgtatggagaga

SEQ ID NO: 12385 - DNA, 38 bp, Artificial Sequence
  Synthetic oligonucleotide
gtacttccgcgaatcgggcgcaacctagaaggatgaga

SEQ ID NO: 12386 - DNA, 36 bp, Artificial Sequence
  Synthetic oligonucleotide
gtatcagcagtgattagtaagcggggcccctgaaaa

SEQ ID NO: 12387 - DNA, 36 bp, Artificial Sequence
  Synthetic oligonucleotide
gtcgaggtcatgaggtggtttatagtaatgagagca

SEQ ID NO: 12388 - DNA, 37 bp, Artificial Sequence
  Synthetic oligonucleotide
gtcggtcacacaattaggtgggtgactggaccacaga

SEQ ID NO: 12389 - DNA, 36 bp, Artificial Sequence
  Synthetic oligonucleotide
gtgttgaaggaagagtgatacatagaaaagtaccta

SEQ ID NO: 12390 - DNA, 36 bp, Artificial Sequence
  Synthetic oligonucleotide
taaagactccaaacaccgtgagttaagaggctacga

SEQ ID NO: 12391 - DNA, 35 bp, Artificial Sequence
  Synthetic oligonucleotide
tacataaagtttacgggttggtactagggccctgc

SEQ ID NO: 12392 - DNA, 35 bp, Artificial Sequence
  Synthetic oligonucleotide
tacgtcgccataacgccgggcatgttgccatgcga

SEQ ID NO: 12393 - DNA, 35 bp, Artificial Sequence
  Synthetic oligonucleotide
taggactgggcatcatgcccctaagtactgcctga

SEQ ID NO: 12394 - DNA, 35 bp, Artificial Sequence
  Synthetic oligonucleotide
tatgacggaccgtcacgctgttgtgaattgagagg

SEQ ID NO: 12395 - DNA, 35 bp, Artificial Sequence
  Synthetic oligonucleotide
tcacagttctaggatctgtgcgttactagcgcatc

SEQ ID NO: 12396 - DNA, 35 bp, Artificial Sequence
  Synthetic oligonucleotide
tctacacaagcgggaaatggcctctcagtgcgttc

SEQ ID NO: 12397 - DNA, 36 bp, Artificial Sequence
  Synthetic oligonucleotide
tgatcgttcacgttgtacgtggacaggtgagtaaga

SEQ ID NO: 12398 - DNA, 35 bp, Artificial Sequence
  Synthetic oligonucleotide
tgttacgaaggtagatgcccacgaccttgacgtga

SEQ ID NO: 12399 - DNA, 36 bp, Artificial Sequence
  Synthetic oligonucleotide
ttcggacttcaacccggttgtgcaaggtacaggtta

SEQ ID NO: 12400 - DNA, 35 bp, Artificial Sequence
  Synthetic oligonucleotide
ttgattaggtccagaaacagtcaggtaaactgcgc

SEQ ID NO: 12401 - DNA, 36 bp, Artificial Sequence
  Synthetic oligonucleotide
tttggcgcttgcgtagcgaggcattgtgagtgcaaa

SEQ ID NO: 12402 - DNA, 35 bp, Artificial Sequence
  Synthetic oligonucleotide
gagtccgacacgcgtatcgccggcggaatgcaaac

SEQ ID NO: 12403 - DNA, 35 bp, Artificial Sequence
  Synthetic oligonucleotide
agcctatacggtgtccgctacatagtgaggtcctg

SEQ ID NO: 12404 - DNA, 35 bp, Artificial Sequence
  Synthetic oligonucleotide
agtgaaactggaggacgcaggcgttggtcttagcg

SEQ ID NO: 12405 - DNA, 36 bp, Artificial Sequence
  Synthetic oligonucleotide
cccccccaaggcattataaagggtgtttaaggataa

SEQ ID NO: 12406 - DNA, 36 bp, Artificial Sequence
  Synthetic oligonucleotide
tgagtccaacagtggactactactgtcacatcagga

SEQ ID NO: 12407 - DNA, 36 bp, Artificial Sequence
  Synthetic oligonucleotide
ttgagcgctaaatcgaagatgtgaccgccatttgta

SEQ ID NO: 12408 - DNA, 36 bp, Artificial Sequence
  Synthetic oligonucleotide
aaaggggctacgagatgcagttgatgcgtctaatta

SEQ ID NO: 12409 - DNA, 36 bp, Artificial Sequence
  Synthetic oligonucleotide
aagtcctccgagtgaagatcgaggagacactagtaa

SEQ ID NO: 12410 - DNA, 37 bp, Artificial Sequence
  Synthetic oligonucleotide
aatagcgacgctcaaccagtcgatatgaggggtctga

SEQ ID NO: 12411 - DNA, 37 bp, Artificial Sequence
  Synthetic oligonucleotide
acggtggggcaataggtggtatacatcctgcaaatga

SEQ ID NO: 12412 - DNA, 37 bp, Artificial Sequence
  Synthetic oligonucleotide
actggataaaggagtgtggtaagcagcaagtacgcga

SEQ ID NO: 12413 - DNA, 38 bp, Artificial Sequence
  Synthetic oligonucleotide
agaagccgtgtgtactgggagtaatggtatttcgctga

SEQ ID NO: 12414 - DNA, 35 bp, Artificial Sequence
  Synthetic oligonucleotide
agacgtgagtcgaattatgcgtgctgaaatccgtc

SEQ ID NO: 12415 - DNA, 37 bp, Artificial Sequence
  Synthetic oligonucleotide
agcacggagccgatggtagggtcccaaacgctaggga

SEQ ID NO: 12416 - DNA, 37 bp, Artificial Sequence
  Synthetic oligonucleotide
agcgaggtaatggattctggggcaaatacacctagga

SEQ ID NO: 12417 - DNA, 35 bp, Artificial Sequence
  Synthetic oligonucleotide
caaattttgtacgttgtcgaagatactgtagagta

SEQ ID NO: 12418 - DNA, 38 bp, Artificial Sequence
  Synthetic oligonucleotide
cacccatacgtgagcattgttggttttagttgtcgtga

SEQ ID NO: 12419 - DNA, 36 bp, Artificial Sequence
  Synthetic oligonucleotide
ctattgtatgtccggaggggttgcgcccgctccgaa

SEQ ID NO: 12420 - DNA, 37 bp, Artificial Sequence
  Synthetic oligonucleotide
gacctgattcgatcacgttatcactccctgtggtgga

SEQ ID NO: 12421 - DNA, 37 bp, Artificial Sequence
  Synthetic oligonucleotide
gagcggtaagctaggtgtagtttttctaagtacacga

SEQ ID NO: 12422 - DNA, 35 bp, Artificial Sequence
  Synthetic oligonucleotide
gcagaatgattaggaagagttaagattagcgtaac

SEQ ID NO: 12423 - DNA, 35 bp, Artificial Sequence
  Synthetic oligonucleotide
gcggactcgaacttcgcgtcgcagggagctagtcg

SEQ ID NO: 12424 - DNA, 38 bp, Artificial Sequence
  Synthetic oligonucleotide
gctcaaattggacaggtggtgtgaggtcaactgcttga

SEQ ID NO: 12425 - DNA, 36 bp, Artificial Sequence
  Synthetic oligonucleotide
ggaacaacgacgccccacttctgagttaataatgca

SEQ ID NO: 12426 - DNA, 38 bp, Artificial Sequence
  Synthetic oligonucleotide
ggagtgctgaacgtgtttggtgatcgcacgatgagtga

SEQ ID NO: 12427 - DNA, 36 bp, Artificial Sequence
  Synthetic oligonucleotide
ggataaagtcctatggaaaggcaagtagatttataa

SEQ ID NO: 12428 - DNA, 35 bp, Artificial Sequence
  Synthetic oligonucleotide
ggtcaagactacctatacatccggtgcgaaggcaa

SEQ ID NO: 12429 - DNA, 37 bp, Artificial Sequence
  Synthetic oligonucleotide
gtattcatccgtggcatgcatagctgctgaattggga

SEQ ID NO: 12430 - DNA, 37 bp, Artificial Sequence
  Synthetic oligonucleotide
gtgaggaggtccaataaagatgtctagacttttagga

SEQ ID NO: 12431 - DNA, 36 bp, Artificial Sequence
  Synthetic oligonucleotide
gttgaactaggggcacttgccgtggatcgacgtgaa

SEQ ID NO: 12432 - DNA, 36 bp, Artificial Sequence
  Synthetic oligonucleotide
gtttgaaaggaatgctccgtggccgagatcatctta

SEQ ID NO: 12433 - DNA, 35 bp, Artificial Sequence
  Synthetic oligonucleotide
taaataggtgtttcgcgcgtatctgagaaggggaa

SEQ ID NO: 12434 - DNA, 38 bp, Artificial Sequence
  Synthetic oligonucleotide
tcaaagtgttacttgtagttatgtgggacgtgatatga

SEQ ID NO: 12435 - DNA, 38 bp, Artificial Sequence
  Synthetic oligonucleotide
tcgagtgacactgacagtgggtgtctgtacaaacgtga

SEQ ID NO: 12436 - DNA, 38 bp, Artificial Sequence
  Synthetic oligonucleotide
tctcttaaacgagcgctcgaggcgtggacaattaatga

SEQ ID NO: 12437 - DNA, 36 bp, Artificial Sequence
  Synthetic oligonucleotide
tctgtccactgacagtaggaaggtgggtcaggaaaa

SEQ ID NO: 12438 - DNA, 35 bp, Artificial Sequence
  Synthetic oligonucleotide
tgaacaaagccctgccggagatcgattagccgtag

SEQ ID NO: 12439 - DNA, 35 bp, Artificial Sequence
  Synthetic oligonucleotide
tgaacccaaggtgttcgcgtttcgccggacctaaa

SEQ ID NO: 12440 - DNA, 36 bp, Artificial Sequence
  Synthetic oligonucleotide
tggactctgtgggattattcaagagtcaacaacata

SEQ ID NO: 12441 - DNA, 37 bp, Artificial Sequence
  Synthetic oligonucleotide
tgtagtcagctgttcgtgaccggttcatctactggga

SEQ ID NO: 12442 - DNA, 36 bp, Artificial Sequence
  Synthetic oligonucleotide
tgtccgtaggactgtcgggaggtgagatagccccaa

SEQ ID NO: 12443 - DNA, 35 bp, Artificial Sequence
  Synthetic oligonucleotide
gcctagctctgggacggtttctaatccagccactt

SEQ ID NO: 12444 - DNA, 37 bp, Artificial Sequence
  Synthetic oligonucleotide
gctacccggttccttagctagtatcgtaagccacgga

SEQ ID NO: 12445 - DNA, 36 bp, Artificial Sequence
  Synthetic oligonucleotide
agttcgcgggctgcaatcactaaatactcattaaga

SEQ ID NO: 12446 - DNA, 37 bp, Artificial Sequence
  Synthetic oligonucleotide
attgatgccctattgagtcgacgacgtgttgattaga

SEQ ID NO: 12447 - DNA, 35 bp, Artificial Sequence
  Synthetic oligonucleotide
tgaatcacggtatattatgttcaccacaccccagt

SEQ ID NO: 12448 - DNA, 36 bp, Artificial Sequence
  Synthetic oligonucleotide
agccgtgggacgtacagcataaatagagtcagtcga

SEQ ID NO: 12449 - DNA, 38 bp, Artificial Sequence
  Synthetic oligonucleotide
catgagtatgttccaaaacacaaggcttcgttcaatga

SEQ ID NO: 12450 - DNA, 36 bp, Artificial Sequence
  Synthetic oligonucleotide
tactagggttcttggggaaccacgtaggtcatgtta

SEQ ID NO: 12451 - DNA, 36 bp, Artificial Sequence
  Synthetic oligonucleotide
aaagatcggtctcgcgatatgagtagagtgcttaaa

SEQ ID NO: 12452 - DNA, 35 bp, Artificial Sequence
  Synthetic oligonucleotide
aagggctttgatcatcccggactagagctaataag

SEQ ID NO: 12453 - DNA, 36 bp, Artificial Sequence
  Synthetic oligonucleotide
aatctttgcccgtaaccgcccgtgtatccaatggaa

SEQ ID NO: 12454 - DNA, 37 bp, Artificial Sequence
  Synthetic oligonucleotide
aatgggttacggtcgtgtacatgtatattggtcttga

SEQ ID NO: 12455 - DNA, 35 bp, Artificial Sequence
  Synthetic oligonucleotide
acagtattccgttgggccacaacgaacttatagat

SEQ ID NO: 12456 - DNA, 37 bp, Artificial Sequence
  Synthetic oligonucleotide
actacaaataggttcacgtactgagaaaacggcctga

SEQ ID NO: 12457 - DNA, 38 bp, Artificial Sequence
  Synthetic oligonucleotide
agacggtctagggtaaaccattgataccggacggttga

SEQ ID NO: 12458 - DNA, 36 bp, Artificial Sequence
  Synthetic oligonucleotide
agagcggtttttgtcaacaggccgttaagtcgacaa

SEQ ID NO: 12459 - DNA, 36 bp, Artificial Sequence
  Synthetic oligonucleotide
atagacaatggcgccttaaaggcgtcatgacacata

SEQ ID NO: 12460 - DNA, 37 bp, Artificial Sequence
  Synthetic oligonucleotide
gaactagtcggggggccaaaacaccgggtagttgtga

SEQ ID NO: 12461 - DNA, 37 bp, Artificial Sequence
  Synthetic oligonucleotide
gacggctgtcgtatctatactcattcgtacgtcgtga

SEQ ID NO: 12462 - DNA, 36 bp, Artificial Sequence
  Synthetic oligonucleotide
gccaaacgttgagggcacgccttggattatcaccga

SEQ ID NO: 12463 - DNA, 35 bp, Artificial Sequence
  Synthetic oligonucleotide
ggaacgacgctttagaagcggtgccgtcatgacgg

SEQ ID NO: 12464 - DNA, 36 bp, Artificial Sequence
  Synthetic oligonucleotide
taggttcacggttttgcccatggaggctgtacgtta

SEQ ID NO: 12465 - DNA, 37 bp, Artificial Sequence
  Synthetic oligonucleotide
tccgaagaagagccacgttacgactaaggatcattga

SEQ ID NO: 12466 - DNA, 37 bp, Artificial Sequence
  Synthetic oligonucleotide
tgcgaaaacgcactaggcgccgggtgagcggggggga

SEQ ID NO: 12467 - DNA, 37 bp, Artificial Sequence
  Synthetic oligonucleotide
tgctcggagttcactgcagccacatgggtagttagga

SEQ ID NO: 12468 - DNA, 37 bp, Artificial Sequence
  Synthetic oligonucleotide
tggaacctttcatacggagagatccctagggatggga

SEQ ID NO: 12469 - DNA, 37 bp, Artificial Sequence
  Synthetic oligonucleotide
ttgcgtttgaaggcaaacggatgcagggacctataga

SEQ ID NO: 12470 - DNA, 37 bp, Artificial Sequence
  Synthetic oligonucleotide
ttgttgactggctatgaagaggggcgacatgagatga

SEQ ID NO: 12471 - DNA, 36 bp, Artificial Sequence
  Synthetic oligonucleotide
tttacttcaggagagtcaagtggtttatctgtaaga

SEQ ID NO: 12472 - DNA, 38 bp, Artificial Sequence
  Synthetic oligonucleotide
tttattgggcggggcaaagctctcgacttgagttttga

SEQ ID NO: 12473 - DNA, 35 bp, Artificial Sequence
  Synthetic oligonucleotide
aagactgtatctgcatagttaaaaaccctgtcatc

SEQ ID NO: 12474 - DNA, 35 bp, Artificial Sequence
  Synthetic oligonucleotide
ggactgcagtagtgaaggtaggaggatggccaatc

SEQ ID NO: 12475 - DNA, 35 bp, Artificial Sequence
  Synthetic oligonucleotide
atacgtttaggtgagtaccgcgacgtttagttagg

SEQ ID NO: 12476 - DNA, 37 bp, Artificial Sequence
  Synthetic oligonucleotide
ttcgcctgtggtcgaatggtctttgtgttgtttatga

SEQ ID NO: 12477 - DNA, 38 bp, Artificial Sequence
  Synthetic oligonucleotide
tgacgtcactgggagctagtgacgacgcactgcaatga

SEQ ID NO: 12478 - DNA, 38 bp, Artificial Sequence
  Synthetic oligonucleotide
aaagagcgaacgaataccaggcgagtagttaggaatga

SEQ ID NO: 12479 - DNA, 36 bp, Artificial Sequence
  Synthetic oligonucleotide
aacactccgtatagacttgttgaaatgtcgccagta

SEQ ID NO: 12480 - DNA, 36 bp, Artificial Sequence
  Synthetic oligonucleotide
aactgtagggtaatgggtaatttcaatacggtgaca

SEQ ID NO: 12481 - DNA, 37 bp, Artificial Sequence
  Synthetic oligonucleotide
aagaccgcggggcctgttgcacaccggtcacactgga

SEQ ID NO: 12482 - DNA, 35 bp, Artificial Sequence
  Synthetic oligonucleotide
aagcgattgggcacatgctacgtgtccggcccctc

SEQ ID NO: 12483 - DNA, 38 bp, Artificial Sequence
  Synthetic oligonucleotide
aagctccacgtgtacctccaccgaacgaatctacgtga

SEQ ID NO: 12484 - DNA, 38 bp, Artificial Sequence
  Synthetic oligonucleotide
aagggtgggccggtcggatttcgggtgattgaggttga

SEQ ID NO: 12485 - DNA, 37 bp, Artificial Sequence
  Synthetic oligonucleotide
acatacgagatccgggactcgagtacatctcatcgga

SEQ ID NO: 12486 - DNA, 35 bp, Artificial Sequence
  Synthetic oligonucleotide
accaaccggtatgtggtgccaatcgtgtgcgtggg

SEQ ID NO: 12487 - DNA, 38 bp, Artificial Sequence
  Synthetic oligonucleotide
acccgtcaaaggtcgtgtcacagtttccgcttctctga

SEQ ID NO: 12488 - DNA, 36 bp, Artificial Sequence
  Synthetic oligonucleotide
accgaccaacgacgtgtattgacacggggaactagt

SEQ ID NO: 12489 - DNA, 36 bp, Artificial Sequence
  Synthetic oligonucleotide
acgactggtcgtcgcggaaggacagtgctgagctta

SEQ ID NO: 12490 - DNA, 38 bp, Artificial Sequence
  Synthetic oligonucleotide
acgtctaacgtcatcttgtaggaatggggttcatctga

SEQ ID NO: 12491 - DNA, 36 bp, Artificial Sequence
  Synthetic oligonucleotide
acgtgagggtttgggcattagggtaggtagttgaaa

SEQ ID NO: 12492 - DNA, 35 bp, Artificial Sequence
  Synthetic oligonucleotide
agaaacgaccttcaagggtatgtgttgccgctcac

SEQ ID NO: 12493 - DNA, 35 bp, Artificial Sequence
  Synthetic oligonucleotide
agaaccgcgaagcggactatgacggatttatgagg

SEQ ID NO: 12494 - DNA, 35 bp, Artificial Sequence
  Synthetic oligonucleotide
agacgtagcgggctacatcttagtgtgttaaggcg

SEQ ID NO: 12495 - DNA, 37 bp, Artificial Sequence
  Synthetic oligonucleotide
agagtctctggacctcgagagacgtcggaaaacttga

SEQ ID NO: 12496 - DNA, 36 bp, Artificial Sequence
  Synthetic oligonucleotide
agcactttatgaagctactaccacctccgggtttaa

SEQ ID NO: 12497 - DNA, 35 bp, Artificial Sequence
  Synthetic oligonucleotide
agcatacatagctggaggaagtactcgctctagcg

SEQ ID NO: 12498 - DNA, 36 bp, Artificial Sequence
  Synthetic oligonucleotide
agccaacgatcgtgtttcatccctcgcacacaggta

SEQ ID NO: 12499 - DNA, 38 bp, Artificial Sequence
  Synthetic oligonucleotide
agcgtggacgccttatatatgtgagtcgaagcgattga

SEQ ID NO: 12500 - DNA, 36 bp, Artificial Sequence
  Synthetic oligonucleotide
aggagcctgcaggccccacgaagtttataattatga

SEQ ID NO: 12501 - DNA, 36 bp, Artificial Sequence
  Synthetic oligonucleotide
aggcacatatgcttgtaatatagtgtcattgcagga

SEQ ID NO: 12502 - DNA, 35 bp, Artificial Sequence
  Synthetic oligonucleotide
aggcgcgtactgcgggcataagccttagtttgaca

SEQ ID NO: 12503 - DNA, 37 bp, Artificial Sequence
  Synthetic oligonucleotide
agtgccgccttaatcaactgtacgtactgggtcttga

SEQ ID NO: 12504 - DNA, 36 bp, Artificial Sequence
  Synthetic oligonucleotide
ataacacgttccctaggcgtacagcccaatgctcca

SEQ ID NO: 12505 - DNA, 36 bp, Artificial Sequence
  Synthetic oligonucleotide
ataggtcccgcataaatgtctgggttctcgccctga

SEQ ID NO: 12506 - DNA, 38 bp, Artificial Sequence
  Synthetic oligonucleotide
atagtactctcacgctggaatctccatctgaatgttga

SEQ ID NO: 12507 - DNA, 35 bp, Artificial Sequence
  Synthetic oligonucleotide
atatcatagcgtgcttaacatggagcttaagctcg

SEQ ID NO: 12508 - DNA, 35 bp, Artificial Sequence
  Synthetic oligonucleotide
atcaggtatcttgcagtataggacatgatccttac

SEQ ID NO: 12509 - DNA, 36 bp, Artificial Sequence
  Synthetic oligonucleotide
atcctggctagtctgccactctggtcatgcgaagaa

SEQ ID NO: 12510 - DNA, 37 bp, Artificial Sequence
  Synthetic oligonucleotide
atcgataggcattcccatcgccaccgcagtcaggaga

SEQ ID NO: 12511 - DNA, 36 bp, Artificial Sequence
  Synthetic oligonucleotide
atgaccgatagcaagttagaaggcccgacctaggga

SEQ ID NO: 12512 - DNA, 36 bp, Artificial Sequence
  Synthetic oligonucleotide
caaggagaatcgatgggttcaactagaactattata

SEQ ID NO: 12513 - DNA, 36 bp, Artificial Sequence
  Synthetic oligonucleotide
caaggtccgtggagggacctttttcgtatcgcgata

SEQ ID NO: 12514 - DNA, 36 bp, Artificial Sequence
  Synthetic oligonucleotide
catacatccgccaagggcggaagttcaacctgtcta

SEQ ID NO: 12515 - DNA, 37 bp, Artificial Sequence
  Synthetic oligonucleotide
catccagtcaaggtgttgtggagactttgcatgccga

SEQ ID NO: 12516 - DNA, 36 bp, Artificial Sequence
  Synthetic oligonucleotide
ccccactgaggaaagcttaagcattcccctcgtcga

SEQ ID NO: 12517 - DNA, 37 bp, Artificial Sequence
  Synthetic oligonucleotide
ccccatcccggtcgtccctctccggtcatgttatcga

SEQ ID NO: 12518 - DNA, 37 bp, Artificial Sequence
  Synthetic oligonucleotide
ccctacggtcgggaggacactttgccagcttagtaga

SEQ ID NO: 12519 - DNA, 35 bp, Artificial Sequence
  Synthetic oligonucleotide
cgacaggtaccgctccgttgaagtgctgcatgtag

SEQ ID NO: 12520 - DNA, 36 bp, Artificial Sequence
  Synthetic oligonucleotide
cgagttcgaactcgaagattacttgagtcaatgata

SEQ ID NO: 12521 - DNA, 30 bp, Artificial Sequence
  Synthetic oligonucleotide
ctacacacgtactggtagtgttcactaaga

SEQ ID NO: 12522 - DNA, 37 bp, Artificial Sequence
  Synthetic oligonucleotide
gaaagctggcgtattctactgtttgattacgtagaga

SEQ ID NO: 12523 - DNA, 35 bp, Artificial Sequence
  Synthetic oligonucleotide
gaaatgtgaatgtccaattttaaaattaatcgggg

SEQ ID NO: 12524 - DNA, 35 bp, Artificial Sequence
  Synthetic oligonucleotide
gacaaataagtcacgcaggtcgcgtcttcccaccg

SEQ ID NO: 12525 - DNA, 36 bp, Artificial Sequence
  Synthetic oligonucleotide
gacaagcagtatgacgagaagcttgtgcgggaataa

SEQ ID NO: 12526 - DNA, 36 bp, Artificial Sequence
  Synthetic oligonucleotide
gacaataggtgagcaaggggctactgcagtccttta

SEQ ID NO: 12527 - DNA, 36 bp, Artificial Sequence
  Synthetic oligonucleotide
gacgaaggggagggatgggtcgttacattaggcgta

SEQ ID NO: 12528 - DNA, 36 bp, Artificial Sequence
  Synthetic oligonucleotide
gacggttaattgaaggtgcacagtgaccaattttaa

SEQ ID NO: 12529 - DNA, 35 bp, Artificial Sequence
  Synthetic oligonucleotide
gactatcacacgttcggggccgctcatgcccaccc

SEQ ID NO: 12530 - DNA, 37 bp, Artificial Sequence
  Synthetic oligonucleotide
gagccaaattgtagatttacatttttttggccacgga

SEQ ID NO: 12531 - DNA, 38 bp, Artificial Sequence
  Synthetic oligonucleotide
gagcgcatggtttagagtaaagtttgcgcacgttatga

SEQ ID NO: 12532 - DNA, 38 bp, Artificial Sequence
  Synthetic oligonucleotide
gagctcctgctaggctgccttgtaaaagcctcagttga

SEQ ID NO: 12533 - DNA, 35 bp, Artificial Sequence
  Synthetic oligonucleotide
gagggacagtcagctttaagtaggtaactcttgtt

SEQ ID NO: 12534 - DNA, 36 bp, Artificial Sequence
  Synthetic oligonucleotide
gaggggataggggagtcatggggacaactgtcgcaa

SEQ ID NO: 12535 - DNA, 36 bp, Artificial Sequence
  Synthetic oligonucleotide
gagttcttacgtcttagtgggacgacgtttgttaaa

SEQ ID NO: 12536 - DNA, 36 bp, Artificial Sequence
  Synthetic oligonucleotide
gataggtccgctcgtagcatctacgagttgcggtga

SEQ ID NO: 12537 - DNA, 37 bp, Artificial Sequence
  Synthetic oligonucleotide
gatagtccggggcgcactttgtatttagatgtaatga

SEQ ID NO: 12538 - DNA, 37 bp, Artificial Sequence
  Synthetic oligonucleotide
gattctagcggacagaggacgtagcgacaggcaagga

SEQ ID NO: 12539 - DNA, 38 bp, Artificial Sequence
  Synthetic oligonucleotide
gcacgattgtgtacgtagtgcttcgcgaaaacgtctga

SEQ ID NO: 12540 - DNA, 35 bp, Artificial Sequence
  Synthetic oligonucleotide
gcagacaaaatagccgtgggcgttgggtcaaaata

SEQ ID NO: 12541 - DNA, 38 bp, Artificial Sequence
  Synthetic oligonucleotide
gccatgcacaagcaatccgtgcagtcagtaaatcgtga

SEQ ID NO: 12542 - DNA, 37 bp, Artificial Sequence
  Synthetic oligonucleotide
gcccgacagtttagatacgactcgtctcgggatggga

SEQ ID NO: 12543 - DNA, 37 bp, Artificial Sequence
  Synthetic oligonucleotide
gccttcaccagccattagctgcagtcgtttaggacga

SEQ ID NO: 12544 - DNA, 37 bp, Artificial Sequence
  Synthetic oligonucleotide
gcgacgtttgtagtggctgagccgctgggtttgccga

SEQ ID NO: 12545 - DNA, 37 bp, Artificial Sequence
  Synthetic oligonucleotide
gctacgcttatcagccaaaggatgttcaccggcgtga

SEQ ID NO: 12546 - DNA, 36 bp, Artificial Sequence
  Synthetic oligonucleotide
gctagcctacgggccgcgtacccatccggcatagaa

SEQ ID NO: 12547 - DNA, 36 bp, Artificial Sequence
  Synthetic oligonucleotide
gctccgattatgcattgcttgtcttttggagaacga

SEQ ID NO: 12548 - DNA, 37 bp, Artificial Sequence
  Synthetic oligonucleotide
gctcgcgtaagcccccaaacgctcgctatactggtga

SEQ ID NO: 12549 - DNA, 36 bp, Artificial Sequence
  Synthetic oligonucleotide
gctgctcccgccttgagctggcttgcctcggtgaga

SEQ ID NO: 12550 - DNA, 35 bp, Artificial Sequence
  Synthetic oligonucleotide
ggaaaccgcacacttggagcgattggaaggactgg

SEQ ID NO: 12551 - DNA, 38 bp, Artificial Sequence
  Synthetic oligonucleotide
ggaatatacagggttgagtgcgcagccctgggagctga

SEQ ID NO: 12552 - DNA, 36 bp, Artificial Sequence
  Synthetic oligonucleotide
ggatttctcagtacgagagcacgacggttagctgta

SEQ ID NO: 12553 - DNA, 35 bp, Artificial Sequence
  Synthetic oligonucleotide
ggcctagagaggccttggtcgtaaaatatgcgtcg

SEQ ID NO: 12554 - DNA, 35 bp, Artificial Sequence
  Synthetic oligonucleotide
ggctcctgaaaccagtgtgaagtcgatttagcccc

SEQ ID NO: 12555 - DNA, 35 bp, Artificial Sequence
  Synthetic oligonucleotide
ggcttccctgcgacccatattggtcggatactgtt

SEQ ID NO: 12556 - DNA, 36 bp, Artificial Sequence
  Synthetic oligonucleotide
gggatagtgcctctcggaggtcgtcgccaagaggca

SEQ ID NO: 12557 - DNA, 38 bp, Artificial Sequence
  Synthetic oligonucleotide
ggggggatgactcgtatctcatcccaggtcactgtaga

SEQ ID NO: 12558 - DNA, 36 bp, Artificial Sequence
  Synthetic oligonucleotide
gggtctgacgtcccatcgtcaagacctttgtcttta

SEQ ID NO: 12559 - DNA, 36 bp, Artificial Sequence
  Synthetic oligonucleotide
ggtcggaaagtgctattcgccacaattgtttactta

SEQ ID NO: 12560 - DNA, 36 bp, Artificial Sequence
  Synthetic oligonucleotide
ggtttctgaattgagaggagaagtcccacgttacga

SEQ ID NO: 12561 - DNA, 36 bp, Artificial Sequence
  Synthetic oligonucleotide
gtaaagcccctatgtcatggacgtgtcgggctagga

SEQ ID NO: 12562 - DNA, 37 bp, Artificial Sequence
  Synthetic oligonucleotide
gtactctgggtcttggttaactggaacgtaccatgga

SEQ ID NO: 12563 - DNA, 35 bp, Artificial Sequence
  Synthetic oligonucleotide
gtactgggctcactggagtagacagacgatctgga

SEQ ID NO: 12564 - DNA, 35 bp, Artificial Sequence
  Synthetic oligonucleotide
gtattgcagactctatgcaggtaatgttggacaga

SEQ ID NO: 12565 - DNA, 37 bp, Artificial Sequence
  Synthetic oligonucleotide
gtccgggtttagcggaatagtcgcgccaggcataaga

SEQ ID NO: 12566 - DNA, 36 bp, Artificial Sequence
  Synthetic oligonucleotide
gtcgaaaaggcaaagtcacctgagtaacacgcacca

SEQ ID NO: 12567 - DNA, 37 bp, Artificial Sequence
  Synthetic oligonucleotide
gtcgatagttgaattgccgccgactgcgagaggagga

SEQ ID NO: 12568 - DNA, 35 bp, Artificial Sequence
  Synthetic oligonucleotide
gtctcgccagggaagaacccttatctaacgccttg

SEQ ID NO: 12569 - DNA, 38 bp, Artificial Sequence
  Synthetic oligonucleotide
gtctgattcgtcattttagtgcacatggacgcaagtga

SEQ ID NO: 12570 - DNA, 35 bp, Artificial Sequence
  Synthetic oligonucleotide
gtgcttgctgagtcatgaacttatatcttgtttac

SEQ ID NO: 12571 - DNA, 38 bp, Artificial Sequence
  Synthetic oligonucleotide
gtggggtattgcctcgtgcgtgtgtttgatgataatga

SEQ ID NO: 12572 - DNA, 38 bp, Artificial Sequence
  Synthetic oligonucleotide
gttcccgcataggatcaacgagagctcgcactcagtga

SEQ ID NO: 12573 - DNA, 36 bp, Artificial Sequence
  Synthetic oligonucleotide
gttctattctgtacgtctaaggttaacattccacta

SEQ ID NO: 12574 - DNA, 37 bp, Artificial Sequence
  Synthetic oligonucleotide
gttgggactgcacaattggtatcatagcgaaatcgga

SEQ ID NO: 12575 - DNA, 35 bp, Artificial Sequence
  Synthetic oligonucleotide
tacaagaaaggagtagtccgatcgtccgggtcatc

SEQ ID NO: 12576 - DNA, 37 bp, Artificial Sequence
  Synthetic oligonucleotide
tacaatggagtcacacgcttgtcgaggcctctagaga

SEQ ID NO: 12577 - DNA, 36 bp, Artificial Sequence
  Synthetic oligonucleotide
tacagatttatgcgtaatgcttccgtaactaaacaa

SEQ ID NO: 12578 - DNA, 35 bp, Artificial Sequence
  Synthetic oligonucleotide
tacaggggactctccttcaatgcgatatggtaact

SEQ ID NO: 12579 - DNA, 38 bp, Artificial Sequence
  Synthetic oligonucleotide
taccacacgacgtggagtgtacgctcgcccacttctga

SEQ ID NO: 12580 - DNA, 37 bp, Artificial Sequence
  Synthetic oligonucleotide
taccgttgtactgttgcagtatcatgacacgattcga

SEQ ID NO: 12581 - DNA, 36 bp, Artificial Sequence
  Synthetic oligonucleotide
tacgctcaaagcacatgccttggtcatatcccacca

SEQ ID NO: 12582 - DNA, 35 bp, Artificial Sequence
  Synthetic oligonucleotide
tactgatgtcaaaacagttcaatgtgctcaagctg

SEQ ID NO: 12583 - DNA, 38 bp, Artificial Sequence
  Synthetic oligonucleotide
tagcccctgggacttaaagtttaaaaggtactcgctga

SEQ ID NO: 12584 - DNA, 37 bp, Artificial Sequence
  Synthetic oligonucleotide
tagtcatgtcgatatagtgcgagatcaaaggtaatga

SEQ ID NO: 12585 - DNA, 35 bp, Artificial Sequence
  Synthetic oligonucleotide
tagtcggtgttactggtgggattacaattgcaata

SEQ ID NO: 12586 - DNA, 37 bp, Artificial Sequence
  Synthetic oligonucleotide
tagtttgtcgagtcatgattaacggcgagaccgttga

SEQ ID NO: 12587 - DNA, 37 bp, Artificial Sequence
  Synthetic oligonucleotide
tatcaggacaggatgggaccctgagtttgcaccttga

SEQ ID NO: 12588 - DNA, 34 bp, Artificial Sequence
  Synthetic oligonucleotide
tatcatgagtctcccgatagggaggtgtacgtga

SEQ ID NO: 12589 - DNA, 37 bp, Artificial Sequence
  Synthetic oligonucleotide
tatgcatcgacggggacacagggcaaagccctacgga

SEQ ID NO: 12590 - DNA, 35 bp, Artificial Sequence
  Synthetic oligonucleotide
tattacagggctacgtataggcatgtaggtgagtt

SEQ ID NO: 12591 - DNA, 36 bp, Artificial Sequence
  Synthetic oligonucleotide
tcacaaagggtttcactaggcgatggtgattgacga

SEQ ID NO: 12592 - DNA, 38 bp, Artificial Sequence
  Synthetic oligonucleotide
tcacaaggacacgaaggcctttaaagacatgctcttga

SEQ ID NO: 12593 - DNA, 35 bp, Artificial Sequence
  Synthetic oligonucleotide
tcactagctactgcggcatggtatccggatccatc

SEQ ID NO: 12594 - DNA, 38 bp, Artificial Sequence
  Synthetic oligonucleotide
tcatgcagacataatggggtttaattgaacaaacttga

SEQ ID NO: 12595 - DNA, 35 bp, Artificial Sequence
  Synthetic oligonucleotide
tccaactatcagggactcgagatttgcttagtttg

SEQ ID NO: 12596 - DNA, 37 bp, Artificial Sequence
  Synthetic oligonucleotide
tccatcatactttgagaacgggagatctgatgggaga

SEQ ID NO: 12597 - DNA, 35 bp, Artificial Sequence
  Synthetic oligonucleotide
tcccaagttgagacctccttcggaacagcgtaatg

SEQ ID NO: 12598 - DNA, 37 bp, Artificial Sequence
  Synthetic oligonucleotide
tcccagtgatcagcgtaacagctgatcagcggggaga

SEQ ID NO: 12599 - DNA, 35 bp, Artificial Sequence
  Synthetic oligonucleotide
tccccccctcgtatctacgagcccgatctgtgtcg

SEQ ID NO: 12600 - DNA, 35 bp, Artificial Sequence
  Synthetic oligonucleotide
tcccgtgtctgccaaaggattcgcagagctaagcc

SEQ ID NO: 12601 - DNA, 36 bp, Artificial Sequence
  Synthetic oligonucleotide
tcctatagcgagggaaggtggagcaaactgcaagga

SEQ ID NO: 12602 - DNA, 38 bp, Artificial Sequence
  Synthetic oligonucleotide
tcgtagctccagccagatattgaaggggcggaaagtga

SEQ ID NO: 12603 - DNA, 35 bp, Artificial Sequence
  Synthetic oligonucleotide
tcgtatcatggctacggataattttaccacaaggt

SEQ ID NO: 12604 - DNA, 37 bp, Artificial Sequence
  Synthetic oligonucleotide
tctccaaggtgtgattaataggtgaacacggatgcga

SEQ ID NO: 12605 - DNA, 36 bp, Artificial Sequence
  Synthetic oligonucleotide
tgacaatgaccaccgtgagcatgagtttgtccgcta

SEQ ID NO: 12606 - DNA, 38 bp, Artificial Sequence
  Synthetic oligonucleotide
tgacgtaacgtgaattacttcggaaggggtgctgctga

SEQ ID NO: 12607 - DNA, 35 bp, Artificial Sequence
  Synthetic oligonucleotide
tgatatcagcacgttgatcagaggcttataataac

SEQ ID NO: 12608 - DNA, 38 bp, Artificial Sequence
  Synthetic oligonucleotide
tgatcgacgccatcacggaatgatgaggattgtcatga

SEQ ID NO: 12609 - DNA, 38 bp, Artificial Sequence
  Synthetic oligonucleotide
tggcttcgaactctgtgatggaaagggtctcgaaatga

SEQ ID NO: 12610 - DNA, 37 bp, Artificial Sequence
  Synthetic oligonucleotide
tgggagtgcaaccgaaaatttacaaagtagtgctcga

SEQ ID NO: 12611 - DNA, 37 bp, Artificial Sequence
  Synthetic oligonucleotide
tgtacttgatgggcccatgattcagtacgactaatga

SEQ ID NO: 12612 - DNA, 36 bp, Artificial Sequence
  Synthetic oligonucleotide
tgttccgtagagttgtatgacgagccatgcattgga

SEQ ID NO: 12613 - DNA, 38 bp, Artificial Sequence
  Synthetic oligonucleotide
ttcaacactcgccgggaacttcatgctagacgcgatga

SEQ ID NO: 12614 - DNA, 36 bp, Artificial Sequence
  Synthetic oligonucleotide
ttcatcacatgtaaacaattgatggtcatgtcttga

SEQ ID NO: 12615 - DNA, 35 bp, Artificial Sequence
  Synthetic oligonucleotide
ttccccgttgctgtgacggctctgccacggacaca

SEQ ID NO: 12616 - DNA, 35 bp, Artificial Sequence
  Synthetic oligonucleotide
tttggtcggagtcatgggccatagtgtgtgcgcaa

SEQ ID NO: 12617 - DNA, 35 bp, Artificial Sequence
  Synthetic oligonucleotide
gtgtattgcgtgcgtattgatcgaaccaagtccaa

SEQ ID NO: 12618 - DNA, 38 bp, Artificial Sequence
  Synthetic oligonucleotide
tcgcaagctggtaggtgaatctagacgaagagtggtga

SEQ ID NO: 12619 - DNA, 36 bp, Artificial Sequence
  Synthetic oligonucleotide
tggtcgacgtacatgcgttgtttgaggcttatggta

SEQ ID NO: 12620 - DNA, 36 bp, Artificial Sequence
  Synthetic oligonucleotide
acgttccgagcacggtttatctgttggtatgtagta

SEQ ID NO: 12621 - DNA, 36 bp, Artificial Sequence
  Synthetic oligonucleotide
ctgcttagtcgtactatgtttgggttttggtgtgaa

SEQ ID NO: 12622 - DNA, 37 bp, Artificial Sequence
  Synthetic oligonucleotide
gcaaggcaatacagagtcagactggtttctttttaga

SEQ ID NO: 12623 - DNA, 38 bp, Artificial Sequence
  Synthetic oligonucleotide
gctgtaccttagtttgcccccctttacaggaacagtga

SEQ ID NO: 12624 - DNA, 35 bp, Artificial Sequence
  Synthetic oligonucleotide
gtcatgtagagtaatgggtcaagtatatgaatgtt

SEQ ID NO: 12625 - DNA, 38 bp, Artificial Sequence
  Synthetic oligonucleotide
tggtgtaactactagatgtctatcgaaatggtcggtga

SEQ ID NO: 12626 - DNA, 35 bp, Artificial Sequence
  Synthetic oligonucleotide
ttgctgccttaggggggtaattggtgggagtcgtt

SEQ ID NO: 12627 - DNA, 38 bp, Artificial Sequence
  Synthetic oligonucleotide
tttgctggcgatatagtgttttcatggtgttccattga

SEQ ID NO: 12628 - DNA, 35 bp, Artificial Sequence
  Synthetic oligonucleotide
aactggcgccgccctgacacagttcgagtggatac

SEQ ID NO: 12629 - DNA, 38 bp, Artificial Sequence
  Synthetic oligonucleotide
aatgtctggtcctactggttttaggtgccaggtgttga

SEQ ID NO: 12630 - DNA, 35 bp, Artificial Sequence
  Synthetic oligonucleotide
acagtgattggtacgaagctttagcacgtttacct

SEQ ID NO: 12631 - DNA, 37 bp, Artificial Sequence
  Synthetic oligonucleotide
acccaaagcttaaatggattgtatcaacctgtcgcga

SEQ ID NO: 12632 - DNA, 35 bp, Artificial Sequence
  Synthetic oligonucleotide
acccgttgtgaggtcttttgggttaacaggagtta

SEQ ID NO: 12633 - DNA, 35 bp, Artificial Sequence
  Synthetic oligonucleotide
agacacacggacgccggtgcgtttcggtaccccgg

SEQ ID NO: 12634 - DNA, 35 bp, Artificial Sequence
  Synthetic oligonucleotide
agcgggatgggcgtattatccgtcataagtggcaa

SEQ ID NO: 12635 - DNA, 35 bp, Artificial Sequence
  Synthetic oligonucleotide
agggatgaggcgttgtgttactctctttaggtagg

SEQ ID NO: 12636 - DNA, 36 bp, Artificial Sequence
  Synthetic oligonucleotide
ataccccaggctgtggtcagcttttgccccctgcaa

SEQ ID NO: 12637 - DNA, 37 bp, Artificial Sequence
  Synthetic oligonucleotide
atacgcattcttctgggccctattcgtagaggtagga

SEQ ID NO: 12638 - DNA, 36 bp, Artificial Sequence
  Synthetic oligonucleotide
atccaccgagcttcgcgacgaggataccaaatctca

SEQ ID NO: 12639 - DNA, 36 bp, Artificial Sequence
  Synthetic oligonucleotide
atgtcacagtcgttttagtaattatataccaaggta

SEQ ID NO: 12640 - DNA, 36 bp, Artificial Sequence
  Synthetic oligonucleotide
caaactgaggacgtgctcatggttaatattatcaga

SEQ ID NO: 12641 - DNA, 36 bp, Artificial Sequence
  Synthetic oligonucleotide
cacacgccggcatatctgcgcgagcgtgttgctata

SEQ ID NO: 12642 - DNA, 36 bp, Artificial Sequence
  Synthetic oligonucleotide
cacggcgtaagacagctggtcacatgtggtcttaca

SEQ ID NO: 12643 - DNA, 36 bp, Artificial Sequence
  Synthetic oligonucleotide
ccgacgtacctgcgtctgcgagcgagacgtgtaata

SEQ ID NO: 12644 - DNA, 37 bp, Artificial Sequence
  Synthetic oligonucleotide
cctggaggacgtcatgtggacggttgaaggcttggga

SEQ ID NO: 12645 - DNA, 37 bp, Artificial Sequence
  Synthetic oligonucleotide
gaagctcaagtacttaggtggcattattatagtgtga

SEQ ID NO: 12646 - DNA, 38 bp, Artificial Sequence
  Synthetic oligonucleotide
gagaaaggcccactaaataggtttcgcacgtaccgtga

SEQ ID NO: 12647 - DNA, 35 bp, Artificial Sequence
  Synthetic oligonucleotide
gatcttcacagtacacgggtaacaaatgcggtaaa

SEQ ID NO: 12648 - DNA, 37 bp, Artificial Sequence
  Synthetic oligonucleotide
gcacctccagcaacgttaatatcaattgggacgccga

SEQ ID NO: 12649 - DNA, 36 bp, Artificial Sequence
  Synthetic oligonucleotide
gcagagattcccgtggaagcgaggaatatgaaacaa

SEQ ID NO: 12650 - DNA, 38 bp, Artificial Sequence
  Synthetic oligonucleotide
gccgagtaataggatcgagggacttgaggcgagagtga

SEQ ID NO: 12651 - DNA, 35 bp, Artificial Sequence
  Synthetic oligonucleotide
gcctgacgtgtatgggaacggaccgattaccagta

SEQ ID NO: 12652 - DNA, 36 bp, Artificial Sequence
  Synthetic oligonucleotide
gcgacggattatttttcgcagtcgctgtaaggtaaa

SEQ ID NO: 12653 - DNA, 37 bp, Artificial Sequence
  Synthetic oligonucleotide
gcggagggaaagacctgctaattgggacttgatacga

SEQ ID NO: 12654 - DNA, 38 bp, Artificial Sequence
  Synthetic oligonucleotide
gcggttcgtggtcggatccggctctgagcacatactga

SEQ ID NO: 12655 - DNA, 37 bp, Artificial Sequence
  Synthetic oligonucleotide
gctgcagggcacagggcattatgtttttattatctga

SEQ ID NO: 12656 - DNA, 36 bp, Artificial Sequence
  Synthetic oligonucleotide
ggggttgtttttggtgttttagtttttagctggtta

SEQ ID NO: 12657 - DNA, 37 bp, Artificial Sequence
  Synthetic oligonucleotide
gtaaaggacatagtgacaatacttattgcccaagcga

SEQ ID NO: 12658 - DNA, 36 bp, Artificial Sequence
  Synthetic oligonucleotide
gtagagtgcctttgcaattacagtaaactaattgga

SEQ ID NO: 12659 - DNA, 37 bp, Artificial Sequence
  Synthetic oligonucleotide
gtcccacgtggaataagttcgcggcccgtcgacccga

SEQ ID NO: 12660 - DNA, 35 bp, Artificial Sequence
  Synthetic oligonucleotide
gtccgtagggagtataaaattacggattgaaatgc

SEQ ID NO: 12661 - DNA, 38 bp, Artificial Sequence
  Synthetic oligonucleotide
gtggttcgactaacacgtgataatgtctagttctatga

SEQ ID NO: 12662 - DNA, 35 bp, Artificial Sequence
  Synthetic oligonucleotide
gtgtttacatgtggtcggcttggctaggggtagca

SEQ ID NO: 12663 - DNA, 38 bp, Artificial Sequence
  Synthetic oligonucleotide
gttaggaaacacgacgcacatctattgggtgactttga

SEQ ID NO: 12664 - DNA, 36 bp, Artificial Sequence
  Synthetic oligonucleotide
tacacgtgaatagcttgtaaagcttttacacgtcca

SEQ ID NO: 12665 - DNA, 37 bp, Artificial Sequence
  Synthetic oligonucleotide
tacattactgtgagactatctatataagtgccctcga

SEQ ID NO: 12666 - DNA, 36 bp, Artificial Sequence
  Synthetic oligonucleotide
tagtagcaaatctaggaatgacagtcgtcgcccaga

SEQ ID NO: 12667 - DNA, 37 bp, Artificial Sequence
  Synthetic oligonucleotide
tagtcagggacacttttgacacctgagtagactggga

SEQ ID NO: 12668 - DNA, 35 bp, Artificial Sequence
  Synthetic oligonucleotide
tagtcgtgatggagtgcgcatatattcggttaaat

SEQ ID NO: 12669 - DNA, 35 bp, Artificial Sequence
  Synthetic oligonucleotide
tctgggaacgtatggacgaaggggtgggacgacct

SEQ ID NO: 12670 - DNA, 38 bp, Artificial Sequence
  Synthetic oligonucleotide
tgaagagggagtgccatccggaatgctcggggtgatga

SEQ ID NO: 12671 - DNA, 36 bp, Artificial Sequence
  Synthetic oligonucleotide
tgaggaaccgccgacgatgcccgtttccgaaacaca

SEQ ID NO: 12672 - DNA, 36 bp, Artificial Sequence
  Synthetic oligonucleotide
tgaggacaaatacactgggttctgcccggtccggta

SEQ ID NO: 12673 - DNA, 37 bp, Artificial Sequence
  Synthetic oligonucleotide
tgagtaaatattaaacagtgactgtagtaggttgtga

SEQ ID NO: 12674 - DNA, 35 bp, Artificial Sequence
  Synthetic oligonucleotide
tgagttggtttgactgaaaagggtctaatgtcatg

SEQ ID NO: 12675 - DNA, 37 bp, Artificial Sequence
  Synthetic oligonucleotide
tgatatcgcgtaggtactggcactagttccatggcga

SEQ ID NO: 12676 - DNA, 38 bp, Artificial Sequence
  Synthetic oligonucleotide
tgcacagaaaccgggcgactggagctgacagtgcttga

SEQ ID NO: 12677 - DNA, 36 bp, Artificial Sequence
  Synthetic oligonucleotide
tgccatgcccgttgacttcatggccaggctatttca

SEQ ID NO: 12678 - DNA, 35 bp, Artificial Sequence
  Synthetic oligonucleotide
tgctccttaaagcgcttgtaccgggttcttaggac

SEQ ID NO: 12679 - DNA, 37 bp, Artificial Sequence
  Synthetic oligonucleotide
tgggtctaagacaatcatgatccggaccgttccacga

SEQ ID NO: 12680 - DNA, 37 bp, Artificial Sequence
  Synthetic oligonucleotide
tgtaccacgtcttagttcatacattttgtcttgcgga

SEQ ID NO: 12681 - DNA, 36 bp, Artificial Sequence
  Synthetic oligonucleotide
tgtcacagccgggatcacctggggttctttatggta

SEQ ID NO: 12682 - DNA, 38 bp, Artificial Sequence
  Synthetic oligonucleotide
tgtctttgcataactgtgggcgagatagtgctgcttga

SEQ ID NO: 12683 - DNA, 35 bp, Artificial Sequence
  Synthetic oligonucleotide
tgttgttagaatcgcggccaaattttgtgggtgta

SEQ ID NO: 12684 - DNA, 36 bp, Artificial Sequence
  Synthetic oligonucleotide
ttgggaccacgcacagggagaacacaggagaatcca

SEQ ID NO: 12685 - DNA, 37 bp, Artificial Sequence
  Synthetic oligonucleotide
gcagtcactgtcaactttgagggttgaacggtctcga

SEQ ID NO: 12686 - DNA, 38 bp, Artificial Sequence
  Synthetic oligonucleotide
aatacgcacaaaagatcgtatttacttaaaggcgatga

SEQ ID NO: 12687 - DNA, 35 bp, Artificial Sequence
  Synthetic oligonucleotide
gggtgagatcggcctgtaagaaagtggtacaaggt

SEQ ID NO: 12688 - DNA, 38 bp, Artificial Sequence
  Synthetic oligonucleotide
taacctgcgccctagtcaggggacgggaggaggactga

SEQ ID NO: 12689 - DNA, 37 bp, Artificial Sequence
  Synthetic oligonucleotide
acaggggttcgactgggaggctggtttgttagggtga

SEQ ID NO: 12690 - DNA, 35 bp, Artificial Sequence
  Synthetic oligonucleotide
gtttgcttcacgatagagtagaatacttcgtgtta

SEQ ID NO: 12691 - DNA, 35 bp, Artificial Sequence
  Synthetic oligonucleotide
tagcacttacaattacggggtttgacagtagcatc

SEQ ID NO: 12692 - DNA, 36 bp, Artificial Sequence
  Synthetic oligonucleotide
tatgctgtattgtggatcagcagtagggggaacgca

SEQ ID NO: 12693 - DNA, 36 bp, Artificial Sequence
  Synthetic oligonucleotide
aaacagtgctgtatattgtttgtcattctacatgaa

SEQ ID NO: 12694 - DNA, 37 bp, Artificial Sequence
  Synthetic oligonucleotide
aaccggtggtcagttcaccggcttcgtgctccccgga

SEQ ID NO: 12695 - DNA, 37 bp, Artificial Sequence
  Synthetic oligonucleotide
acacgtacggcattatctgaccatgatagccctcaga

SEQ ID NO: 12696 - DNA, 35 bp, Artificial Sequence
  Synthetic oligonucleotide
acctttgcactacacggttcagtctaaacgttagc

SEQ ID NO: 12697 - DNA, 38 bp, Artificial Sequence
  Synthetic oligonucleotide
acgtagctagttccgcgcggtgaatcgtcatgcaatga

SEQ ID NO: 12698 - DNA, 35 bp, Artificial Sequence
  Synthetic oligonucleotide
actcatcaattgtgcggtgagtgattgactacttt

SEQ ID NO: 12699 - DNA, 37 bp, Artificial Sequence
  Synthetic oligonucleotide
actgcgacgtcaatcggttttaaattctacatggtga

SEQ ID NO: 12700 - DNA, 38 bp, Artificial Sequence
  Synthetic oligonucleotide
agagggcaacgccgaagggtgaactcgaagactggtga

SEQ ID NO: 12701 - DNA, 37 bp, Artificial Sequence
  Synthetic oligonucleotide
agccaggcgttattttcccacaattcccgcgtcgcga

SEQ ID NO: 12702 - DNA, 36 bp, Artificial Sequence
  Synthetic oligonucleotide
aggtcgacctaaagtgggaatgacgtcctcgttaca

SEQ ID NO: 12703 - DNA, 37 bp, Artificial Sequence
  Synthetic oligonucleotide
aggttttacgttgcattcccgggtcacaagttcatga

SEQ ID NO: 12704 - DNA, 36 bp, Artificial Sequence
  Synthetic oligonucleotide
atggagagacgcacagtacatcatatacgtcctcga

SEQ ID NO: 12705 - DNA, 35 bp, Artificial Sequence
  Synthetic oligonucleotide
cctccagctgttaatctaactgtacttggaacgcg

SEQ ID NO: 12706 - DNA, 37 bp, Artificial Sequence
  Synthetic oligonucleotide
ctgaacgtttcgcctttgtcagatagactgtctcgga

SEQ ID NO: 12707 - DNA, 38 bp, Artificial Sequence
  Synthetic oligonucleotide
cttatcacccacggtcgttaaacagcccaagagcatga

SEQ ID NO: 12708 - DNA, 37 bp, Artificial Sequence
  Synthetic oligonucleotide
gaagacggtcgggatgtctggatgtccgtccacaaga

SEQ ID NO: 12709 - DNA, 37 bp, Artificial Sequence
  Synthetic oligonucleotide
gaagactaacacaacaggccctttttctatgttgaga

SEQ ID NO: 12710 - DNA, 37 bp, Artificial Sequence
  Synthetic oligonucleotide
gaccctgggctccgcagtcgcgcggtagtcaaccgga

SEQ ID NO: 12711 - DNA, 35 bp, Artificial Sequence
  Synthetic oligonucleotide
gagatcgacattattaaggggcgcgatacgttatg

SEQ ID NO: 12712 - DNA, 37 bp, Artificial Sequence
  Synthetic oligonucleotide
gcctgctgtcggagcgatacaactagcgctgcaccga

SEQ ID NO: 12713 - DNA, 35 bp, Artificial Sequence
  Synthetic oligonucleotide
gctcatcaggacttcctctcgcggctctttactcc

SEQ ID NO: 12714 - DNA, 38 bp, Artificial Sequence
  Synthetic oligonucleotide
ggacttgtcatgaacgtctttacacatctgacgtttga

SEQ ID NO: 12715 - DNA, 35 bp, Artificial Sequence
  Synthetic oligonucleotide
ggagtagattggccatctcatgctgtcatgggggg

SEQ ID NO: 12716 - DNA, 37 bp, Artificial Sequence
  Synthetic oligonucleotide
gggtaggtgtcttgattagaatgacattagcattcga

SEQ ID NO: 12717 - DNA, 35 bp, Artificial Sequence
  Synthetic oligonucleotide
ggtgccttcatgtcgagttgaggccgattgggatc

SEQ ID NO: 12718 - DNA, 35 bp, Artificial Sequence
  Synthetic oligonucleotide
ggtgcgaaactttgccccgggctcagatcttacag

SEQ ID NO: 12719 - DNA, 38 bp, Artificial Sequence
  Synthetic oligonucleotide
gtaatgttggaatgatgtacaacatgactagggcttga

SEQ ID NO: 12720 - DNA, 38 bp, Artificial Sequence
  Synthetic oligonucleotide
gtaccagagtccgtagtggacatagtcaatcactctga

SEQ ID NO: 12721 - DNA, 35 bp, Artificial Sequence
  Synthetic oligonucleotide
gtgcgcagctcacgtgcacatgttcttaattcggc

SEQ ID NO: 12722 - DNA, 37 bp, Artificial Sequence
  Synthetic oligonucleotide
gtgctcgataaacgggcgtggtttcgaagggttacga

SEQ ID NO: 12723 - DNA, 37 bp, Artificial Sequence
  Synthetic oligonucleotide
gtgggtgcgcacgtggcgctccaactcaggttgtgga

SEQ ID NO: 12724 - DNA, 37 bp, Artificial Sequence
  Synthetic oligonucleotide
taacggcctaagcattcccgttggaatcggtaataga

SEQ ID NO: 12725 - DNA, 38 bp, Artificial Sequence
  Synthetic oligonucleotide
taatcctgatcttagactttacaggtaagcactgctga

SEQ ID NO: 12726 - DNA, 35 bp, Artificial Sequence
  Synthetic oligonucleotide
tacacgggcttgcaacatgggatatgcgacactca

SEQ ID NO: 12727 - DNA, 38 bp, Artificial Sequence
  Synthetic oligonucleotide
tacctagttagcgtggtgcgtgcgggtaatgaagttga

SEQ ID NO: 12728 - DNA, 36 bp, Artificial Sequence
  Synthetic oligonucleotide
tagatttctgctgtccccctggtaaactccgaacta

SEQ ID NO: 12729 - DNA, 38 bp, Artificial Sequence
  Synthetic oligonucleotide
tatatgtagtggggcatatgttctggatgccgttctga

SEQ ID NO: 12730 - DNA, 37 bp, Artificial Sequence
  Synthetic oligonucleotide
tccgttgggagaagttttatgatagcctttagagcga

SEQ ID NO: 12731 - DNA, 35 bp, Artificial Sequence
  Synthetic oligonucleotide
tcgaatggattcgttattagtatgcgacttggtac

SEQ ID NO: 12732 - DNA, 36 bp, Artificial Sequence
  Synthetic oligonucleotide
tctgcaattggtacctggtggtgacggggacgggga

SEQ ID NO: 12733 - DNA, 36 bp, Artificial Sequence
  Synthetic oligonucleotide
tggtccgatcgaaataggttccaatactcggtcgga

SEQ ID NO: 12734 - DNA, 35 bp, Artificial Sequence
  Synthetic oligonucleotide
tgttccgtgtacaacagaacgtacggcggtacctg

SEQ ID NO: 12735 - DNA, 36 bp, Artificial Sequence
  Synthetic oligonucleotide
ttagggactccctgtggacgagggtgtccgaacaaa

SEQ ID NO: 12736 - DNA, 37 bp, Artificial Sequence
  Synthetic oligonucleotide
ttatggtcggagttcaaagccccagcgcactgaccga

SEQ ID NO: 12737 - DNA, 38 bp, Artificial Sequence
  Synthetic oligonucleotide
tttgcggtttgctagcatggtttctataccaattatga

SEQ ID NO: 12738 - DNA, 37 bp, Artificial Sequence
  Synthetic oligonucleotide
gctccagtgcatggcggggatatggtttgtttattga

SEQ ID NO: 12739 - DNA, 38 bp, Artificial Sequence
  Synthetic oligonucleotide
tgacccagtaatagactttttgggtccggttttgttga

SEQ ID NO: 12740 - DNA, 38 bp, Artificial Sequence
  Synthetic oligonucleotide
gcttactacccccccgcgtaagtctggtcgtgatttga

SEQ ID NO: 12741 - DNA, 35 bp, Artificial Sequence
  Synthetic oligonucleotide
acatcccagcagatcatggtaggagaatgtgaaat

SEQ ID NO: 12742 - DNA, 36 bp, Artificial Sequence
  Synthetic oligonucleotide
acgtacgggtgcgcgcataaacacgagcgtgattga

SEQ ID NO: 12743 - DNA, 38 bp, Artificial Sequence
  Synthetic oligonucleotide
agtgctcaatttcaagcgagtaattgctaaactagtga

SEQ ID NO: 12744 - DNA, 38 bp, Artificial Sequence
  Synthetic oligonucleotide
atatctctctcagtgagttttgaacgtggtaggcttga

SEQ ID NO: 12745 - DNA, 35 bp, Artificial Sequence
  Synthetic oligonucleotide
cacaaggggtgcctgtaccaattgcgactgtaggt

SEQ ID NO: 12746 - DNA, 38 bp, Artificial Sequence
  Synthetic oligonucleotide
ccatgacgagacggctggagatcgcttagagcaaatga

SEQ ID NO: 12747 - DNA, 38 bp, Artificial Sequence
  Synthetic oligonucleotide
gaatttcacgactaccggtatcccagaactaagtctga

SEQ ID NO: 12748 - DNA, 36 bp, Artificial Sequence
  Synthetic oligonucleotide
gactgtaatggcgctatacacaaccttaggtcccta

SEQ ID NO: 12749 - DNA, 37 bp, Artificial Sequence
  Synthetic oligonucleotide
gctactaacaggggcaaggcaacagaggaacgaagga

SEQ ID NO: 12750 - DNA, 37 bp, Artificial Sequence
  Synthetic oligonucleotide
gctccccagtcgccttcgattccgtcgccccagctga

SEQ ID NO: 12751 - DNA, 35 bp, Artificial Sequence
  Synthetic oligonucleotide
gctcccgcttgacgtgtgtccgagatttttgcatt

SEQ ID NO: 12752 - DNA, 38 bp, Artificial Sequence
  Synthetic oligonucleotide
ggccaagactgttctcgttaccaatggtcacagggtga

SEQ ID NO: 12753 - DNA, 36 bp, Artificial Sequence
  Synthetic oligonucleotide
ggggaatcaccgttatccggctctgcatggatatta

SEQ ID NO: 12754 - DNA, 35 bp, Artificial Sequence
  Synthetic oligonucleotide
ggtactgactaggccagactggacattcacacccg

SEQ ID NO: 12755 - DNA, 36 bp, Artificial Sequence
  Synthetic oligonucleotide
ggtttgtcagcccacaggatcgtaccacgtgcaaga

SEQ ID NO: 12756 - DNA, 38 bp, Artificial Sequence
  Synthetic oligonucleotide
gtaagtagagagtatttgtggtgacgacctacggttga

SEQ ID NO: 12757 - DNA, 36 bp, Artificial Sequence
  Synthetic oligonucleotide
gtaccacgttagtgcgctgactccgtacgtaggtga

SEQ ID NO: 12758 - DNA, 36 bp, Artificial Sequence
  Synthetic oligonucleotide
gtcgctactgggaaatagcactgcgtatgtggaata

SEQ ID NO: 12759 - DNA, 35 bp, Artificial Sequence
  Synthetic oligonucleotide
gtgacaggaccgaaggcgaagatttgatacacacg

SEQ ID NO: 12760 - DNA, 36 bp, Artificial Sequence
  Synthetic oligonucleotide
gtgtacgcgcaaaagcgggttacagcatagaatcaa

SEQ ID NO: 12761 - DNA, 35 bp, Artificial Sequence
  Synthetic oligonucleotide
gtttgaccaatgattggttaaacttggatgtttcc

SEQ ID NO: 12762 - DNA, 37 bp, Artificial Sequence
  Synthetic oligonucleotide
tagacaacgtacagtctcatgtagctcggatgaatga

SEQ ID NO: 12763 - DNA, 36 bp, Artificial Sequence
  Synthetic oligonucleotide
tccggcgtcgtactgttcatacgacgtaattacgga

SEQ ID NO: 12764 - DNA, 36 bp, Artificial Sequence
  Synthetic oligonucleotide
ttttcaaactggaccgtacgttctggaccagtggga

SEQ ID NO: 12765 - DNA, 36 bp, Artificial Sequence
  Synthetic oligonucleotide
ttggatatccgtacggaacgaattttacgcaacgaa

SEQ ID NO: 12766 - DNA, 35 bp, Artificial Sequence
  Synthetic oligonucleotide
taagccattgaaagatggattcgagtcgcaatcta

SEQ ID NO: 12767 - DNA, 37 bp, Artificial Sequence
  Synthetic oligonucleotide
agatacctggtgtttctgcgtggtactagggtactga

SEQ ID NO: 12768 - DNA, 37 bp, Artificial Sequence
  Synthetic oligonucleotide
atacgcactctctagagtatatgtaatatatcgacga

SEQ ID NO: 12769 - DNA, 38 bp, Artificial Sequence
  Synthetic oligonucleotide
aatatcggagacagagaacccggcgctcttgagcttga

SEQ ID NO: 12770 - DNA, 35 bp, Artificial Sequence
  Synthetic oligonucleotide
acatggggccaaattcggaggatggggacggagtg

SEQ ID NO: 12771 - DNA, 36 bp, Artificial Sequence
  Synthetic oligonucleotide
acctgggggtgccttaggtcacgacgactggagcca

SEQ ID NO: 12772 - DNA, 38 bp, Artificial Sequence
  Synthetic oligonucleotide
actacaccgacttttgtttcataggttcatgcttgtga

SEQ ID NO: 12773 - DNA, 37 bp, Artificial Sequence
  Synthetic oligonucleotide
atcaaatcgtcacttgtccagtttgagttgtatcgga

SEQ ID NO: 12774 - DNA, 36 bp, Artificial Sequence
  Synthetic oligonucleotide
catgggaccaccttagataatcagtcagggaaacaa

SEQ ID NO: 12775 - DNA, 35 bp, Artificial Sequence
  Synthetic oligonucleotide
gaagtgaggtggcacaattcacaatgcagaacgga

SEQ ID NO: 12776 - DNA, 38 bp, Artificial Sequence
  Synthetic oligonucleotide
gagaatcaggcgcatggtttcggtgagccaggacatga

SEQ ID NO: 12777 - DNA, 36 bp, Artificial Sequence
  Synthetic oligonucleotide
gcatagactggtctcgcgcggagtatggtcaattca

SEQ ID NO: 12778 - DNA, 35 bp, Artificial Sequence
  Synthetic oligonucleotide
gcgatccgaacttctagatgaggatgagctactgg

SEQ ID NO: 12779 - DNA, 37 bp, Artificial Sequence
  Synthetic oligonucleotide
gctttcgtcacatgcaaagcggatcagctggcttcga

SEQ ID NO: 12780 - DNA, 38 bp, Artificial Sequence
  Synthetic oligonucleotide
gtccactgaaagtataagtacgctgacattacccgtga

SEQ ID NO: 12781 - DNA, 36 bp, Artificial Sequence
  Synthetic oligonucleotide
tatactgcacgcattgacttagggtcatttacgaca

SEQ ID NO: 12782 - DNA, 38 bp, Artificial Sequence
  Synthetic oligonucleotide
tcaagccggagtggagattacagttggattagggatga

SEQ ID NO: 12783 - DNA, 36 bp, Artificial Sequence
  Synthetic oligonucleotide
tcacgcggaacacggtcaatcatggatgtaactata

SEQ ID NO: 12784 - DNA, 37 bp, Artificial Sequence
  Synthetic oligonucleotide
ggtccacccagattccctcccccccgtggtggtgcga

SEQ ID NO: 12785 - DNA, 38 bp, Artificial Sequence
  Synthetic oligonucleotide
acaacttcaggccagttgatacttacagccagttctga

SEQ ID NO: 12786 - DNA, 36 bp, Artificial Sequence
  Synthetic oligonucleotide
atgtactgccaaggaatggtctattctggttgttaa

SEQ ID NO: 12787 - DNA, 36 bp, Artificial Sequence
  Synthetic oligonucleotide
tacgagattgggttggtgtgggttctttcccagtga

SEQ ID NO: 12788 - DNA, 37 bp, Artificial Sequence
  Synthetic oligonucleotide
ttactggggctggattgtacccaatgtgtgcttgcga

SEQ ID NO: 12789 - DNA, 37 bp, Artificial Sequence
  Synthetic oligonucleotide
aaactcgtgtactaatccacagatgagttcactctga

SEQ ID NO: 12790 - DNA, 37 bp, Artificial Sequence
  Synthetic oligonucleotide
agaggctgtagccggggcctgttgtaatgcaagtaga

SEQ ID NO: 12791 - DNA, 35 bp, Artificial Sequence
  Synthetic oligonucleotide
cacacgactttaatgcaagtatccgggaagttggt

SEQ ID NO: 12792 - DNA, 37 bp, Artificial Sequence
  Synthetic oligonucleotide
gctcactctatgtaggcctcccgtggttcacaattga

SEQ ID NO: 12793 - DNA, 35 bp, Artificial Sequence
  Synthetic oligonucleotide
ggtttcgcgggtgttaggaaaagtgggtctgggag

SEQ ID NO: 12794 - DNA, 38 bp, Artificial Sequence
  Synthetic oligonucleotide
gtactgacgctctgatggctataggacatgtctcctga

SEQ ID NO: 12795 - DNA, 38 bp, Artificial Sequence
  Synthetic oligonucleotide
gtgggtctcagaaactgcgttaacgtaacccttcctga

SEQ ID NO: 12796 - DNA, 35 bp, Artificial Sequence
  Synthetic oligonucleotide
tattcggaaacacgtgacgttgaagcagttgtgca

SEQ ID NO: 12797 - DNA, 36 bp, Artificial Sequence
  Synthetic oligonucleotide
tgcaccatgaccaatgtaagtaataaacgctcctca

SEQ ID NO: 12798 - DNA, 35 bp, Artificial Sequence
  Synthetic oligonucleotide
gacgagatgtgaattcctgcagtccagggagggtg

SEQ ID NO: 12799 - DNA, 38 bp, Artificial Sequence
  Synthetic oligonucleotide
gacgtagggtagggccaggccccatattgaggaaaaga

SEQ ID NO: 12800 - DNA, 35 bp, Artificial Sequence
  Synthetic oligonucleotide
gcacatcacgttggacgagctaaagattcgcagtc

SEQ ID NO: 12801 - DNA, 37 bp, Artificial Sequence
  Synthetic oligonucleotide
gacgcgctgctgtgtgcacgtaaagcattgtgattga

SEQ ID NO: 12802 - DNA, 38 bp, Artificial Sequence
  Synthetic oligonucleotide
aggtccaacaagggcatggtctcggtcagtattaatga

SEQ ID NO: 12803 - DNA, 35 bp, Artificial Sequence
  Synthetic oligonucleotide
ccggaactggtgtcatcttcagtattgtcgcgtac

SEQ ID NO: 12804 - DNA, 37 bp, Artificial Sequence
  Synthetic oligonucleotide
aagtggcacatacgtgggaagcacactctacgctaga

SEQ ID NO: 12805 - DNA, 35 bp, Artificial Sequence
  Synthetic oligonucleotide
ggtgtacaatccgcatgtgaaatggacaaaactgc

SEQ ID NO: 12806 - DNA, 38 bp, Artificial Sequence
  Synthetic oligonucleotide
aaaaggcccacccaccatcaatagttcggtcggactga

SEQ ID NO: 12807 - DNA, 35 bp, Artificial Sequence
  Synthetic oligonucleotide
aacagaagatgctgaaattgacaatcgccgatcgc

SEQ ID NO: 12808 - DNA, 34 bp, Artificial Sequence
  Synthetic oligonucleotide
aaccctaccggtctgagttggtgtggcttcacac

SEQ ID NO: 12809 - DNA, 37 bp, Artificial Sequence
  Synthetic oligonucleotide
aacggatttgagtcggatttaatcagtactttaatga

SEQ ID NO: 12810 - DNA, 38 bp, Artificial Sequence
  Synthetic oligonucleotide
aagaaagcgcagcttgaatgctccagtctcctaggtga

SEQ ID NO: 12811 - DNA, 36 bp, Artificial Sequence
  Synthetic oligonucleotide
aaggagtggcttagttctattctttagctcaggcca

SEQ ID NO: 12812 - DNA, 37 bp, Artificial Sequence
  Synthetic oligonucleotide
aatcggttcaagcgacccaagacgagagacgtgatga

SEQ ID NO: 12813 - DNA, 35 bp, Artificial Sequence
  Synthetic oligonucleotide
aatctgcggggtaacctctctactacgctactgct

SEQ ID NO: 12814 - DNA, 38 bp, Artificial Sequence
  Synthetic oligonucleotide
aatgccatatcaaccacacttgcctgacaagtacgtga

SEQ ID NO: 12815 - DNA, 36 bp, Artificial Sequence
  Synthetic oligonucleotide
acaaacggtctcctttgacttagggcgtactaaaga

SEQ ID NO: 12816 - DNA, 35 bp, Artificial Sequence
  Synthetic oligonucleotide
acaaaggagattcagtgccgggcgagagaattatt

SEQ ID NO: 12817 - DNA, 37 bp, Artificial Sequence
  Synthetic oligonucleotide
acaagcctttcccaagaggtgagattacaggtcgtga

SEQ ID NO: 12818 - DNA, 35 bp, Artificial Sequence
  Synthetic oligonucleotide
acacaaaaggtcctgtagcgagacgaggggtgtaa

SEQ ID NO: 12819 - DNA, 36 bp, Artificial Sequence
  Synthetic oligonucleotide
acatagcttggttaggtgacgcttagtagtacctga

SEQ ID NO: 12820 - DNA, 38 bp, Artificial Sequence
  Synthetic oligonucleotide
acattaagggactcctgtcataaaggtggattgtttga

SEQ ID NO: 12821 - DNA, 36 bp, Artificial Sequence
  Synthetic oligonucleotide
accagaccgtagcaggtcacgcagttagatggatca

SEQ ID NO: 12822 - DNA, 36 bp, Artificial Sequence
  Synthetic oligonucleotide
accagtatacttcgtaaaggtcatcctttgggagaa

SEQ ID NO: 12823 - DNA, 38 bp, Artificial Sequence
  Synthetic oligonucleotide
acctactgtgcccctgatacgagaccaagacagtatga

SEQ ID NO: 12824 - DNA, 35 bp, Artificial Sequence
  Synthetic oligonucleotide
acgttattgtcctggagtgccgacattgtgtggtt

SEQ ID NO: 12825 - DNA, 37 bp, Artificial Sequence
  Synthetic oligonucleotide
actcaactcatatggagcatgctagagatgatcatga

SEQ ID NO: 12826 - DNA, 35 bp, Artificial Sequence
  Synthetic oligonucleotide
acttagtcattagtggctctcaggcacgctgctta

SEQ ID NO: 12827 - DNA, 35 bp, Artificial Sequence
  Synthetic oligonucleotide
agacaaatggcgggcaatccgtgagttatcgcacg

SEQ ID NO: 12828 - DNA, 35 bp, Artificial Sequence
  Synthetic oligonucleotide
agatcggggttaatgaaattttttctaggcgaagg

SEQ ID NO: 12829 - DNA, 35 bp, Artificial Sequence
  Synthetic oligonucleotide
agcgctttaatgcaaagtaacactacgccctggcg

SEQ ID NO: 12830 - DNA, 36 bp, Artificial Sequence
  Synthetic oligonucleotide
agctctctggaagcaatgattaatgttttggcgaca

SEQ ID NO: 12831 - DNA, 36 bp, Artificial Sequence
  Synthetic oligonucleotide
aggactcaccgtccgggctagttagcgttgtatcca

SEQ ID NO: 12832 - DNA, 36 bp, Artificial Sequence
  Synthetic oligonucleotide
aggataggtccggtcgacccaaaagggcttaagtga

SEQ ID NO: 12833 - DNA, 36 bp, Artificial Sequence
  Synthetic oligonucleotide
agtaccgagcttagggaagatgagtcttggagggga

SEQ ID NO: 12834 - DNA, 36 bp, Artificial Sequence
  Synthetic oligonucleotide
agtccgtcagtcggaataaaccatgtacgcgcatga

SEQ ID NO: 12835 - DNA, 35 bp, Artificial Sequence
  Synthetic oligonucleotide
agttagccccgagtcaaagtgtttcatcggtctcc

SEQ ID NO: 12836 - DNA, 36 bp, Artificial Sequence
  Synthetic oligonucleotide
agtttcacaattcggcgccgccactgccagtacgta

SEQ ID NO: 12837 - DNA, 35 bp, Artificial Sequence
  Synthetic oligonucleotide
atcgtgtttatctccgtcaaggggctcatgcgata

SEQ ID NO: 12838 - DNA, 37 bp, Artificial Sequence
  Synthetic oligonucleotide
atgaagcggtgaggtggctcaccataatacgtgatga

SEQ ID NO: 12839 - DNA, 36 bp, Artificial Sequence
  Synthetic oligonucleotide
atgggggttgaacgtcgctgtcaggccctacggaga

SEQ ID NO: 12840 - DNA, 35 bp, Artificial Sequence
  Synthetic oligonucleotide
attacgaccggaaacctcgagtattcttagtacgg

SEQ ID NO: 12841 - DNA, 37 bp, Artificial Sequence
  Synthetic oligonucleotide
cagtggacgtacttgtggtttgggggttcgaccatga

SEQ ID NO: 12842 - DNA, 35 bp, Artificial Sequence
  Synthetic oligonucleotide
catgcgccagacgggacaagtggatcacttgttct

SEQ ID NO: 12843 - DNA, 36 bp, Artificial Sequence
  Synthetic oligonucleotide
catgtccacggatcgtgagaagtgtcatgataaaaa

SEQ ID NO: 12844 - DNA, 37 bp, Artificial Sequence
  Synthetic oligonucleotide
ccactgacgagcacgagccaagccaactttctaaaga

SEQ ID NO: 12845 - DNA, 35 bp, Artificial Sequence
  Synthetic oligonucleotide
cccagttgagacgtaccatatggtattcgtgtagg

SEQ ID NO: 12846 - DNA, 36 bp, Artificial Sequence
  Synthetic oligonucleotide
ccctgatacttgagtctcgtgaagggtagtgctgga

SEQ ID NO: 12847 - DNA, 38 bp, Artificial Sequence
  Synthetic oligonucleotide
cctgaggcttaataattaacagaccagattcatcctga

SEQ ID NO: 12848 - DNA, 35 bp, Artificial Sequence
  Synthetic oligonucleotide
cgcatcaggaatgcgccactattaatccaaatatg

SEQ ID NO: 12849 - DNA, 35 bp, Artificial Sequence
  Synthetic oligonucleotide
ctctgagacggaaagcagtaacggtcattggtaac

SEQ ID NO: 12850 - DNA, 36 bp, Artificial Sequence
  Synthetic oligonucleotide
gaaactactgcggggagttgcttctcgttgaagata

SEQ ID NO: 12851 - DNA, 35 bp, Artificial Sequence
  Synthetic oligonucleotide
gacgatcgtgggtcacgggtgcagtgatgtaatag

SEQ ID NO: 12852 - DNA, 37 bp, Artificial Sequence
  Synthetic oligonucleotide
gactccgttaatggagtgcgagcggttaggggttgga

SEQ ID NO: 12853 - DNA, 36 bp, Artificial Sequence
  Synthetic oligonucleotide
gactggcaattgaagactccgtgcgggggttcggga

SEQ ID NO: 12854 - DNA, 37 bp, Artificial Sequence
  Synthetic oligonucleotide
gataaccagctcgagtttcagatttaagagaatttga

SEQ ID NO: 12855 - DNA, 37 bp, Artificial Sequence
  Synthetic oligonucleotide
gatgccaacgaagacgccactgtagttaagctgcaga

SEQ ID NO: 12856 - DNA, 38 bp, Artificial Sequence
  Synthetic oligonucleotide
gatgcggaggagtgtctatttatattggtgggttttga

SEQ ID NO: 12857 - DNA, 37 bp, Artificial Sequence
  Synthetic oligonucleotide
gatgtccgggacttgtagctcatctaaattaatcaga

SEQ ID NO: 12858 - DNA, 38 bp, Artificial Sequence
  Synthetic oligonucleotide
gattttagctatgcatttttggccaagtgctgtcgtga

SEQ ID NO: 12859 - DNA, 36 bp, Artificial Sequence
  Synthetic oligonucleotide
gcacagttattgcacatgtctgtatggagctctaaa

SEQ ID NO: 12860 - DNA, 37 bp, Artificial Sequence
  Synthetic oligonucleotide
gcactcggttgatgatctgggtcgactgtttgataga

SEQ ID NO: 12861 - DNA, 36 bp, Artificial Sequence
  Synthetic oligonucleotide
gcagttcctctgggtggccatagtttggtttgacaa

SEQ ID NO: 12862 - DNA, 36 bp, Artificial Sequence
  Synthetic oligonucleotide
gcatcacaccccatctataaatgtgccgagacagaa

SEQ ID NO: 12863 - DNA, 37 bp, Artificial Sequence
  Synthetic oligonucleotide
gccagtgcgagttagcatgtgttggatcattttggga

SEQ ID NO: 12864 - DNA, 36 bp, Artificial Sequence
  Synthetic oligonucleotide
gcccacgagtggtcgtcagttcctaccagacgtcca

SEQ ID NO: 12865 - DNA, 36 bp, Artificial Sequence
  Synthetic oligonucleotide
gcgacggcattaagcataaatataggtggttggtga

SEQ ID NO: 12866 - DNA, 37 bp, Artificial Sequence
  Synthetic oligonucleotide
gcggatacaagggctaaccatccatgcgaatcggtga

SEQ ID NO: 12867 - DNA, 35 bp, Artificial Sequence
  Synthetic oligonucleotide
gctaaactcatcagtcacttgccgttatcagagtt

SEQ ID NO: 12868 - DNA, 36 bp, Artificial Sequence
  Synthetic oligonucleotide
gctacaagaagggacgagaactaggtcagcccggta

SEQ ID NO: 12869 - DNA, 35 bp, Artificial Sequence
  Synthetic oligonucleotide
gctctcgcctcattcactaaccgtcgctatcggcg

SEQ ID NO: 12870 - DNA, 36 bp, Artificial Sequence
  Synthetic oligonucleotide
gcttcatttaggtaagcaccttcagtcgacgggcga

SEQ ID NO: 12871 - DNA, 36 bp, Artificial Sequence
  Synthetic oligonucleotide
ggaggcacagctccagatgaggagcttccattgaga

SEQ ID NO: 12872 - DNA, 35 bp, Artificial Sequence
  Synthetic oligonucleotide
ggagtggagtggaagctgtcgatccggactacggt

SEQ ID NO: 12873 - DNA, 35 bp, Artificial Sequence
  Synthetic oligonucleotide
ggcgacgtttccctgtagtggccggggcaaagctc

SEQ ID NO: 12874 - DNA, 35 bp, Artificial Sequence
  Synthetic oligonucleotide
ggctactgaggatacatgcaacggaaaccttacag

SEQ ID NO: 12875 - DNA, 35 bp, Artificial Sequence
  Synthetic oligonucleotide
ggtaagtctgagtggttccccaggttcgcgtggtc

SEQ ID NO: 12876 - DNA, 35 bp, Artificial Sequence
  Synthetic oligonucleotide
ggtacgattcttgatcatgcgtgatggtatgctgt

SEQ ID NO: 12877 - DNA, 37 bp, Artificial Sequence
  Synthetic oligonucleotide
ggtcaaaaatcgggaagggttccacgtacgcagggga

SEQ ID NO: 12878 - DNA, 37 bp, Artificial Sequence
  Synthetic oligonucleotide
ggtctggattatataggtcccgcccattgcgtagtga

SEQ ID NO: 12879 - DNA, 36 bp, Artificial Sequence
  Synthetic oligonucleotide
ggtggacattgatcaatgacacgtgcctttagctta

SEQ ID NO: 12880 - DNA, 35 bp, Artificial Sequence
  Synthetic oligonucleotide
gtaagcgccgcttttggtggtttggtgtacgagga

SEQ ID NO: 12881 - DNA, 35 bp, Artificial Sequence
  Synthetic oligonucleotide
gtagtacatgtgaataattactaggagctaccgag

SEQ ID NO: 12882 - DNA, 36 bp, Artificial Sequence
  Synthetic oligonucleotide
gtcgctcccacagtggacgctggtggggtgtgatga

SEQ ID NO: 12883 - DNA, 37 bp, Artificial Sequence
  Synthetic oligonucleotide
gttagccaacgctctccaggtatttcaagtaccccca

SEQ ID NO: 12884 - DNA, 35 bp, Artificial Sequence
  Synthetic oligonucleotide
gttgcaaaggtgtaaatgacctctgagtttctatc

SEQ ID NO: 12885 - DNA, 35 bp, Artificial Sequence
  Synthetic oligonucleotide
tacacacccggtgccatttggtccgcgcagagcgg

SEQ ID NO: 12886 - DNA, 35 bp, Artificial Sequence
  Synthetic oligonucleotide
tacgtgaacgcaggggggtggcctaaagcttacgc

SEQ ID NO: 12887 - DNA, 38 bp, Artificial Sequence
  Synthetic oligonucleotide
taggtcgtgtgtaattcgggcaatggtatgcggtctga

SEQ ID NO: 12888 - DNA, 35 bp, Artificial Sequence
  Synthetic oligonucleotide
taggttagtattgggtgcccacggaagctgcttac

SEQ ID NO: 12889 - DNA, 35 bp, Artificial Sequence
  Synthetic oligonucleotide
tatagtctagatactaagggtattgtgttgctatc

SEQ ID NO: 12890 - DNA, 35 bp, Artificial Sequence
  Synthetic oligonucleotide
tcatgaaattacagcatgaaggagtgacacagcac

SEQ ID NO: 12891 - DNA, 38 bp, Artificial Sequence
  Synthetic oligonucleotide
tccagcccggtaagtgattacgtatgcggcctgaatga

SEQ ID NO: 12892 - DNA, 36 bp, Artificial Sequence
  Synthetic oligonucleotide
tccgtgacacgtgtgtttctgcggctatgcatagaa

SEQ ID NO: 12893 - DNA, 35 bp, Artificial Sequence
  Synthetic oligonucleotide
tcgctgggatatatgagagctacgaatactgttgt

SEQ ID NO: 12894 - DNA, 37 bp, Artificial Sequence
  Synthetic oligonucleotide
tcggtgcgttttagtagagtgtgtcccagttccgaga

SEQ ID NO: 12895 - DNA, 38 bp, Artificial Sequence
  Synthetic oligonucleotide
tcgtacgtgagttaagggtgtaaaatttgtaggattga

SEQ ID NO: 12896 - DNA, 36 bp, Artificial Sequence
  Synthetic oligonucleotide
tgccttggtacttgcaatgtacgcggttttaggcga

SEQ ID NO: 12897 - DNA, 37 bp, Artificial Sequence
  Synthetic oligonucleotide
tgcgggtgaggcggtaattcgggtcggttcgatcgga

SEQ ID NO: 12898 - DNA, 37 bp, Artificial Sequence
  Synthetic oligonucleotide
tgtactacggggtctacgcgaaagttctggtcagaga

SEQ ID NO: 12899 - DNA, 35 bp, Artificial Sequence
  Synthetic oligonucleotide
tgtcggcttctaaacttttgacggagtacaactct

SEQ ID NO: 12900 - DNA, 36 bp, Artificial Sequence
  Synthetic oligonucleotide
tgtcgtgtcgaaccgtctggtcccggtccaggtgca

SEQ ID NO: 12901 - DNA, 36 bp, Artificial Sequence
  Synthetic oligonucleotide
ttcggttgaattgacgttagccgtgattgtggacca

SEQ ID NO: 12902 - DNA, 37 bp, Artificial Sequence
  Synthetic oligonucleotide
ttgggccatcaagtgaaccgtatggtcctgagctaga

SEQ ID NO: 12903 - DNA, 38 bp, Artificial Sequence
  Synthetic oligonucleotide
ttgtatcctagtcaggttcccatagctttttggagtga

SEQ ID NO: 12904 - DNA, 36 bp, Artificial Sequence
  Synthetic oligonucleotide
tttaagtgtgcgcacccctgccccgtctcctaaata

SEQ ID NO: 12905 - DNA, 37 bp, Artificial Sequence
  Synthetic oligonucleotide
aaagtatgcacagacaccgtgcgttttcgtgttatga

SEQ ID NO: 12906 - DNA, 37 bp, Artificial Sequence
  Synthetic oligonucleotide
aacccattttcttgggctttgaattgatggcctacga

SEQ ID NO: 12907 - DNA, 37 bp, Artificial Sequence
  Synthetic oligonucleotide
aactgccatgcaataagctgccgtaatggattatgga

SEQ ID NO: 12908 - DNA, 35 bp, Artificial Sequence
  Synthetic oligonucleotide
aatccatcgccgaaccatggtacgtaattcgagcc

SEQ ID NO: 12909 - DNA, 35 bp, Artificial Sequence
  Synthetic oligonucleotide
aatggagcaaggtgggaaaggcgataaggaaacag

SEQ ID NO: 12910 - DNA, 35 bp, Artificial Sequence
  Synthetic oligonucleotide
aatgggactcacgacacgggacgtccaagagtatg

SEQ ID NO: 12911 - DNA, 37 bp, Artificial Sequence
  Synthetic oligonucleotide
agcagtatccattagttccagcatggaatgtctttga

SEQ ID NO: 12912 - DNA, 38 bp, Artificial Sequence
  Synthetic oligonucleotide
agcttcgttcgcatgaaacggctgctacttgttggtga

SEQ ID NO: 12913 - DNA, 35 bp, Artificial Sequence
  Synthetic oligonucleotide
agtgccgaatacagtgcgaccgtaacctctctggg

SEQ ID NO: 12914 - DNA, 37 bp, Artificial Sequence
  Synthetic oligonucleotide
agttgaacacaccaaaaccgcgtgcttgatgccgcga

SEQ ID NO: 12915 - DNA, 35 bp, Artificial Sequence
  Synthetic oligonucleotide
atggtcgggccccaagagatggcaagggctggatc

SEQ ID NO: 12916 - DNA, 35 bp, Artificial Sequence
  Synthetic oligonucleotide
attccgaacagtccctgcatacggagtggatgcgc

SEQ ID NO: 12917 - DNA, 36 bp, Artificial Sequence
  Synthetic oligonucleotide
ctacaatcggtataactacgaggcgatggggacgaa

SEQ ID NO: 12918 - DNA, 36 bp, Artificial Sequence
  Synthetic oligonucleotide
ctccgcactagccagaatggcgagggcatttgacga

SEQ ID NO: 12919 - DNA, 34 bp, Artificial Sequence
  Synthetic oligonucleotide
gaaacgtagagtcatccccccatttgcggtagga

SEQ ID NO: 12920 - DNA, 35 bp, Artificial Sequence
  Synthetic oligonucleotide
gaccatgatatcacttgtcttcgtacgggggaaac

SEQ ID NO: 12921 - DNA, 35 bp, Artificial Sequence
  Synthetic oligonucleotide
gagctgaaccgagatacacagctcgctgcactacc

SEQ ID NO: 12922 - DNA, 36 bp, Artificial Sequence
  Synthetic oligonucleotide
gagtcttcggtgactctcaatggtaggcgtgataca

SEQ ID NO: 12923 - DNA, 36 bp, Artificial Sequence
  Synthetic oligonucleotide
gatcatggggagtggagtcagaagcgcgtggctgaa

SEQ ID NO: 12924 - DNA, 36 bp, Artificial Sequence
  Synthetic oligonucleotide
gatgggtcctcaatatggggtatatggagttactta

SEQ ID NO: 12925 - DNA, 38 bp, Artificial Sequence
  Synthetic oligonucleotide
gatttttgagcgttgaagtgcaccagacatcagtatga

SEQ ID NO: 12926 - DNA, 36 bp, Artificial Sequence
  Synthetic oligonucleotide
gcaagacacgcgagtgttagatgtctgaagggaaga

SEQ ID NO: 12927 - DNA, 37 bp, Artificial Sequence
  Synthetic oligonucleotide
gcactgcgtttttaagtaatcgcgggacgtcgtagga

SEQ ID NO: 12928 - DNA, 37 bp, Artificial Sequence
  Synthetic oligonucleotide
gccacaggcaatcgtgagtgagcgatataaaaccgga

SEQ ID NO: 12929 - DNA, 35 bp, Artificial Sequence
  Synthetic oligonucleotide
gccatgtaagtgcagtcgtgctcgggttaatgcac

SEQ ID NO: 12930 - DNA, 37 bp, Artificial Sequence
  Synthetic oligonucleotide
gctaaacatgtagtgatttatttgcgtctaggccgga

SEQ ID NO: 12931 - DNA, 35 bp, Artificial Sequence
  Synthetic oligonucleotide
gctcgtagtttccttgttgtctctgggcggttgct

SEQ ID NO: 12932 - DNA, 35 bp, Artificial Sequence
  Synthetic oligonucleotide
ggaaagtgccatactctcgtggtggaggtacgtaa

SEQ ID NO: 12933 - DNA, 36 bp, Artificial Sequence
  Synthetic oligonucleotide
ggaacaatacgaggccatgccccgaggtgtaggaga

SEQ ID NO: 12934 - DNA, 36 bp, Artificial Sequence
  Synthetic oligonucleotide
ggaccagccagacagtcctacacgtagaggacagga

SEQ ID NO: 12935 - DNA, 36 bp, Artificial Sequence
  Synthetic oligonucleotide
ggaggctaggggttacgtggtgcgtgcactaaccaa

SEQ ID NO: 12936 - DNA, 36 bp, Artificial Sequence
  Synthetic oligonucleotide
ggggagtaatcttggtcatctaggaccaatagttga

SEQ ID NO: 12937 - DNA, 35 bp, Artificial Sequence
  Synthetic oligonucleotide
gtactcgatgggatccagcaactcattggggctca

SEQ ID NO: 12938 - DNA, 36 bp, Artificial Sequence
  Synthetic oligonucleotide
gtatcggtacgcatcggtcaaccgacagagtttgga

SEQ ID NO: 12939 - DNA, 37 bp, Artificial Sequence
  Synthetic oligonucleotide
gtctcagagtcgtatcgccagaatttggattccgaga

SEQ ID NO: 12940 - DNA, 37 bp, Artificial Sequence
  Synthetic oligonucleotide
gtgaaggaattgtaacgtactgccaatggagtttgga

SEQ ID NO: 12941 - DNA, 38 bp, Artificial Sequence
  Synthetic oligonucleotide
gtgagtggccctaggtttgctccatacttctatgctga

SEQ ID NO: 12942 - DNA, 36 bp, Artificial Sequence
  Synthetic oligonucleotide
gtgccacaacatccgttggcatacagtctaaaatga

SEQ ID NO: 12943 - DNA, 38 bp, Artificial Sequence
  Synthetic oligonucleotide
gtggtacctcggattcacacggtcaacgaaacggatga

SEQ ID NO: 12944 - DNA, 35 bp, Artificial Sequence
  Synthetic oligonucleotide
gttctatgggttgaccaatcaccattagtatcgtc

SEQ ID NO: 12945 - DNA, 36 bp, Artificial Sequence
  Synthetic oligonucleotide
taactacgacgctcacaagccttgagttacttagta

SEQ ID NO: 12946 - DNA, 35 bp, Artificial Sequence
  Synthetic oligonucleotide
taattggcaaagtcatagtcaggcgaccttagctc

SEQ ID NO: 12947 - DNA, 37 bp, Artificial Sequence
  Synthetic oligonucleotide
tacgtactgggaattataaacgattaagcacaaggga

SEQ ID NO: 12948 - DNA, 38 bp, Artificial Sequence
  Synthetic oligonucleotide
tatcggaagcatatcgtacttgagacattaggtgatga

SEQ ID NO: 12949 - DNA, 36 bp, Artificial Sequence
  Synthetic oligonucleotide
tcataccctgtaaatccaggtggaccacggtacgta

SEQ ID NO: 12950 - DNA, 38 bp, Artificial Sequence
  Synthetic oligonucleotide
tcatacgtatttggtcgccgtaaatggtttaattttga

SEQ ID NO: 12951 - DNA, 36 bp, Artificial Sequence
  Synthetic oligonucleotide
tcatttgtgcatgacggttgggtaagttgtagtgca

SEQ ID NO: 12952 - DNA, 38 bp, Artificial Sequence
  Synthetic oligonucleotide
tgaggttggaacgtgtctggccggcaaggaaaccgcga

SEQ ID NO: 12953 - DNA, 35 bp, Artificial Sequence
  Synthetic oligonucleotide
tgctaccgaatctgcgtgatagccttccaaggagc

SEQ ID NO: 12954 - DNA, 35 bp, Artificial Sequence
  Synthetic oligonucleotide
tgctatgccgcattacaacgaggccctccgtaggc

SEQ ID NO: 12955 - DNA, 35 bp, Artificial Sequence
  Synthetic oligonucleotide
ttaatgcaatcgtgcaataagatggttgaaggtag

SEQ ID NO: 12956 - DNA, 36 bp, Artificial Sequence
  Synthetic oligonucleotide
ttaccgctgtactccctgtgacaggcggtacggtga

SEQ ID NO: 12957 - DNA, 38 bp, Artificial Sequence
  Synthetic oligonucleotide
tttagacgagttagtaggccatcacatcgtcttaatga

SEQ ID NO: 12958 - DNA, 38 bp, Artificial Sequence
  Synthetic oligonucleotide
tttgcagttcatggctttgaatattgtagtcgtaatga

SEQ ID NO: 12959 - DNA, 38 bp, Artificial Sequence
  Synthetic oligonucleotide
aacaggtatacgatacggaacgtcttgtcagtgggtga

SEQ ID NO: 12960 - DNA, 35 bp, Artificial Sequence
  Synthetic oligonucleotide
aacgggcataagccctagtagggttatgctcctgg

SEQ ID NO: 12961 - DNA, 38 bp, Artificial Sequence
  Synthetic oligonucleotide
aagggtgagtgcgtggccttatcgaggtcagtcattga

SEQ ID NO: 12962 - DNA, 36 bp, Artificial Sequence
  Synthetic oligonucleotide
acaacatctacacgcacggtgctcaaatcttaggta

SEQ ID NO: 12963 - DNA, 37 bp, Artificial Sequence
  Synthetic oligonucleotide
acaaccgggtgatcaacgtagagctgagtgcacgtga

SEQ ID NO: 12964 - DNA, 37 bp, Artificial Sequence
  Synthetic oligonucleotide
acacgctcaagcaaagcggctcggtgtaggtcacgga

SEQ ID NO: 12965 - DNA, 37 bp, Artificial Sequence
  Synthetic oligonucleotide
acctaaagtacgaatctgtacatggtagccacattga

SEQ ID NO: 12966 - DNA, 35 bp, Artificial Sequence
  Synthetic oligonucleotide
acgacacatgatccagctctgcgagtccacccggg

SEQ ID NO: 12967 - DNA, 35 bp, Artificial Sequence
  Synthetic oligonucleotide
agacgcagtcaagtgtttcgcgtattgttatcaac

SEQ ID NO: 12968 - DNA, 36 bp, Artificial Sequence
  Synthetic oligonucleotide
agcactgggtcgggtaggcattgtactccacctgca

SEQ ID NO: 12969 - DNA, 38 bp, Artificial Sequence
  Synthetic oligonucleotide
agcgggggttctttattatggccgatcggacattatga

SEQ ID NO: 12970 - DNA, 35 bp, Artificial Sequence
  Synthetic oligonucleotide
agttaggcctgaggaagcgaacaaaagggtactag

SEQ ID NO: 12971 - DNA, 36 bp, Artificial Sequence
  Synthetic oligonucleotide
atcatctagacgagtgaagggtacgacaagtttgga

SEQ ID NO: 12972 - DNA, 37 bp, Artificial Sequence
  Synthetic oligonucleotide
atgaaccgcctgggtaccagttcacgatactgcttga

SEQ ID NO: 12973 - DNA, 38 bp, Artificial Sequence
  Synthetic oligonucleotide
atgagacttagtgagactgccgaggtcaggatcagtga

SEQ ID NO: 12974 - DNA, 38 bp, Artificial Sequence
  Synthetic oligonucleotide
atgggtacgtatgtagcctccgtagtgttgctgtttga

SEQ ID NO: 12975 - DNA, 35 bp, Artificial Sequence
  Synthetic oligonucleotide
ctggatgaggtactggtctcaatttgatcttggcg

SEQ ID NO: 12976 - DNA, 37 bp, Artificial Sequence
  Synthetic oligonucleotide
gagctactagaagcccgcgcccggcaattacagtaga

SEQ ID NO: 12977 - DNA, 35 bp, Artificial Sequence
  Synthetic oligonucleotide
gagtccgatttccgcacgatcgaacccgacggtcg

SEQ ID NO: 12978 - DNA, 37 bp, Artificial Sequence
  Synthetic oligonucleotide
gcgaacgaacctacgagcccgatgcaagggaggcgga

SEQ ID NO: 12979 - DNA, 35 bp, Artificial Sequence
  Synthetic oligonucleotide
gctatggttgagcgtctggcttagaagccgaagcg

SEQ ID NO: 12980 - DNA, 38 bp, Artificial Sequence
  Synthetic oligonucleotide
ggtgggcgttacagaggagcgcatgagccgtaacgtga

SEQ ID NO: 12981 - DNA, 36 bp, Artificial Sequence
  Synthetic oligonucleotide
gtaagctacaaaagagccgttgcacaagaggggtta

SEQ ID NO: 12982 - DNA, 35 bp, Artificial Sequence
  Synthetic oligonucleotide
gtctagatgaatccgggcactccctaaatatgacc

SEQ ID NO: 12983 - DNA, 35 bp, Artificial Sequence
  Synthetic oligonucleotide
gtctgatcatacccagcgattatatgcggatgctg

SEQ ID NO: 12984 - DNA, 35 bp, Artificial Sequence
  Synthetic oligonucleotide
gttctacacgtgagggtttgtatgtacacggttta

SEQ ID NO: 12985 - DNA, 36 bp, Artificial Sequence
  Synthetic oligonucleotide
gttgagaattgggtcataggggaatctcagacagta

SEQ ID NO: 12986 - DNA, 36 bp, Artificial Sequence
  Synthetic oligonucleotide
tactgcttagaacatgacaggtgaagctcagcccca

SEQ ID NO: 12987 - DNA, 36 bp, Artificial Sequence
  Synthetic oligonucleotide
tatcctttctaattgcgtgggcacttcttggtgcaa

SEQ ID NO: 12988 - DNA, 36 bp, Artificial Sequence
  Synthetic oligonucleotide
tatggcaagggcaaacatcgggtacggtctccagga

SEQ ID NO: 12989 - DNA, 37 bp, Artificial Sequence
  Synthetic oligonucleotide
tccacggggaactggctaagactatagtcatggagga

SEQ ID NO: 12990 - DNA, 36 bp, Artificial Sequence
  Synthetic oligonucleotide
tcgcgatataacttgggaggtgcaatgtctgggaga

SEQ ID NO: 12991 - DNA, 38 bp, Artificial Sequence
  Synthetic oligonucleotide
tgatcgcttaggtatcagatcaagcacgcaggttatga

SEQ ID NO: 12992 - DNA, 35 bp, Artificial Sequence
  Synthetic oligonucleotide
ttacggggaacggaacgtctattgttgaggttgcg

SEQ ID NO: 12993 - DNA, 37 bp, Artificial Sequence
  Synthetic oligonucleotide
ttaggatagcatcctcttggactcagttatggaggga

SEQ ID NO: 12994 - DNA, 35 bp, Artificial Sequence
  Synthetic oligonucleotide
ttcctacgtacgaattacctgttagaagtccggac

SEQ ID NO: 12995 - DNA, 36 bp, Artificial Sequence
  Synthetic oligonucleotide
tttgacccgactgaaccggatgacgcctttaaccga

SEQ ID NO: 12996 - DNA, 38 bp, Artificial Sequence
  Synthetic oligonucleotide
gaacgactggcgaatgttatgggcgaagagtgtgctga

SEQ ID NO: 12997 - DNA, 36 bp, Artificial Sequence
  Synthetic oligonucleotide
tcccactctattgagaacattagtgacaggagtgta

SEQ ID NO: 12998 - DNA, 35 bp, Artificial Sequence
  Synthetic oligonucleotide
tgcactctctcgagacggcgagttgagctgctcta

SEQ ID NO: 12999 - DNA, 38 bp, Artificial Sequence
  Synthetic oligonucleotide
acccggggggctgccgcggggtggtaaaccacttctga

SEQ ID NO: 13000 - DNA, 35 bp, Artificial Sequence
  Synthetic oligonucleotide
agtatgttcccgttctaggccgcatacgcgtgcta

SEQ ID NO: 13001 - DNA, 35 bp, Artificial Sequence
  Synthetic oligonucleotide
atactcatgaccaataacgggctgaaggaattcta

SEQ ID NO: 13002 - DNA, 38 bp, Artificial Sequence
  Synthetic oligonucleotide
atccaccatggaagtagattgagtattgcagttaatga

SEQ ID NO: 13003 - DNA, 37 bp, Artificial Sequence
  Synthetic oligonucleotide
atcgtcgatacgtgaacttaaatgggaaaggaaggga

SEQ ID NO: 13004 - DNA, 36 bp, Artificial Sequence
  Synthetic oligonucleotide
atgggcccaggtccacttggaacacattagtacgta

SEQ ID NO: 13005 - DNA, 35 bp, Artificial Sequence
  Synthetic oligonucleotide
attaaggggattatgaggttgaaacgacggtttgg

SEQ ID NO: 13006 - DNA, 35 bp, Artificial Sequence
  Synthetic oligonucleotide
gaagccagtaccgagggccagatgcgccaacctag

SEQ ID NO: 13007 - DNA, 36 bp, Artificial Sequence
  Synthetic oligonucleotide
gacacgtggggactggggatcgatgtaccgaccaca

SEQ ID NO: 13008 - DNA, 36 bp, Artificial Sequence
  Synthetic oligonucleotide
gacatcaagaagcaaggtgattgatccacgcgcata

SEQ ID NO: 13009 - DNA, 36 bp, Artificial Sequence
  Synthetic oligonucleotide
gagttacgacacaattgttgtctcagacttcagtta

SEQ ID NO: 13010 - DNA, 37 bp, Artificial Sequence
  Synthetic oligonucleotide
gcatcccatgtaaagacaaacgggggcactggtttga

SEQ ID NO: 13011 - DNA, 36 bp, Artificial Sequence
  Synthetic oligonucleotide
gcctttcgttcaatttttttgaagcaagttagtaga

SEQ ID NO: 13012 - DNA, 34 bp, Artificial Sequence
  Synthetic oligonucleotide
ggagatccgtcccaggtttctcgggatcctaagc

SEQ ID NO: 13013 - DNA, 36 bp, Artificial Sequence
  Synthetic oligonucleotide
ggcgtcgcgtctgagaaaggcttcttcgacgcagta

SEQ ID NO: 13014 - DNA, 35 bp, Artificial Sequence
  Synthetic oligonucleotide
ggtctttccacgctaggcgatgtgcagtgctgtaa

SEQ ID NO: 13015 - DNA, 38 bp, Artificial Sequence
  Synthetic oligonucleotide
gtctaccgaaactttagtagcaaatgggagacgtatga

SEQ ID NO: 13016 - DNA, 37 bp, Artificial Sequence
  Synthetic oligonucleotide
gttaccagtaatatgtcccatgttgagtcgaccggga

SEQ ID NO: 13017 - DNA, 38 bp, Artificial Sequence
  Synthetic oligonucleotide
gtttgccgaggtatatggctatgaatctcagggcctga

SEQ ID NO: 13018 - DNA, 36 bp, Artificial Sequence
  Synthetic oligonucleotide
tatgagaacaagcggacttggtgtattgacaacgta

SEQ ID NO: 13019 - DNA, 36 bp, Artificial Sequence
  Synthetic oligonucleotide
ttccggagagtagggaaggaggccactggattgaca

SEQ ID NO: 13020 - DNA, 37 bp, Artificial Sequence
  Synthetic oligonucleotide
ttgagcgccctccgtttcaacctacaggagaaactga

SEQ ID NO: 13021 - DNA, 37 bp, Artificial Sequence
  Synthetic oligonucleotide
cacgccggatcatacctaccagccgcctctggcatga

SEQ ID NO: 13022 - DNA, 37 bp, Artificial Sequence
  Synthetic oligonucleotide
gcagtactgattggggtcatggtgaaggtatctagga

SEQ ID NO: 13023 - DNA, 37 bp, Artificial Sequence
  Synthetic oligonucleotide
aaaaaatgcaggtgccggggggtggctatagggaaga

SEQ ID NO: 13024 - DNA, 37 bp, Artificial Sequence
  Synthetic oligonucleotide
aacttgcgcatggtggtagtagcgggttacccgaaga

SEQ ID NO: 13025 - DNA, 35 bp, Artificial Sequence
  Synthetic oligonucleotide
acatggaaatatgatgtgcaacatgaacaagggtg

SEQ ID NO: 13026 - DNA, 37 bp, Artificial Sequence
  Synthetic oligonucleotide
attttggccgtaatttacaaacggtacacccgttgga

SEQ ID NO: 13027 - DNA, 36 bp, Artificial Sequence
  Synthetic oligonucleotide
gagggtactgggatgagtatttggggggtttttgta

SEQ ID NO: 13028 - DNA, 36 bp, Artificial Sequence
  Synthetic oligonucleotide
ggtacatttacgtcactcatatgcgacccgtcctta

SEQ ID NO: 13029 - DNA, 37 bp, Artificial Sequence
  Synthetic oligonucleotide
ggttacgcgatcagggtgccgtgggcacgggtatcga

SEQ ID NO: 13030 - DNA, 36 bp, Artificial Sequence
  Synthetic oligonucleotide
gtttaggattaaacatctccgtaaccacgaacggta

SEQ ID NO: 13031 - DNA, 36 bp, Artificial Sequence
  Synthetic oligonucleotide
tacgtcgtccacggggtgtgaccatagctgggttaa

SEQ ID NO: 13032 - DNA, 35 bp, Artificial Sequence
  Synthetic oligonucleotide
tagtcacacaaagtcgtggatgggggccaaagttg

SEQ ID NO: 13033 - DNA, 36 bp, Artificial Sequence
  Synthetic oligonucleotide
tggaattatgtgctagcgagcacaaccaaactggta

SEQ ID NO: 13034 - DNA, 35 bp, Artificial Sequence
  Synthetic oligonucleotide
ttgccgagtcctggtatttgtggattctttgtgcg

SEQ ID NO: 13035 - DNA, 36 bp, Artificial Sequence
  Synthetic oligonucleotide
atcactgtccatgataactagtacggcctgaaatga

SEQ ID NO: 13036 - DNA, 38 bp, Artificial Sequence
  Synthetic oligonucleotide
cttgttaccgccgaacagtttacctttgggaaccatga

SEQ ID NO: 13037 - DNA, 37 bp, Artificial Sequence
  Synthetic oligonucleotide
tagccaacagtatttgtactaaatgtgcgctcccaga

SEQ ID NO: 13038 - DNA, 37 bp, Artificial Sequence
  Synthetic oligonucleotide
ttgctcggaagtttgaatcctaaagactgtatctgga

SEQ ID NO: 13039 - DNA, 36 bp, Artificial Sequence
  Synthetic oligonucleotide
acgaactgatggcatgccagatccaccatagctcca

SEQ ID NO: 13040 - DNA, 38 bp, Artificial Sequence
  Synthetic oligonucleotide
gcacccgcatgaaccccacagtgggccaagtcagctga

SEQ ID NO: 13041 - DNA, 35 bp, Artificial Sequence
  Synthetic oligonucleotide
tactcgtacattatctgtctgagggtaatcgagga

SEQ ID NO: 13042 - DNA, 36 bp, Artificial Sequence
  Synthetic oligonucleotide
tagggttagactgtgacgacgtctaacaaaaaatta

SEQ ID NO: 13043 - DNA, 37 bp, Artificial Sequence
  Synthetic oligonucleotide
tatcgttgcagttggataaagtgtgttcgtcagccga

SEQ ID NO: 13044 - DNA, 38 bp, Artificial Sequence
  Synthetic oligonucleotide
tatggtaccaaagcacgcgcacagcgtaagttccctga

SEQ ID NO: 13045 - DNA, 38 bp, Artificial Sequence
  Synthetic oligonucleotide
tcattcagaaaccgagggtttccgtgccgctcacttga

SEQ ID NO: 13046 - DNA, 35 bp, Artificial Sequence
  Synthetic oligonucleotide
gtacgagcattcagggttctaggtagcatgcggtt

SEQ ID NO: 13047 - DNA, 37 bp, Artificial Sequence
  Synthetic oligonucleotide
tatgataggggagtgacgtacgaactcattaatacga

SEQ ID NO: 13048 - DNA, 36 bp, Artificial Sequence
  Synthetic oligonucleotide
atcgttccgagcattattacaagatggcatggtgga

SEQ ID NO: 13049 - DNA, 38 bp, Artificial Sequence
  Synthetic oligonucleotide
caccggtcgggtataggagttaactgcgggtgacttga

SEQ ID NO: 13050 - DNA, 35 bp, Artificial Sequence
  Synthetic oligonucleotide
gagcgttctgtcttgtcggatgaatgactactggc

SEQ ID NO: 13051 - DNA, 38 bp, Artificial Sequence
  Synthetic oligonucleotide
tagaagcttgacgggcgcaaagctgcatcaaacgttga

SEQ ID NO: 13052 - DNA, 38 bp, Artificial Sequence
  Synthetic oligonucleotide
tcactgccgtgcttagtgtcacagttttttatgaatga

SEQ ID NO: 13053 - DNA, 37 bp, Artificial Sequence
  Synthetic oligonucleotide
ttgtttgacggctgtacaacgacagttaaactaaaga

SEQ ID NO: 13054 - DNA, 35 bp, Artificial Sequence
  Synthetic oligonucleotide
tgagagcatgcatgtatccataacacactgctgta

SEQ ID NO: 13055 - DNA, 35 bp, Artificial Sequence
  Synthetic oligonucleotide
aaccagtcatcggacccgttgtcatgtcgaccctg

SEQ ID NO: 13056 - DNA, 35 bp, Artificial Sequence
  Synthetic oligonucleotide
aaagtgaagctcgggtatagcctagaaacacgtcg

SEQ ID NO: 13057 - DNA, 38 bp, Artificial Sequence
  Synthetic oligonucleotide
tcatgaacactgcgaatatccattgagcctaccggtga

SEQ ID NO: 13058 - DNA, 36 bp, Artificial Sequence
  Synthetic oligonucleotide
gtattgcacataatgctgaaaagggcgcacggccca

SEQ ID NO: 13059 - DNA, 37 bp, Artificial Sequence
  Synthetic oligonucleotide
atgcatggaccattttataacttccgagaatacggga

SEQ ID NO: 13060 - DNA, 35 bp, Artificial Sequence
  Synthetic oligonucleotide
ggttcaggtaccgcgaacaatcggaagcaacgtct

SEQ ID NO: 13061 - DNA, 35 bp, Artificial Sequence
  Synthetic oligonucleotide
aaccccgcaatcaggagtgggaaagtcttgtggaa

SEQ ID NO: 13062 - DNA, 36 bp, Artificial Sequence
  Synthetic oligonucleotide
aagcactgtcaaagccgttcaggctgtaatgcacca

SEQ ID NO: 13063 - DNA, 38 bp, Artificial Sequence
  Synthetic oligonucleotide
acctgcgggtcaagcccatgctcgattcgcaggattga

SEQ ID NO: 13064 - DNA, 35 bp, Artificial Sequence
  Synthetic oligonucleotide
agacaagccgcctttaaagcgggtatggtgttgta

SEQ ID NO: 13065 - DNA, 33 bp, Artificial Sequence
  Synthetic oligonucleotide
gactgcgatgcatgattggcacttgggttacta

SEQ ID NO: 13066 - DNA, 36 bp, Artificial Sequence
  Synthetic oligonucleotide
gagtccaacaggtcctcttacgcggggatgtatcta

SEQ ID NO: 13067 - DNA, 38 bp, Artificial Sequence
  Synthetic oligonucleotide
gatcgtgagccaatagcgatgccagaggcatcttgtga

SEQ ID NO: 13068 - DNA, 37 bp, Artificial Sequence
  Synthetic oligonucleotide
gcattgctatgtgtcctatcgatcaaaatgcaaagga

SEQ ID NO: 13069 - DNA, 38 bp, Artificial Sequence
  Synthetic oligonucleotide
gcgggctgagcaggtaacgcaaggtcgttcttgagtga

SEQ ID NO: 13070 - DNA, 37 bp, Artificial Sequence
  Synthetic oligonucleotide
gtgatagtcgtcccacggtgcggtcgaaagttctcga

SEQ ID NO: 13071 - DNA, 36 bp, Artificial Sequence
  Synthetic oligonucleotide
tatgagccagatctggcacaaaaaactactcatgca

SEQ ID NO: 13072 - DNA, 36 bp, Artificial Sequence
  Synthetic oligonucleotide
tctacagcatgcgaacttgagctctcatgtaaacaa

SEQ ID NO: 13073 - DNA, 37 bp, Artificial Sequence
  Synthetic oligonucleotide
tgaccgtgctcacgccgctctcctgatcacaacagga

SEQ ID NO: 13074 - DNA, 38 bp, Artificial Sequence
  Synthetic oligonucleotide
aaaccggtgagtgtcgaatgatcacgacgctatactga

SEQ ID NO: 13075 - DNA, 37 bp, Artificial Sequence
  Synthetic oligonucleotide
aaacgagcggcccgcagttgctttgggtaggttgtga

SEQ ID NO: 13076 - DNA, 36 bp, Artificial Sequence
  Synthetic oligonucleotide
aaacggcgcccttgcgttcgacagggcgacgtatga

SEQ ID NO: 13077 - DNA, 38 bp, Artificial Sequence
  Synthetic oligonucleotide
aaagactatacgtgagcgaaagtgctggaactgcttga

SEQ ID NO: 13078 - DNA, 35 bp, Artificial Sequence
  Synthetic oligonucleotide
aaaggtgccagacgtgggcccgagaaagacgctca

SEQ ID NO: 13079 - DNA, 36 bp, Artificial Sequence
  Synthetic oligonucleotide
aaatattgccaatgcggtatctcagtattaccttta

SEQ ID NO: 13080 - DNA, 38 bp, Artificial Sequence
  Synthetic oligonucleotide
aacactgacgcactagccagtatcgtcgtgtgcactga

SEQ ID NO: 13081 - DNA, 37 bp, Artificial Sequence
  Synthetic oligonucleotide
aaccaacattgcagctaggttggccgcttagtgttga

SEQ ID NO: 13082 - DNA, 35 bp, Artificial Sequence
  Synthetic oligonucleotide
aacggtgggatgtccagatattgtctggccttaat

SEQ ID NO: 13083 - DNA, 35 bp, Artificial Sequence
  Synthetic oligonucleotide
aacgtgatcgtacggggttggcctctagtgctcgc

SEQ ID NO: 13084 - DNA, 37 bp, Artificial Sequence
  Synthetic oligonucleotide
aactttggggggtggtagttcctgctagacctgttga

SEQ ID NO: 13085 - DNA, 36 bp, Artificial Sequence
  Synthetic oligonucleotide
aatcccgtagattcgtcatgttagaaagatagatga

SEQ ID NO: 13086 - DNA, 36 bp, Artificial Sequence
  Synthetic oligonucleotide
aatgcatataggcaactccgcataggaaccgctgag

SEQ ID NO: 13087 - DNA, 35 bp, Artificial Sequence
  Synthetic oligonucleotide
acaggagttatggtcgagatgaccgagtccacgta

SEQ ID NO: 13088 - DNA, 36 bp, Artificial Sequence
  Synthetic oligonucleotide
acagtgaagggatgctacgttatacatctgagcgta

SEQ ID NO: 13089 - DNA, 38 bp, Artificial Sequence
  Synthetic oligonucleotide
accgagggcatatagattagggcgttgcggttgactga

SEQ ID NO: 13090 - DNA, 37 bp, Artificial Sequence
  Synthetic oligonucleotide
acctcagattgccggggcacatggtccgttctgtaga

SEQ ID NO: 13091 - DNA, 37 bp, Artificial Sequence
  Synthetic oligonucleotide
acgcaaccgtatactcgcgactgtccgaagttccgga

SEQ ID NO: 13092 - DNA, 37 bp, Artificial Sequence
  Synthetic oligonucleotide
acgtaacgggggtacattcttaaggtgaggttgatga

SEQ ID NO: 13093 - DNA, 35 bp, Artificial Sequence
  Synthetic oligonucleotide
actatggctggttaagcggttggtatgttacaaag

SEQ ID NO: 13094 - DNA, 36 bp, Artificial Sequence
  Synthetic oligonucleotide
actcacaggagttgggggtttcactaggtggtgtta

SEQ ID NO: 13095 - DNA, 38 bp, Artificial Sequence
  Synthetic oligonucleotide
actccgtcggggtggagggttgtgtcgtcctgacttga

SEQ ID NO: 13096 - DNA, 35 bp, Artificial Sequence
  Synthetic oligonucleotide
actcttttggggggtgaaatgtaccggaaagactg

SEQ ID NO: 13097 - DNA, 35 bp, Artificial Sequence
  Synthetic oligonucleotide
actttgtgcttgctaagttctaggactctatgttg

SEQ ID NO: 13098 - DNA, 35 bp, Artificial Sequence
  Synthetic oligonucleotide
agaactctagcgtgagtgatactgcgagaagcgtg

SEQ ID NO: 13099 - DNA, 37 bp, Artificial Sequence
  Synthetic oligonucleotide
agactgagtcaaaatccgaaatctgttggggaggtga

SEQ ID NO: 13100 - DNA, 38 bp, Artificial Sequence
  Synthetic oligonucleotide
agcctcgtgggcgcgaaattatttttaatggagggtga

SEQ ID NO: 13101 - DNA, 36 bp, Artificial Sequence
  Synthetic oligonucleotide
aggcgaacccttctatcaacgactttggtacgtcga

SEQ ID NO: 13102 - DNA, 37 bp, Artificial Sequence
  Synthetic oligonucleotide
agggaccctaccaacaggtgcatggtggacggtccga

SEQ ID NO: 13103 - DNA, 35 bp, Artificial Sequence
  Synthetic oligonucleotide
agtacgcgcttaagccatacgtacttctaaactgc

SEQ ID NO: 13104 - DNA, 35 bp, Artificial Sequence
  Synthetic oligonucleotide
agtagtttgctctagggcttctcgttccatacata

SEQ ID NO: 13105 - DNA, 36 bp, Artificial Sequence
  Synthetic oligonucleotide
agtcagttatggtgtcctttagagtacttttccgga

SEQ ID NO: 13106 - DNA, 36 bp, Artificial Sequence
  Synthetic oligonucleotide
agtcccgcggaagatggtactggggctcccttcgga

SEQ ID NO: 13107 - DNA, 35 bp, Artificial Sequence
  Synthetic oligonucleotide
agtcgcctagggatcaattctggtaacggaactag

SEQ ID NO: 13108 - DNA, 35 bp, Artificial Sequence
  Synthetic oligonucleotide
ataccaccagtcaagattaacatcgttccgtgatc

SEQ ID NO: 13109 - DNA, 35 bp, Artificial Sequence
  Synthetic oligonucleotide
ataccgcaatcgtactaagttagggttctaagggg

SEQ ID NO: 13110 - DNA, 37 bp, Artificial Sequence
  Synthetic oligonucleotide
atcaccgctggtaggtacgtatcttgacaaatgctga

SEQ ID NO: 13111 - DNA, 36 bp, Artificial Sequence
  Synthetic oligonucleotide
atcataatagaacggcaatccagactgggatacaaa

SEQ ID NO: 13112 - DNA, 36 bp, Artificial Sequence
  Synthetic oligonucleotide
atccgtcaggcagtcgggccttggtgaaaactgaag

SEQ ID NO: 13113 - DNA, 36 bp, Artificial Sequence
  Synthetic oligonucleotide
atgagggcgagatccctaatacgattacgtgtctga

SEQ ID NO: 13114 - DNA, 37 bp, Artificial Sequence
  Synthetic oligonucleotide
atgatccgtacttgtgaagttatttttgcccgattga

SEQ ID NO: 13115 - DNA, 37 bp, Artificial Sequence
  Synthetic oligonucleotide
atgcaaatgcacgcggtctggagccggataattttga

SEQ ID NO: 13116 - DNA, 37 bp, Artificial Sequence
  Synthetic oligonucleotide
atgccactttggttcggtaactggtgtaagacaatga

SEQ ID NO: 13117 - DNA, 35 bp, Artificial Sequence
  Synthetic oligonucleotide
atggaaggcgtgctggatatgaataagtccgttgc

SEQ ID NO: 13118 - DNA, 35 bp, Artificial Sequence
  Synthetic oligonucleotide
attaaggggacgtcctcgatagtcttacccaatga

SEQ ID NO: 13119 - DNA, 37 bp, Artificial Sequence
  Synthetic oligonucleotide
attacgaagtggacgaggtcccgtagcgggttgcgga

SEQ ID NO: 13120 - DNA, 35 bp, Artificial Sequence
  Synthetic oligonucleotide
attggggcgggatcgcagtcatggtgagtgcaaaa

SEQ ID NO: 13121 - DNA, 37 bp, Artificial Sequence
  Synthetic oligonucleotide
attgtgggcgtactcgcttccgtttgaggggtatcga

SEQ ID NO: 13122 - DNA, 37 bp, Artificial Sequence
  Synthetic oligonucleotide
catgtcggacacgggtctcctcatcctgtctggtaga

SEQ ID NO: 13123 - DNA, 37 bp, Artificial Sequence
  Synthetic oligonucleotide
ccacggcaattgggacatgatcacttccatcaaagga

SEQ ID NO: 13124 - DNA, 35 bp, Artificial Sequence
  Synthetic oligonucleotide
ccatcgtagattgcatgttcggtccttaggcatgc

SEQ ID NO: 13125 - DNA, 35 bp, Artificial Sequence
  Synthetic oligonucleotide
cccgccgggactaagttacggtgtggagactgctt

SEQ ID NO: 13126 - DNA, 37 bp, Artificial Sequence
  Synthetic oligonucleotide
cgaaggcatccgcccccccctaagatttgagacacga

SEQ ID NO: 13127 - DNA, 38 bp, Artificial Sequence
  Synthetic oligonucleotide
cgtacgctagtttaagtgctgcggatgctcgtaagtga

SEQ ID NO: 13128 - DNA, 35 bp, Artificial Sequence
  Synthetic oligonucleotide
ctatagtcccgaactgaggattcgctgcctagctc

SEQ ID NO: 13129 - DNA, 37 bp, Artificial Sequence
  Synthetic oligonucleotide
ctccgttacacggagctgcggagtagagctcacgtga

SEQ ID NO: 13130 - DNA, 37 bp, Artificial Sequence
  Synthetic oligonucleotide
ctggctacgtgtcccggtaacaggcgtagggccatga

SEQ ID NO: 13131 - DNA, 38 bp, Artificial Sequence
  Synthetic oligonucleotide
gaaccacgcgacgagtatagcctggggggagtatatga

SEQ ID NO: 13132 - DNA, 37 bp, Artificial Sequence
  Synthetic oligonucleotide
gaacttcccaggtgggcccaaagtactggacattcga

SEQ ID NO: 13133 - DNA, 36 bp, Artificial Sequence
  Synthetic oligonucleotide
gacaaggaatccatttggcactctgtgcctaacata

SEQ ID NO: 13134 - DNA, 35 bp, Artificial Sequence
  Synthetic oligonucleotide
gaggtttcacgaccgcaagtagatagaataccgct

SEQ ID NO: 13135 - DNA, 36 bp, Artificial Sequence
  Synthetic oligonucleotide
gagtatggttgcatcacctctaaaccctcaaggaaa

SEQ ID NO: 13136 - DNA, 36 bp, Artificial Sequence
  Synthetic oligonucleotide
gagtgaaggtgggatgcgcgaagacggaaaaacgta

SEQ ID NO: 13137 - DNA, 36 bp, Artificial Sequence
  Synthetic oligonucleotide
gagttaaactgcgattgttagtcacgattatgccta

SEQ ID NO: 13138 - DNA, 38 bp, Artificial Sequence
  Synthetic oligonucleotide
gatcagaacaattgcggtccggctgttcatcccgatga

SEQ ID NO: 13139 - DNA, 37 bp, Artificial Sequence
  Synthetic oligonucleotide
gatctggatgagtcatgcgttaggcaaatccttagga

SEQ ID NO: 13140 - DNA, 37 bp, Artificial Sequence
  Synthetic oligonucleotide
gatgctatgacttgttgatttggcttggaggtgagga

SEQ ID NO: 13141 - DNA, 38 bp, Artificial Sequence
  Synthetic oligonucleotide
gcaaacttgcacgttaggtaccgggggacttgggttga

SEQ ID NO: 13142 - DNA, 36 bp, Artificial Sequence
  Synthetic oligonucleotide
gcacccgtggatagatcggacgtgttctgaggagga

SEQ ID NO: 13143 - DNA, 36 bp, Artificial Sequence
  Synthetic oligonucleotide
gcacgtaattgtccttcgattttgggtcgatcatga

SEQ ID NO: 13144 - DNA, 35 bp, Artificial Sequence
  Synthetic oligonucleotide
gcactagccaggcccccatttggccggttgttgcg

SEQ ID NO: 13145 - DNA, 37 bp, Artificial Sequence
  Synthetic oligonucleotide
gcaggcatgaactactaagcgagcctcaacgtagaga

SEQ ID NO: 13146 - DNA, 36 bp, Artificial Sequence
  Synthetic oligonucleotide
gcagggaatccctgagtcatggtagagccaccggta

SEQ ID NO: 13147 - DNA, 37 bp, Artificial Sequence
  Synthetic oligonucleotide
gcccattattgttgaacggtttgatagtacatccaga

SEQ ID NO: 13148 - DNA, 38 bp, Artificial Sequence
  Synthetic oligonucleotide
gcctgagctgttcgtggtcccaagcctggagttcatga

SEQ ID NO: 13149 - DNA, 37 bp, Artificial Sequence
  Synthetic oligonucleotide
gcgagttcatcgtaacgagtcgtgatggtgactatga

SEQ ID NO: 13150 - DNA, 38 bp, Artificial Sequence
  Synthetic oligonucleotide
gcgtaatgcatagtcagtgtgacgggttacaagcctga

SEQ ID NO: 13151 - DNA, 37 bp, Artificial Sequence
  Synthetic oligonucleotide
gcgtaatgggctatgcttatcgaagctctcagggaga

SEQ ID NO: 13152 - DNA, 38 bp, Artificial Sequence
  Synthetic oligonucleotide
gcgtgccaagcatgcttacgagttaaaataaaatttga

SEQ ID NO: 13153 - DNA, 36 bp, Artificial Sequence
  Synthetic oligonucleotide
gcgtgcgaggtcatgacatgggccctttgggacaaa

SEQ ID NO: 13154 - DNA, 35 bp, Artificial Sequence
  Synthetic oligonucleotide
gctacacccagcctcaggagagccaaaacgtgcgg

SEQ ID NO: 13155 - DNA, 35 bp, Artificial Sequence
  Synthetic oligonucleotide
gctatgtgagctggttttcgggccctacagtgaga

SEQ ID NO: 13156 - DNA, 35 bp, Artificial Sequence
  Synthetic oligonucleotide
gctcaaacctggctggaatgtacgcaggcccaaac

SEQ ID NO: 13157 - DNA, 36 bp, Artificial Sequence
  Synthetic oligonucleotide
gctgaagcctcccatagcggagagcggttctattca

SEQ ID NO: 13158 - DNA, 35 bp, Artificial Sequence
  Synthetic oligonucleotide
gctggacccccctcccaacaacaggggattaagac

SEQ ID NO: 13159 - DNA, 38 bp, Artificial Sequence
  Synthetic oligonucleotide
ggactgcgggcggtcacgaattggtctagcgttgctga

SEQ ID NO: 13160 - DNA, 35 bp, Artificial Sequence
  Synthetic oligonucleotide
ggatattggtatgtgttgtgtaacaataggcgtaa

SEQ ID NO: 13161 - DNA, 35 bp, Artificial Sequence
  Synthetic oligonucleotide
ggattcgcgtcacggagcgaaaagactaccgcgtg

SEQ ID NO: 13162 - DNA, 36 bp, Artificial Sequence
  Synthetic oligonucleotide
ggcgtgccacgtctctcggtaaatgtactcgagaca

SEQ ID NO: 13163 - DNA, 37 bp, Artificial Sequence
  Synthetic oligonucleotide
ggctcagttcgagccatagtaagtagacaggtttcga

SEQ ID NO: 13164 - DNA, 38 bp, Artificial Sequence
  Synthetic oligonucleotide
gggaatgcaggcctgggaaatgcacggtgcgtagctga

SEQ ID NO: 13165 - DNA, 38 bp, Artificial Sequence
  Synthetic oligonucleotide
gggtacttgaaccagggcctctggtcgtgccgacttga

SEQ ID NO: 13166 - DNA, 35 bp, Artificial Sequence
  Synthetic oligonucleotide
gggtgcgaggagataaaggactagagtggttgcac

SEQ ID NO: 13167 - DNA, 37 bp, Artificial Sequence
  Synthetic oligonucleotide
ggtaacctgccttgtcatgaagaggtttaacgcgtga

SEQ ID NO: 13168 - DNA, 38 bp, Artificial Sequence
  Synthetic oligonucleotide
ggtagaggcacccaatgcgccacttcatgcagttgtga

SEQ ID NO: 13169 - DNA, 36 bp, Artificial Sequence
  Synthetic oligonucleotide
ggtagcattacggaatggtaagtaacatgggtttaa

SEQ ID NO: 13170 - DNA, 36 bp, Artificial Sequence
  Synthetic oligonucleotide
ggtcataaccgtatgatgtcaactgcggaccacaaa

SEQ ID NO: 13171 - DNA, 37 bp, Artificial Sequence
  Synthetic oligonucleotide
ggtgtggtgccatcgggagaagaaacactaagcgtta

SEQ ID NO: 13172 - DNA, 37 bp, Artificial Sequence
  Synthetic oligonucleotide
ggttcaggggaattgagatcggatgggacaacacgga

SEQ ID NO: 13173 - DNA, 36 bp, Artificial Sequence
  Synthetic oligonucleotide
ggttgaccagggtaaatggttgcaaatcgtgtatta

SEQ ID NO: 13174 - DNA, 36 bp, Artificial Sequence
  Synthetic oligonucleotide
ggtttggtgtcttgcattcctatgtgtagatttata

SEQ ID NO: 13175 - DNA, 36 bp, Artificial Sequence
  Synthetic oligonucleotide
gtacgccagtcttgtgagttatcttgtcagatttga

SEQ ID NO: 13176 - DNA, 37 bp, Artificial Sequence
  Synthetic oligonucleotide
gtattacattgtttatggataagttagttagactaga

SEQ ID NO: 13177 - DNA, 36 bp, Artificial Sequence
  Synthetic oligonucleotide
gtcagcccctaacaacggggcgagtggcctggtcca

SEQ ID NO: 13178 - DNA, 35 bp, Artificial Sequence
  Synthetic oligonucleotide
gtgaaggtaaccacgccagcctcgcttcactagcg

SEQ ID NO: 13179 - DNA, 36 bp, Artificial Sequence
  Synthetic oligonucleotide
gtgccaagtattgctatatccagggattagaatcca

SEQ ID NO: 13180 - DNA, 37 bp, Artificial Sequence
  Synthetic oligonucleotide
gtgccagtattcatacgtaagtctctggccatggaga

SEQ ID NO: 13181 - DNA, 38 bp, Artificial Sequence
  Synthetic oligonucleotide
gtgcgagcttgggtgagtcacaacggggacgtggttga

SEQ ID NO: 13182 - DNA, 36 bp, Artificial Sequence
  Synthetic oligonucleotide
gtggggcgacaattataacaggatttgggggtacta

SEQ ID NO: 13183 - DNA, 37 bp, Artificial Sequence
  Synthetic oligonucleotide
gttagcgcacgaatgtacctcaggtttacgtggtaga

SEQ ID NO: 13184 - DNA, 37 bp, Artificial Sequence
  Synthetic oligonucleotide
gttatgtccacgtcctgatagatatccggattcgaga

SEQ ID NO: 13185 - DNA, 36 bp, Artificial Sequence
  Synthetic oligonucleotide
gttcacgaagagcctgttggctagacaccaccccga

SEQ ID NO: 13186 - DNA, 35 bp, Artificial Sequence
  Synthetic oligonucleotide
gttgtcgaggtcatcatctagagtgccgaacggct

SEQ ID NO: 13187 - DNA, 36 bp, Artificial Sequence
  Synthetic oligonucleotide
tacgagtctgggtcaccgggagtttgaccgaaccaa

SEQ ID NO: 13188 - DNA, 35 bp, Artificial Sequence
  Synthetic oligonucleotide
tacgcacagctttagcaatattacagcgctgcccc

SEQ ID NO: 13189 - DNA, 35 bp, Artificial Sequence
  Synthetic oligonucleotide
tacgggaacttcgttttgcggtacactacaccgcc

SEQ ID NO: 13190 - DNA, 37 bp, Artificial Sequence
  Synthetic oligonucleotide
tactaagcacagggtagtatgttgtctacatggtgga

SEQ ID NO: 13191 - DNA, 35 bp, Artificial Sequence
  Synthetic oligonucleotide
tactgggcttctcggtcaggcaagaatggtgggta

SEQ ID NO: 13192 - DNA, 35 bp, Artificial Sequence
  Synthetic oligonucleotide
tagatgctgatgttagagaatctgaaaggggtctt

SEQ ID NO: 13193 - DNA, 35 bp, Artificial Sequence
  Synthetic oligonucleotide
taggaaggaagaggtaccgggactaagatcgggaa

SEQ ID NO: 13194 - DNA, 38 bp, Artificial Sequence
  Synthetic oligonucleotide
taggccaggccgacggaacagctctccgccatgggtga

SEQ ID NO: 13195 - DNA, 35 bp, Artificial Sequence
  Synthetic oligonucleotide
tagtaccagcaattgagttagaacagcttcgtaga

SEQ ID NO: 13196 - DNA, 36 bp, Artificial Sequence
  Synthetic oligonucleotide
tatcacgcgcaaaggcttgaggtttgccaaatacga

SEQ ID NO: 13197 - DNA, 35 bp, Artificial Sequence
  Synthetic oligonucleotide
tatcggggtcgcttgaaatatctgtcttgagcaaa

SEQ ID NO: 13198 - DNA, 36 bp, Artificial Sequence
  Synthetic oligonucleotide
tatggctcaagtcatggataacctgggacgagttaa

SEQ ID NO: 13199 - DNA, 35 bp, Artificial Sequence
  Synthetic oligonucleotide
tattcgctgtggggttggtgataacggatgtgtga

SEQ ID NO: 13200 - DNA, 38 bp, Artificial Sequence
  Synthetic oligonucleotide
tattgagtcgcgggaggacgtaggggttaaagatttga

SEQ ID NO: 13201 - DNA, 35 bp, Artificial Sequence
  Synthetic oligonucleotide
tattgcaatagttaggcacaaccggtagaaccgga

SEQ ID NO: 13202 - DNA, 38 bp, Artificial Sequence
  Synthetic oligonucleotide
tcaccgttgatcgtagggcggcatttaggtaccgctga

SEQ ID NO: 13203 - DNA, 36 bp, Artificial Sequence
  Synthetic oligonucleotide
tcacggtcgttcacccgtggtacttagccatgtgga

SEQ ID NO: 13204 - DNA, 37 bp, Artificial Sequence
  Synthetic oligonucleotide
tcacttcgattcgatgcaccgttatgcaggcatacga

SEQ ID NO: 13205 - DNA, 36 bp, Artificial Sequence
  Synthetic oligonucleotide
tccattgcctgcctcattcgctcatgactagcatta

SEQ ID NO: 13206 - DNA, 37 bp, Artificial Sequence
  Synthetic oligonucleotide
tcccagagcattcatagtgtcttcaaaagggcgccga

SEQ ID NO: 13207 - DNA, 36 bp, Artificial Sequence
  Synthetic oligonucleotide
tcccgagtcggactttaagcacggggggcttgccaa

SEQ ID NO: 13208 - DNA, 35 bp, Artificial Sequence
  Synthetic oligonucleotide
tccgagattaccacgcgtcgaagaaccggtcattc

SEQ ID NO: 13209 - DNA, 33 bp, Artificial Sequence
  Synthetic oligonucleotide
tctgatcatgtcttcgggtcgggggcctcgccc

SEQ ID NO: 13210 - DNA, 35 bp, Artificial Sequence
  Synthetic oligonucleotide
tctgtagacggctcccttggggaggggaggccatc

SEQ ID NO: 13211 - DNA, 35 bp, Artificial Sequence
  Synthetic oligonucleotide
tggtccgaagagcctcctacgtatagtcttagtaa

SEQ ID NO: 13212 - DNA, 37 bp, Artificial Sequence
  Synthetic oligonucleotide
tggtggtcctaagacgatacgtgaaagacacctacga

SEQ ID NO: 13213 - DNA, 37 bp, Artificial Sequence
  Synthetic oligonucleotide
tgtccctaggtggcactactatgcctgatttaagtga

SEQ ID NO: 13214 - DNA, 35 bp, Artificial Sequence
  Synthetic oligonucleotide
tgtgtgacatgcacggtcaggtcctagcttaggga

SEQ ID NO: 13215 - DNA, 36 bp, Artificial Sequence
  Synthetic oligonucleotide
tgtgttcacgggatactctgcctttgagctttttga

SEQ ID NO: 13216 - DNA, 38 bp, Artificial Sequence
  Synthetic oligonucleotide
ttaactagctgcaatctagggagagttgaacttcctga

SEQ ID NO: 13217 - DNA, 35 bp, Artificial Sequence
  Synthetic oligonucleotide
ttaagcactggatcattggctcacggatcattaga

SEQ ID NO: 13218 - DNA, 35 bp, Artificial Sequence
  Synthetic oligonucleotide
ttacggactgtgctaaggcgtttatattatgcgag

SEQ ID NO: 13219 - DNA, 37 bp, Artificial Sequence
  Synthetic oligonucleotide
ttacggtggaagcgaaagcctagaacacgtgtgctga

SEQ ID NO: 13220 - DNA, 35 bp, Artificial Sequence
  Synthetic oligonucleotide
ttataggcatgagtcatggtggactgtaaattgtg

SEQ ID NO: 13221 - DNA, 35 bp, Artificial Sequence
  Synthetic oligonucleotide
ttatgcttacgggcccgtacaaattttcccggaag

SEQ ID NO: 13222 - DNA, 36 bp, Artificial Sequence
  Synthetic oligonucleotide
ttccgagttcgggccgaaacaagccgggggtttgta

SEQ ID NO: 13223 - DNA, 35 bp, Artificial Sequence
  Synthetic oligonucleotide
ttctggtcatagagtgggaacttacgcgccatctg

SEQ ID NO: 13224 - DNA, 38 bp, Artificial Sequence
  Synthetic oligonucleotide
ttgaaggggtaggtgtagaaaccagtcgcaagtcctga

SEQ ID NO: 13225 - DNA, 37 bp, Artificial Sequence
  Synthetic oligonucleotide
ttggaccgttgctgaagtctgaggtgtgtcatttcga

SEQ ID NO: 13226 - DNA, 35 bp, Artificial Sequence
  Synthetic oligonucleotide
ttgtacgggcgtagtcgacctgggctttaggtgtc

SEQ ID NO: 13227 - DNA, 35 bp, Artificial Sequence
  Synthetic oligonucleotide
tttcgactgcgatcaagtaggggtgatgtggtcat

SEQ ID NO: 13228 - DNA, 37 bp, Artificial Sequence
  Synthetic oligonucleotide
tttcgccttcccctccgtcaatttgagacagtctgga

SEQ ID NO: 13229 - DNA, 37 bp, Artificial Sequence
  Synthetic oligonucleotide
tttgagtatcgatggcatccgggggtgcacaataaga

SEQ ID NO: 13230 - DNA, 35 bp, Artificial Sequence
  Synthetic oligonucleotide
gtacgtgggaacgctaccttagcgatttactagtc

SEQ ID NO: 13231 - DNA, 37 bp, Artificial Sequence
  Synthetic oligonucleotide
actgaacagccatggttctaactcacgctctaagtga

SEQ ID NO: 13232 - DNA, 38 bp, Artificial Sequence
  Synthetic oligonucleotide
taccggatagaaagaacgtgtaacagtgaagcagttga

SEQ ID NO: 13233 - DNA, 35 bp, Artificial Sequence
  Synthetic oligonucleotide
gtgcgtacacaactttgtctgaacacagcttgccg

SEQ ID NO: 13234 - DNA, 35 bp, Artificial Sequence
  Synthetic oligonucleotide
ggtgcagataaatggtatctttcccgtggaatatt

SEQ ID NO: 13235 - DNA, 35 bp, Artificial Sequence
  Synthetic oligonucleotide
tagtaggcctgacagaaagggtcatattaggtgtg

SEQ ID NO: 13236 - DNA, 35 bp, Artificial Sequence
  Synthetic oligonucleotide
gccgccactgggaagcctaagtagggttgatttga

SEQ ID NO: 13237 - DNA, 37 bp, Artificial Sequence
  Synthetic oligonucleotide
gctgcgttaactaatggtgacctatgcagtcatggga

SEQ ID NO: 13238 - DNA, 38 bp, Artificial Sequence
  Synthetic oligonucleotide
gaaactgactcctggttacgtcactcgtagaacactga

SEQ ID NO: 13239 - DNA, 38 bp, Artificial Sequence
  Synthetic oligonucleotide
taatgccctgaggcatcttgtactccgtccgggattga

SEQ ID NO: 13240 - DNA, 37 bp, Artificial Sequence
  Synthetic oligonucleotide
gagcgtaaggcgcctcgtacttgcctagatacgccga

SEQ ID NO: 13241 - DNA, 37 bp, Artificial Sequence
  Synthetic oligonucleotide
aagtaccggcttagaaacgttttatgatcaagtacga

SEQ ID NO: 13242 - DNA, 36 bp, Artificial Sequence
  Synthetic oligonucleotide
attaaacattcaatcgactgcttgctaggcaacata

SEQ ID NO: 13243 - DNA, 35 bp, Artificial Sequence
  Synthetic oligonucleotide
gttcccaacgggtggtttccttcatcggataaagg

SEQ ID NO: 13244 - DNA, 35 bp, Artificial Sequence
  Synthetic oligonucleotide
gtttgggtaacaagatgtacggtaaacttgcttag

SEQ ID NO: 13245 - DNA, 38 bp, Artificial Sequence
  Synthetic oligonucleotide
taagacgtactgctttacgcgtgtatcgttaccgatga

SEQ ID NO: 13246 - DNA, 37 bp, Artificial Sequence
  Synthetic oligonucleotide
ttccggtgatcaggtggagcggtgtgctctcccccga

SEQ ID NO: 13247 - DNA, 34 bp, Artificial Sequence
  Synthetic oligonucleotide
aacaaggcgctgtgtccagtagtgcctccagtta

SEQ ID NO: 13248 - DNA, 35 bp, Artificial Sequence
  Synthetic oligonucleotide
aatatgagggctattcaatgctacacgcttttctg

SEQ ID NO: 13249 - DNA, 35 bp, Artificial Sequence
  Synthetic oligonucleotide
acgaatttaatccgccccgttagttttgtgtactc

SEQ ID NO: 13250 - DNA, 36 bp, Artificial Sequence
  Synthetic oligonucleotide
gtcctgatcaggaccagtacgcacggacgacgttga

SEQ ID NO: 13251 - DNA, 37 bp, Artificial Sequence
  Synthetic oligonucleotide
tgatcgtacagactttagaataggggataaaccggga

SEQ ID NO: 13252 - DNA, 36 bp, Artificial Sequence
  Synthetic oligonucleotide
tgcctgccactgcgcctactaaaagttggaataaaa

SEQ ID NO: 13253 - DNA, 35 bp, Artificial Sequence
  Synthetic oligonucleotide
tgcgaccaatagccatcgtgattcttgtgacaacg

SEQ ID NO: 13254 - DNA, 36 bp, Artificial Sequence
  Synthetic oligonucleotide
aagtcagcagggtactgctacgcccccgttgtcgga

SEQ ID NO: 13255 - DNA, 38 bp, Artificial Sequence
  Synthetic oligonucleotide
acagcgaagccaatggctttgaacgaaatgttgcatga

SEQ ID NO: 13256 - DNA, 35 bp, Artificial Sequence
  Synthetic oligonucleotide
acagggcgatctcagaaactggagcactatgggtg

SEQ ID NO: 13257 - DNA, 36 bp, Artificial Sequence
  Synthetic oligonucleotide
acattctgaacgaaacgctatccgcttacggagcga

SEQ ID NO: 13258 - DNA, 38 bp, Artificial Sequence
  Synthetic oligonucleotide
agcaccagcaggcgcttccccggtaccgacatgcatga

SEQ ID NO: 13259 - DNA, 37 bp, Artificial Sequence
  Synthetic oligonucleotide
atcggttgcttgtacctattgacggggtaacatggga

SEQ ID NO: 13260 - DNA, 36 bp, Artificial Sequence
  Synthetic oligonucleotide
ccacacacggtcaccatgcttttatcatttgatagt

SEQ ID NO: 13261 - DNA, 37 bp, Artificial Sequence
  Synthetic oligonucleotide
gagtcttacttccagtgaggggctgcaatagggcgga

SEQ ID NO: 13262 - DNA, 36 bp, Artificial Sequence
  Synthetic oligonucleotide
gcagtatggtcggggaagagtattactagagttgta

SEQ ID NO: 13263 - DNA, 36 bp, Artificial Sequence
  Synthetic oligonucleotide
gcctgggactaaggggatagtatttccggcctcgca

SEQ ID NO: 13264 - DNA, 35 bp, Artificial Sequence
  Synthetic oligonucleotide
gctgcataaacatgatcaggtttacgggcatggcc

SEQ ID NO: 13265 - DNA, 36 bp, Artificial Sequence
  Synthetic oligonucleotide
ggattcttacagcgcaacagaggattgtatcgccga

SEQ ID NO: 13266 - DNA, 36 bp, Artificial Sequence
  Synthetic oligonucleotide
gggttcaggtagacgtattggtataccccgagcgta

SEQ ID NO: 13267 - DNA, 35 bp, Artificial Sequence
  Synthetic oligonucleotide
gtgaagctcattttgggggtggtctgcctcacaaa

SEQ ID NO: 13268 - DNA, 38 bp, Artificial Sequence
  Synthetic oligonucleotide
taaacaggagtcgtaacgttttcaggccgtctcactga

SEQ ID NO: 13269 - DNA, 37 bp, Artificial Sequence
  Synthetic oligonucleotide
ttcgagaggccatttatgtgtttaggatcgtagccga

SEQ ID NO: 13270 - DNA, 37 bp, Artificial Sequence
  Synthetic oligonucleotide
ttgagcagtagttttagactgctactcaatggtggga

SEQ ID NO: 13271 - DNA, 35 bp, Artificial Sequence
  Synthetic oligonucleotide
gactacatccggagaacgtattgggttgaacaaga

SEQ ID NO: 13272 - DNA, 37 bp, Artificial Sequence
  Synthetic oligonucleotide
accctcaggttcagctagatacagtcgtaactgcgga

SEQ ID NO: 13273 - DNA, 37 bp, Artificial Sequence
  Synthetic oligonucleotide
ataacgcgttttggaagtacaaggaaagcttggcaga

SEQ ID NO: 13274 - DNA, 37 bp, Artificial Sequence
  Synthetic oligonucleotide
atcctcacattgaatatgtgttacacaaaactgcgga

SEQ ID NO: 13275 - DNA, 35 bp, Artificial Sequence
  Synthetic oligonucleotide
gatccgacatgcaggcaagaaccatttaggttgga

SEQ ID NO: 13276 - DNA, 29 bp, Artificial Sequence
  Synthetic oligonucleotide
gcatgaagtctaggtacaagttgcaattc

SEQ ID NO: 13277 - DNA, 36 bp, Artificial Sequence
  Synthetic oligonucleotide
gcatgtttgcgctggtggatccacggttacagtcta

SEQ ID NO: 13278 - DNA, 35 bp, Artificial Sequence
  Synthetic oligonucleotide
gccgtttacccctcccaggcgagccttaccaactc

SEQ ID NO: 13279 - DNA, 36 bp, Artificial Sequence
  Synthetic oligonucleotide
ggtcaacctggaatgaactcgcccacgctggattga

SEQ ID NO: 13280 - DNA, 36 bp, Artificial Sequence
  Synthetic oligonucleotide
gtcaacatcctggcctagggtaaatggagcttagaa

SEQ ID NO: 13281 - DNA, 38 bp, Artificial Sequence
  Synthetic oligonucleotide
gtcatgagcggactaggagttgtgccacggcatactga

SEQ ID NO: 13282 - DNA, 35 bp, Artificial Sequence
  Synthetic oligonucleotide
gtggatctgaccgatctagacttccacactgtagt

SEQ ID NO: 13283 - DNA, 37 bp, Artificial Sequence
  Synthetic oligonucleotide
tagggccgaatagggcttcgtgcaatgtaagttcaga

SEQ ID NO: 13284 - DNA, 37 bp, Artificial Sequence
  Synthetic oligonucleotide
tgacgtgtgtgactatgtaaaggatgaaggcgtacga

SEQ ID NO: 13285 - DNA, 38 bp, Artificial Sequence
  Synthetic oligonucleotide
tacacgttctggatgggattgatgttctccaggactga

SEQ ID NO: 13286 - DNA, 37 bp, Artificial Sequence
  Synthetic oligonucleotide
aaatgcagtacgatttgacgttgaatttacggcttga

SEQ ID NO: 13287 - DNA, 35 bp, Artificial Sequence
  Synthetic oligonucleotide
aatgtactgtgcaggtaatgatcttaacccctact

SEQ ID NO: 13288 - DNA, 35 bp, Artificial Sequence
  Synthetic oligonucleotide
accccccttcggtaatgctgtatctctgggtgtgt

SEQ ID NO: 13289 - DNA, 37 bp, Artificial Sequence
  Synthetic oligonucleotide
acgttaacctgctgacggggttgagttgcttgcggga

SEQ ID NO: 13290 - DNA, 35 bp, Artificial Sequence
  Synthetic oligonucleotide
actgtgttgcaggtttcaccgataggtgttcagat

SEQ ID NO: 13291 - DNA, 36 bp, Artificial Sequence
  Synthetic oligonucleotide
agaatccaaatactagcaggctgagttgatcgagta

SEQ ID NO: 13292 - DNA, 35 bp, Artificial Sequence
  Synthetic oligonucleotide
agcaaggtacgtcctccgagggggatttgcatggc

SEQ ID NO: 13293 - DNA, 36 bp, Artificial Sequence
  Synthetic oligonucleotide
aggtcacgattgaaagtcatggggctcctacactaa

SEQ ID NO: 13294 - DNA, 37 bp, Artificial Sequence
  Synthetic oligonucleotide
aggttagcgtacgggacaactatatcatgagagatga

SEQ ID NO: 13295 - DNA, 37 bp, Artificial Sequence
  Synthetic oligonucleotide
attactggggattcatgatcctctaagagagtagcga

SEQ ID NO: 13296 - DNA, 37 bp, Artificial Sequence
  Synthetic oligonucleotide
cattgacttagtcgtaaaattccgacactagtgtcga

SEQ ID NO: 13297 - DNA, 38 bp, Artificial Sequence
  Synthetic oligonucleotide
gaaattgcacgcctaagtcgtacttatccaattaatga

SEQ ID NO: 13298 - DNA, 35 bp, Artificial Sequence
  Synthetic oligonucleotide
gacaaggggagtctctgacccatatgttcgtaggt

SEQ ID NO: 13299 - DNA, 38 bp, Artificial Sequence
  Synthetic oligonucleotide
gacgtgggtgggttatgaccccgccctcgtcgagctga

SEQ ID NO: 13300 - DNA, 37 bp, Artificial Sequence
  Synthetic oligonucleotide
gactacatatcggggagtatcaggcggatggttctga

SEQ ID NO: 13301 - DNA, 36 bp, Artificial Sequence
  Synthetic oligonucleotide
gataggtgactcattggagatgctttcttagtgtaa

SEQ ID NO: 13302 - DNA, 37 bp, Artificial Sequence
  Synthetic oligonucleotide
gatgttcaacccgttacacagtcatttgatacatcga

SEQ ID NO: 13303 - DNA, 35 bp, Artificial Sequence
  Synthetic oligonucleotide
gcaacctcgcgccgttgtcgtgtttacctcaggcc

SEQ ID NO: 13304 - DNA, 38 bp, Artificial Sequence
  Synthetic oligonucleotide
gcagacaccagttcaactgctatggttcgacaccctga

SEQ ID NO: 13305 - DNA, 36 bp, Artificial Sequence
  Synthetic oligonucleotide
gcatccgcccccaccgaccccgcatggaacttcgga

SEQ ID NO: 13306 - DNA, 35 bp, Artificial Sequence
  Synthetic oligonucleotide
gccggaccgtcttggtcctgccacgaggcaaacat

SEQ ID NO: 13307 - DNA, 36 bp, Artificial Sequence
  Synthetic oligonucleotide
gcctgtacggaggtcctaaccgggttgtgactagca

SEQ ID NO: 13308 - DNA, 35 bp, Artificial Sequence
  Synthetic oligonucleotide
gcgattatagttggccggatgcattttccgccttc

SEQ ID NO: 13309 - DNA, 36 bp, Artificial Sequence
  Synthetic oligonucleotide
gcgccacgcacgcctggctgtgtcggttcctgacca

SEQ ID NO: 13310 - DNA, 35 bp, Artificial Sequence
  Synthetic oligonucleotide
gcgtttacccacagccgctagatccatgtggaggt

SEQ ID NO: 13311 - DNA, 35 bp, Artificial Sequence
  Synthetic oligonucleotide
gctaataagtcaggcctcgggaatctagggttgcg

SEQ ID NO: 13312 - DNA, 35 bp, Artificial Sequence
  Synthetic oligonucleotide
gctgtccggatgccctcggttatacgggatcatcc

SEQ ID NO: 13313 - DNA, 38 bp, Artificial Sequence
  Synthetic oligonucleotide
ggtagagagtcattgaaataattagacactcgggttga

SEQ ID NO: 13314 - DNA, 35 bp, Artificial Sequence
  Synthetic oligonucleotide
gtacatgggacatcatatagtgcgatcggggatcg

SEQ ID NO: 13315 - DNA, 35 bp, Artificial Sequence
  Synthetic oligonucleotide
gtacggatcaagcgtccccaaatctaacgcactac

SEQ ID NO: 13316 - DNA, 36 bp, Artificial Sequence
  Synthetic oligonucleotide
gtagtgagttgcggatattctagagacggataagca

SEQ ID NO: 13317 - DNA, 36 bp, Artificial Sequence
  Synthetic oligonucleotide
gtcgccccggtatgatgtcctatgtagatgtaggga

SEQ ID NO: 13318 - DNA, 37 bp, Artificial Sequence
  Synthetic oligonucleotide
gttagctgctgccctgtaagcgccaactcgtatggga

SEQ ID NO: 13319 - DNA, 36 bp, Artificial Sequence
  Synthetic oligonucleotide
gttttgagaagagcagggcttttatttgaggggtaa

SEQ ID NO: 13320 - DNA, 35 bp, Artificial Sequence
  Synthetic oligonucleotide
taatgtagtgggaacgttaccattaaagagtgttt

SEQ ID NO: 13321 - DNA, 38 bp, Artificial Sequence
  Synthetic oligonucleotide
tacggttgggcactcgagcgaaagtatgtccgttgtga

SEQ ID NO: 13322 - DNA, 36 bp, Artificial Sequence
  Synthetic oligonucleotide
tagcaacccgcgttagttccgcagtgcatggcacga

SEQ ID NO: 13323 - DNA, 37 bp, Artificial Sequence
  Synthetic oligonucleotide
tgcgaccctttagcggtgagtatggcatgagcccgga

SEQ ID NO: 13324 - DNA, 35 bp, Artificial Sequence
  Synthetic oligonucleotide
tgggaggtaagctactccttacgctgttaactgtc

SEQ ID NO: 13325 - DNA, 36 bp, Artificial Sequence
  Synthetic oligonucleotide
tgtagtgggttgccactgtctgtcgccctcatagta

SEQ ID NO: 13326 - DNA, 36 bp, Artificial Sequence
  Synthetic oligonucleotide
ttcgcggctagcacgaaggtacgccctggccattga

SEQ ID NO: 13327 - DNA, 36 bp, Artificial Sequence
  Synthetic oligonucleotide
ttcggggggccaagtgagtagggctgttcgattgga

SEQ ID NO: 13328 - DNA, 37 bp, Artificial Sequence
  Synthetic oligonucleotide
aaaccgacctacaagatcgccacgagggagtctctga

SEQ ID NO: 13329 - DNA, 37 bp, Artificial Sequence
  Synthetic oligonucleotide
aagactcctcaaaggggtgggatagatcacagtcaga

SEQ ID NO: 13330 - DNA, 33 bp, Artificial Sequence
  Synthetic oligonucleotide
aatgtcgttgccggctatagaacgggttacgca

SEQ ID NO: 13331 - DNA, 37 bp, Artificial Sequence
  Synthetic oligonucleotide
acgtcaactagtacttaagtagcggtcgcgataggga

SEQ ID NO: 13332 - DNA, 35 bp, Artificial Sequence
  Synthetic oligonucleotide
actaagaggaccgcttgagcaaacttgttagaacg

SEQ ID NO: 13333 - DNA, 37 bp, Artificial Sequence
  Synthetic oligonucleotide
actgtccgacggggcccatggggcgttgcgagagaga

SEQ ID NO: 13334 - DNA, 38 bp, Artificial Sequence
  Synthetic oligonucleotide
agcaaagtgagcgattgcaggcttctggggcattttga

SEQ ID NO: 13335 - DNA, 38 bp, Artificial Sequence
  Synthetic oligonucleotide
agcctagattagacgtacaattaaggtagacgtggtga

SEQ ID NO: 13336 - DNA, 37 bp, Artificial Sequence
  Synthetic oligonucleotide
ataaaactcgcagggagctatagatacgcaacaacga

SEQ ID NO: 13337 - DNA, 36 bp, Artificial Sequence
  Synthetic oligonucleotide
atacggtgaagggtgtcaggctggtaattcctgata

SEQ ID NO: 13338 - DNA, 38 bp, Artificial Sequence
  Synthetic oligonucleotide
atagaaagtcgtgtataccgagcccgaggaaatgttga

SEQ ID NO: 13339 - DNA, 36 bp, Artificial Sequence
  Synthetic oligonucleotide
atggttgcgtagtcctggttgcgaacctccgatcga

SEQ ID NO: 13340 - DNA, 36 bp, Artificial Sequence
  Synthetic oligonucleotide
catccttttggtggcttgaccgataagtggagggta

SEQ ID NO: 13341 - DNA, 37 bp, Artificial Sequence
  Synthetic oligonucleotide
catgaggttggtagtatatacgtgcgttggttctcga

SEQ ID NO: 13342 - DNA, 38 bp, Artificial Sequence
  Synthetic oligonucleotide
ccacgtagcttgtggggggcatttgtggacgtctatga

SEQ ID NO: 13343 - DNA, 38 bp, Artificial Sequence
  Synthetic oligonucleotide
ccactattgtggaggatagggggtcgtgtctggtatga

SEQ ID NO: 13344 - DNA, 35 bp, Artificial Sequence
  Synthetic oligonucleotide
ccatggggtagttacggtttaagtgttcttatctc

SEQ ID NO: 13345 - DNA, 38 bp, Artificial Sequence
  Synthetic oligonucleotide
ccggtactgcttgtggaatttgggggtcccgaatttga

SEQ ID NO: 13346 - DNA, 35 bp, Artificial Sequence
  Synthetic oligonucleotide
cctcccttctgcgtggaaagccggcatggacggtt

SEQ ID NO: 13347 - DNA, 36 bp, Artificial Sequence
  Synthetic oligonucleotide
cctgggtaaaagattagaaggacgaaacgttactaa

SEQ ID NO: 13348 - DNA, 38 bp, Artificial Sequence
  Synthetic oligonucleotide
gaactccgttggcatcaagattttttcgggtagcttga

SEQ ID NO: 13349 - DNA, 37 bp, Artificial Sequence
  Synthetic oligonucleotide
gaagggtggactatgaatagtcacgcgtaaccgcaga

SEQ ID NO: 13350 - DNA, 37 bp, Artificial Sequence
  Synthetic oligonucleotide
gaccagttgacgctgtacacgctccaaggcactgcga

SEQ ID NO: 13351 - DNA, 35 bp, Artificial Sequence
  Synthetic oligonucleotide
gagcgctaacttttacaaggacacacatcatgcta

SEQ ID NO: 13352 - DNA, 35 bp, Artificial Sequence
  Synthetic oligonucleotide
gagtctgcgttaggaattcggtcttaagaagtatg

SEQ ID NO: 13353 - DNA, 38 bp, Artificial Sequence
  Synthetic oligonucleotide
gatgactgagcatggtctactgctacgtcgagtattga

SEQ ID NO: 13354 - DNA, 35 bp, Artificial Sequence
  Synthetic oligonucleotide
gatgtctggccggaaatcccgatcatggtgctgag

SEQ ID NO: 13355 - DNA, 38 bp, Artificial Sequence
  Synthetic oligonucleotide
gcacacggtatggacctgagacatgtttctgggactga

SEQ ID NO: 13356 - DNA, 35 bp, Artificial Sequence
  Synthetic oligonucleotide
gcattagattcgcggcgccgggcgttactgcctag

SEQ ID NO: 13357 - DNA, 38 bp, Artificial Sequence
  Synthetic oligonucleotide
gcccgagacgacccgtttagattaaaaatggcgactga

SEQ ID NO: 13358 - DNA, 36 bp, Artificial Sequence
  Synthetic oligonucleotide
gcgaagtatacgcaaaggaatcccgagtaggggtga

SEQ ID NO: 13359 - DNA, 35 bp, Artificial Sequence
  Synthetic oligonucleotide
gcgggagagcaggcgcctaaaggtctgctgcagga

SEQ ID NO: 13360 - DNA, 36 bp, Artificial Sequence
  Synthetic oligonucleotide
gcgtctttgctaacttacgtcttcggactcctttca

SEQ ID NO: 13361 - DNA, 36 bp, Artificial Sequence
  Synthetic oligonucleotide
gctacgatttgcgagtggacagagaataagaaatta

SEQ ID NO: 13362 - DNA, 37 bp, Artificial Sequence
  Synthetic oligonucleotide
ggaacacaacagctccgtcgagaaacgtccgagctga

SEQ ID NO: 13363 - DNA, 35 bp, Artificial Sequence
  Synthetic oligonucleotide
ggaccgtatcaccgagccacagaatcgctggctag

SEQ ID NO: 13364 - DNA, 36 bp, Artificial Sequence
  Synthetic oligonucleotide
ggagatggacgaaaatgcgtgatcgggtccagtcta

SEQ ID NO: 13365 - DNA, 38 bp, Artificial Sequence
  Synthetic oligonucleotide
ggcgctgacccttgggtaagtgcagagtgtgcacatga

SEQ ID NO: 13366 - DNA, 38 bp, Artificial Sequence
  Synthetic oligonucleotide
ggctagaaggtgggtttcttcgcggctagcgcttatga

SEQ ID NO: 13367 - DNA, 35 bp, Artificial Sequence
  Synthetic oligonucleotide
gggggcactgtaacaccctctttactgcatttttc

SEQ ID NO: 13368 - DNA, 35 bp, Artificial Sequence
  Synthetic oligonucleotide
ggtatgtaggctctgtcccaagatctagggatcgc

SEQ ID NO: 13369 - DNA, 36 bp, Artificial Sequence
  Synthetic oligonucleotide
ggtcctctgtggtagaaattgggctaacaggtacta

SEQ ID NO: 13370 - DNA, 36 bp, Artificial Sequence
  Synthetic oligonucleotide
ggttgtagtctcgatctaacacctgtggactgacaa

SEQ ID NO: 13371 - DNA, 37 bp, Artificial Sequence
  Synthetic oligonucleotide
gtacatcaaaagttatatatggtgatccgattcggga

SEQ ID NO: 13372 - DNA, 38 bp, Artificial Sequence
  Synthetic oligonucleotide
gtatttatgtgcagacattctcattatgctggatttga

SEQ ID NO: 13373 - DNA, 35 bp, Artificial Sequence
  Synthetic oligonucleotide
gtcgtaagagctatcacgtgccctaaagtacgccg

SEQ ID NO: 13374 - DNA, 36 bp, Artificial Sequence
  Synthetic oligonucleotide
gtgaaactgggggacttcggaaatctcgtactaaca

SEQ ID NO: 13375 - DNA, 35 bp, Artificial Sequence
  Synthetic oligonucleotide
gtgcttcgacgactgcattgccattgcacgcgaaa

SEQ ID NO: 13376 - DNA, 37 bp, Artificial Sequence
  Synthetic oligonucleotide
gtgcttgcaggcggtaagtgtggaggttaaatagtga

SEQ ID NO: 13377 - DNA, 37 bp, Artificial Sequence
  Synthetic oligonucleotide
gtgtacgtgtaggtaatggcggatattggaaatggga

SEQ ID NO: 13378 - DNA, 35 bp, Artificial Sequence
  Synthetic oligonucleotide
gtgtagtatatatgtcgacctgtaatcccgcaatg

SEQ ID NO: 13379 - DNA, 38 bp, Artificial Sequence
  Synthetic oligonucleotide
gtgttgccaggcattagtgagtacggtaccagctttga

SEQ ID NO: 13380 - DNA, 35 bp, Artificial Sequence
  Synthetic oligonucleotide
gttctgtgatactaatgtcttaggtcacgggaagc

SEQ ID NO: 13381 - DNA, 35 bp, Artificial Sequence
  Synthetic oligonucleotide
taacccgacaaatgtgcgcagagcggtgactaatg

SEQ ID NO: 13382 - DNA, 36 bp, Artificial Sequence
  Synthetic oligonucleotide
taacctgatcgttgcgattaccagggagctattgga

SEQ ID NO: 13383 - DNA, 37 bp, Artificial Sequence
  Synthetic oligonucleotide
taaggtaacgaagtggcaaacgattgtaggagttcga

SEQ ID NO: 13384 - DNA, 37 bp, Artificial Sequence
  Synthetic oligonucleotide
tacagcaacggcatccgcctggccaagttacgactga

SEQ ID NO: 13385 - DNA, 35 bp, Artificial Sequence
  Synthetic oligonucleotide
tacgagccgccgaataggccaaataattcttcggc

SEQ ID NO: 13386 - DNA, 35 bp, Artificial Sequence
  Synthetic oligonucleotide
tacgtaacgttgactacttaaacgcccataatggg

SEQ ID NO: 13387 - DNA, 35 bp, Artificial Sequence
  Synthetic oligonucleotide
tatacattggccacgaccggtgtcgttgccagcat

SEQ ID NO: 13388 - DNA, 35 bp, Artificial Sequence
  Synthetic oligonucleotide
tatccagtcaaggaatagcacgaaccagggaacca

SEQ ID NO: 13389 - DNA, 35 bp, Artificial Sequence
  Synthetic oligonucleotide
tatgaggcgatcttcggatttgtaatgttcgggtt

SEQ ID NO: 13390 - DNA, 35 bp, Artificial Sequence
  Synthetic oligonucleotide
tcagcgaactgcatcttactgttacagaagtaggg

SEQ ID NO: 13391 - DNA, 36 bp, Artificial Sequence
  Synthetic oligonucleotide
tcatccagtactggcttcgtccgtgggtagcaataa

SEQ ID NO: 13392 - DNA, 35 bp, Artificial Sequence
  Synthetic oligonucleotide
tccgagtcgttgtgaaactgaaaggttgattttac

SEQ ID NO: 13393 - DNA, 37 bp, Artificial Sequence
  Synthetic oligonucleotide
tccgcttagaagctgcatgtcctgggggagatcccga

SEQ ID NO: 13394 - DNA, 38 bp, Artificial Sequence
  Synthetic oligonucleotide
tcgcaggcagatcacagttaattatttgtttgatgtga

SEQ ID NO: 13395 - DNA, 38 bp, Artificial Sequence
  Synthetic oligonucleotide
tctggttgggatgccctggtctagagagagacgcttga

SEQ ID NO: 13396 - DNA, 36 bp, Artificial Sequence
  Synthetic oligonucleotide
tgagccccttcgccataatgttaattgcgcaaagga

SEQ ID NO: 13397 - DNA, 37 bp, Artificial Sequence
  Synthetic oligonucleotide
tgagggattgcttattaatcataggacaacagtaaga

SEQ ID NO: 13398 - DNA, 37 bp, Artificial Sequence
  Synthetic oligonucleotide
tggaaacggacgagcggttagaagatgcaagtaaaga

SEQ ID NO: 13399 - DNA, 36 bp, Artificial Sequence
  Synthetic oligonucleotide
tgggctatgctctctgtttcagagcctagatgcgta

SEQ ID NO: 13400 - DNA, 37 bp, Artificial Sequence
  Synthetic oligonucleotide
tggtcacgttttcggattgcacctgattctatagcga

SEQ ID NO: 13401 - DNA, 35 bp, Artificial Sequence
  Synthetic oligonucleotide
gaaacggttagtctggagacacgttaaagttatcc

SEQ ID NO: 13402 - DNA, 36 bp, Artificial Sequence
  Synthetic oligonucleotide
tgccaccgattgtgtggtggacttttgtgtactaaa

SEQ ID NO: 13403 - DNA, 35 bp, Artificial Sequence
  Synthetic oligonucleotide
ttcaaacgacgacaatcgcgcaacatagcaggcat

SEQ ID NO: 13404 - DNA, 35 bp, Artificial Sequence
  Synthetic oligonucleotide
aacctcggctcatgggcacaacgtccccaagcgag

SEQ ID NO: 13405 - DNA, 36 bp, Artificial Sequence
  Synthetic oligonucleotide
aactcgcggccagggtacactcattggcctcgcgta

SEQ ID NO: 13406 - DNA, 35 bp, Artificial Sequence
  Synthetic oligonucleotide
aagggccaatgcgtactgcatagaaattaagagaa

SEQ ID NO: 13407 - DNA, 35 bp, Artificial Sequence
  Synthetic oligonucleotide
aaggtatgatgctttcacgatcccaagcgggacag

SEQ ID NO: 13408 - DNA, 35 bp, Artificial Sequence
  Synthetic oligonucleotide
aatacgtgctagaaccacgtccctacgaataacgg

SEQ ID NO: 13409 - DNA, 36 bp, Artificial Sequence
  Synthetic oligonucleotide
aatggaaactaagttttaggaaacgacctgatctga

SEQ ID NO: 13410 - DNA, 36 bp, Artificial Sequence
  Synthetic oligonucleotide
aattggagcgaaatgcatcccaggggatggtacgga

SEQ ID NO: 13411 - DNA, 37 bp, Artificial Sequence
  Synthetic oligonucleotide
acactggctcctggtaatgccagaaccttgtatctga

SEQ ID NO: 13412 - DNA, 37 bp, Artificial Sequence
  Synthetic oligonucleotide
acagtaaggtgagtcccctgttcttcgttcggtttga

SEQ ID NO: 13413 - DNA, 38 bp, Artificial Sequence
  Synthetic oligonucleotide
acatgctataggtataagcaagcaatttacatctttga

SEQ ID NO: 13414 - DNA, 37 bp, Artificial Sequence
  Synthetic oligonucleotide
accatgtcacgcgctggaggggatacgaccaagcaga

SEQ ID NO: 13415 - DNA, 36 bp, Artificial Sequence
  Synthetic oligonucleotide
accgacatcggatgcgggtacgcgttgatagcatta

SEQ ID NO: 13416 - DNA, 38 bp, Artificial Sequence
  Synthetic oligonucleotide
accgtaaagctggggacaagcttgtgggatcgtactga

SEQ ID NO: 13417 - DNA, 37 bp, Artificial Sequence
  Synthetic oligonucleotide
acggaccgaactgtcccgtacaagtccactgctagga

SEQ ID NO: 13418 - DNA, 37 bp, Artificial Sequence
  Synthetic oligonucleotide
acggtctttaggccaaggtacgatctatgtagctcga

SEQ ID NO: 13419 - DNA, 38 bp, Artificial Sequence
  Synthetic oligonucleotide
actacggatcgttatagtgcatcccgatgtaagcttga

SEQ ID NO: 13420 - DNA, 37 bp, Artificial Sequence
  Synthetic oligonucleotide
actcgatcagtactctcgaaccgagttttgtggctga

SEQ ID NO: 13421 - DNA, 36 bp, Artificial Sequence
  Synthetic oligonucleotide
actctccaagtgaggtgctgccccccaaggctcaaa

SEQ ID NO: 13422 - DNA, 35 bp, Artificial Sequence
  Synthetic oligonucleotide
actgaacaggcggtggccagggcatccaagggacg

SEQ ID NO: 13423 - DNA, 35 bp, Artificial Sequence
  Synthetic oligonucleotide
acttacgtacgcgcttttcctatgtcggtggtgac

SEQ ID NO: 13424 - DNA, 35 bp, Artificial Sequence
  Synthetic oligonucleotide
acttgtcggtggaacgatcagttccagtagtaagg

SEQ ID NO: 13425 - DNA, 37 bp, Artificial Sequence
  Synthetic oligonucleotide
agaagctggaatagcggatgcacataccaccgagaga

SEQ ID NO: 13426 - DNA, 35 bp, Artificial Sequence
  Synthetic oligonucleotide
agctattgcgttgtatgcggatgttaatatgtccg

SEQ ID NO: 13427 - DNA, 36 bp, Artificial Sequence
  Synthetic oligonucleotide
aggtgcataggatatggcatctatcgcccgcaagta

SEQ ID NO: 13428 - DNA, 36 bp, Artificial Sequence
  Synthetic oligonucleotide
agtaaggtagtaacttttgtaaaaattgaatgttca

SEQ ID NO: 13429 - DNA, 36 bp, Artificial Sequence
  Synthetic oligonucleotide
agtatcggagtccccgtgatccctttacatgggata

SEQ ID NO: 13430 - DNA, 38 bp, Artificial Sequence
  Synthetic oligonucleotide
agtcgtatattatacgctgccttactgagtgtgggtga

SEQ ID NO: 13431 - DNA, 36 bp, Artificial Sequence
  Synthetic oligonucleotide
agtgctcaaccagtattatttagctggatgcaggaa

SEQ ID NO: 13432 - DNA, 36 bp, Artificial Sequence
  Synthetic oligonucleotide
atacaacagtgcgaatgcacagggcaggaaggacga

SEQ ID NO: 13433 - DNA, 35 bp, Artificial Sequence
  Synthetic oligonucleotide
atggatgggtcgatgagctactttgctcagtgcga

SEQ ID NO: 13434 - DNA, 37 bp, Artificial Sequence
  Synthetic oligonucleotide
attgaacctggtccgcaattcaagtggggtactacga

SEQ ID NO: 13435 - DNA, 37 bp, Artificial Sequence
  Synthetic oligonucleotide
attgtatcggcctgacacaaatgttgcttcacgcgga

SEQ ID NO: 13436 - DNA, 35 bp, Artificial Sequence
  Synthetic oligonucleotide
caacgggatatattaactgataacgtatgagcagg

SEQ ID NO: 13437 - DNA, 35 bp, Artificial Sequence
  Synthetic oligonucleotide
caacgggtcgtggccagatgggccgttgccaagta

SEQ ID NO: 13438 - DNA, 36 bp, Artificial Sequence
  Synthetic oligonucleotide
ccagggcaatctggcgttgactctgagcacatagta

SEQ ID NO: 13439 - DNA, 38 bp, Artificial Sequence
  Synthetic oligonucleotide
cccccccggcgtaaacatgtcactaaattaggcgctga

SEQ ID NO: 13440 - DNA, 38 bp, Artificial Sequence
  Synthetic oligonucleotide
cgacgcacagagcctcggtcgttgacaagtacggctga

SEQ ID NO: 13441 - DNA, 35 bp, Artificial Sequence
  Synthetic oligonucleotide
cgtagtctactggtgttactaacatctttgattgg

SEQ ID NO: 13442 - DNA, 35 bp, Artificial Sequence
  Synthetic oligonucleotide
gaaaggtcaggcaacaactcccgagtcctgcgaag

SEQ ID NO: 13443 - DNA, 36 bp, Artificial Sequence
  Synthetic oligonucleotide
gacacaagtgctgtacagtgggggggtggcttccaa

SEQ ID NO: 13444 - DNA, 38 bp, Artificial Sequence
  Synthetic oligonucleotide
gacagagctccgcggtataggttgtatcgcaggattga

SEQ ID NO: 13445 - DNA, 36 bp, Artificial Sequence
  Synthetic oligonucleotide
gaccaattgggctatggtcaactcgtggtagacgga

SEQ ID NO: 13446 - DNA, 38 bp, Artificial Sequence
  Synthetic oligonucleotide
gacgaaactaggagagtttcggtgatcgcattgtgtga

SEQ ID NO: 13447 - DNA, 36 bp, Artificial Sequence
  Synthetic oligonucleotide
gagttagttgtcatgaaatgtggtctcgctggctca

SEQ ID NO: 13448 - DNA, 35 bp, Artificial Sequence
  Synthetic oligonucleotide
gatatgcaacgccgttactcaacctgcgagaaatt

SEQ ID NO: 13449 - DNA, 35 bp, Artificial Sequence
  Synthetic oligonucleotide
gatgctatctcgctcacggacatgtctctcgtatg

SEQ ID NO: 13450 - DNA, 35 bp, Artificial Sequence
  Synthetic oligonucleotide
gcaaggcacacagttgggtcccgtctgaggacagg

SEQ ID NO: 13451 - DNA, 37 bp, Artificial Sequence
  Synthetic oligonucleotide
gccccgtgaatcaggatttgaactgttcggcctacga

SEQ ID NO: 13452 - DNA, 35 bp, Artificial Sequence
  Synthetic oligonucleotide
gcctcatgtttggagctaaagcaagcatcgaagct

SEQ ID NO: 13453 - DNA, 36 bp, Artificial Sequence
  Synthetic oligonucleotide
gctattttgtaagcggggtgtcatttaatcatgaca

SEQ ID NO: 13454 - DNA, 35 bp, Artificial Sequence
  Synthetic oligonucleotide
gctttcagtcagttttcgtggctatgcttatataa

SEQ ID NO: 13455 - DNA, 38 bp, Artificial Sequence
  Synthetic oligonucleotide
ggaatgccgacttaacatgatgagattgttgtctgtga

SEQ ID NO: 13456 - DNA, 38 bp, Artificial Sequence
  Synthetic oligonucleotide
ggacctgtcagtctgtgtttgtagagtgattatgttga

SEQ ID NO: 13457 - DNA, 38 bp, Artificial Sequence
  Synthetic oligonucleotide
ggctcataccgaaggaatgggtcgctggtctttcgtga

SEQ ID NO: 13458 - DNA, 35 bp, Artificial Sequence
  Synthetic oligonucleotide
gggcaaccatgcctacgcgtctgcaatatgcttgt

SEQ ID NO: 13459 - DNA, 36 bp, Artificial Sequence
  Synthetic oligonucleotide
ggggctccgagtaagctgtctggttaggataaggta

SEQ ID NO: 13460 - DNA, 38 bp, Artificial Sequence
  Synthetic oligonucleotide
gggttcgtcactggatagcgcgacgagtagcacaatga

SEQ ID NO: 13461 - DNA, 38 bp, Artificial Sequence
  Synthetic oligonucleotide
ggtcttagtagtattgaacgccttccaggaattgctga

SEQ ID NO: 13462 - DNA, 36 bp, Artificial Sequence
  Synthetic oligonucleotide
gtaacagcctatcgttgggagtattcgggctaccaa

SEQ ID NO: 13463 - DNA, 36 bp, Artificial Sequence
  Synthetic oligonucleotide
gtagtactggtccccgaagtagttatctaagcggta

SEQ ID NO: 13464 - DNA, 37 bp, Artificial Sequence
  Synthetic oligonucleotide
gtcaaatagcaaggttagcgcctaaaaatgcttatga

SEQ ID NO: 13465 - DNA, 38 bp, Artificial Sequence
  Synthetic oligonucleotide
gtcctccgggggctccacccgggagacattagggatga

SEQ ID NO: 13466 - DNA, 36 bp, Artificial Sequence
  Synthetic oligonucleotide
gtcgctggttaacgacgggaaccatatagtttcgga

SEQ ID NO: 13467 - DNA, 35 bp, Artificial Sequence
  Synthetic oligonucleotide
gtctagccccgtgaatcctcatgccggggcaaggg

SEQ ID NO: 13468 - DNA, 36 bp, Artificial Sequence
  Synthetic oligonucleotide
gtgacacttgggatggattatgtaagcctagcttga

SEQ ID NO: 13469 - DNA, 36 bp, Artificial Sequence
  Synthetic oligonucleotide
gtgtcaacgcgcatggggtgcataaatgggtgatta

SEQ ID NO: 13470 - DNA, 36 bp, Artificial Sequence
  Synthetic oligonucleotide
gttctagtactagcgttcttgcaatggggcgagtga

SEQ ID NO: 13471 - DNA, 35 bp, Artificial Sequence
  Synthetic oligonucleotide
gttgtcaggtacatctaacagtcaactaaagggta

SEQ ID NO: 13472 - DNA, 36 bp, Artificial Sequence
  Synthetic oligonucleotide
gtttggacatgatcacaacgaacgcctcccgtgata

SEQ ID NO: 13473 - DNA, 38 bp, Artificial Sequence
  Synthetic oligonucleotide
taaggcgtagtcaggcatgcatatctacggcggaatga

SEQ ID NO: 13474 - DNA, 36 bp, Artificial Sequence
  Synthetic oligonucleotide
taatgtaggggagccaacatattctgcaagagataa

SEQ ID NO: 13475 - DNA, 35 bp, Artificial Sequence
  Synthetic oligonucleotide
taattgggtagtgcaacggaatcatcctatagaat

SEQ ID NO: 13476 - DNA, 38 bp, Artificial Sequence
  Synthetic oligonucleotide
tacatgggatcagcatgacgaactttggagctacttga

SEQ ID NO: 13477 - DNA, 35 bp, Artificial Sequence
  Synthetic oligonucleotide
tacctgtatatgaagtacacaaaccagtcgccggc

SEQ ID NO: 13478 - DNA, 35 bp, Artificial Sequence
  Synthetic oligonucleotide
tactcgcacattgcctgcagaccatgtggctagga

SEQ ID NO: 13479 - DNA, 36 bp, Artificial Sequence
  Synthetic oligonucleotide
tagagacgttccgtcgcccatagatactactgagga

SEQ ID NO: 13480 - DNA, 38 bp, Artificial Sequence
  Synthetic oligonucleotide
tcaaggtacccgcggaacgtccgggtgttacggcttga

SEQ ID NO: 13481 - DNA, 37 bp, Artificial Sequence
  Synthetic oligonucleotide
tccatgcggtcttgcggagaattgtaagtttcgttga

SEQ ID NO: 13482 - DNA, 35 bp, Artificial Sequence
  Synthetic oligonucleotide
tccctgttgggccgagtgtgggatagccgctgggt

SEQ ID NO: 13483 - DNA, 37 bp, Artificial Sequence
  Synthetic oligonucleotide
tcctattgagcgtttgcgtatcttgtgatagtgcaga

SEQ ID NO: 13484 - DNA, 36 bp, Artificial Sequence
  Synthetic oligonucleotide
tcgctaggtacatgtaacgaacggaagaagagtcta

SEQ ID NO: 13485 - DNA, 36 bp, Artificial Sequence
  Synthetic oligonucleotide
tcgtagtcaatgggaggagtaacattgtcagtatta

SEQ ID NO: 13486 - DNA, 37 bp, Artificial Sequence
  Synthetic oligonucleotide
tgcgacatctacgtgtgggacgctacgagctagggga

SEQ ID NO: 13487 - DNA, 35 bp, Artificial Sequence
  Synthetic oligonucleotide
tgcgggatgtctctaagcctctttgggttaaaggc

SEQ ID NO: 13488 - DNA, 37 bp, Artificial Sequence
  Synthetic oligonucleotide
tggaacgacgcgcttctccaaggcgggctgaaggtga

SEQ ID NO: 13489 - DNA, 37 bp, Artificial Sequence
  Synthetic oligonucleotide
tgggagtccgttgctcgcgtgacccccatacgtagga

SEQ ID NO: 13490 - DNA, 38 bp, Artificial Sequence
  Synthetic oligonucleotide
tgtaaactcaacgaacgcgctgtgcgatagactggtga

SEQ ID NO: 13491 - DNA, 36 bp, Artificial Sequence
  Synthetic oligonucleotide
tgtactgcgctttaatcttgctgatatacggtaata

SEQ ID NO: 13492 - DNA, 38 bp, Artificial Sequence
  Synthetic oligonucleotide
tgtatagccaatgctttaagtggtttaggaggtgatga

SEQ ID NO: 13493 - DNA, 36 bp, Artificial Sequence
  Synthetic oligonucleotide
tgtcctgggggaaagttgcctaaactctggcttgga

SEQ ID NO: 13494 - DNA, 35 bp, Artificial Sequence
  Synthetic oligonucleotide
tgtctgagagtcgggggctttgagtacggtattcg

SEQ ID NO: 13495 - DNA, 36 bp, Artificial Sequence
  Synthetic oligonucleotide
ttcgcctgacgggacgaaattgtggagcacaggaca

SEQ ID NO: 13496 - DNA, 36 bp, Artificial Sequence
  Synthetic oligonucleotide
ttctaggagtgagttttgagtgcgccttttttacga

SEQ ID NO: 13497 - DNA, 36 bp, Artificial Sequence
  Synthetic oligonucleotide
ttgaccactgagacttcgctctacggccccccataa

SEQ ID NO: 13498 - DNA, 35 bp, Artificial Sequence
  Synthetic oligonucleotide
ttgtacttagccccataccttggtgtaggtatcat

SEQ ID NO: 13499 - DNA, 35 bp, Artificial Sequence
  Synthetic oligonucleotide
ttgtcaaggcatcgaacgaatcgaacttaaggact

SEQ ID NO: 13500 - DNA, 36 bp, Artificial Sequence
  Synthetic oligonucleotide
tttgcatcggacctgaggttcttctgtccgtaccta

SEQ ID NO: 13501 - DNA, 37 bp, Artificial Sequence
  Synthetic oligonucleotide
tttgttaaccgggcccgtaactgaatcgaagggtaga

SEQ ID NO: 13502 - DNA, 38 bp, Artificial Sequence
  Synthetic oligonucleotide
taagtggtcgggaaggcttaactggacggtagaattga

SEQ ID NO: 13503 - DNA, 37 bp, Artificial Sequence
  Synthetic oligonucleotide
ggaataatcacccgccataaagtgggtaagcacccga

SEQ ID NO: 13504 - DNA, 38 bp, Artificial Sequence
  Synthetic oligonucleotide
gttgttggggcttggatcaggactgcagtcacttgtga

SEQ ID NO: 13505 - DNA, 35 bp, Artificial Sequence
  Synthetic oligonucleotide
tactgcaagcatttgggatgagtgggaaagccact

SEQ ID NO: 13506 - DNA, 36 bp, Artificial Sequence
  Synthetic oligonucleotide
cctgtactgatgggcaccttgcctgtgtcaggtcca

SEQ ID NO: 13507 - DNA, 38 bp, Artificial Sequence
  Synthetic oligonucleotide
acgaagtgatggtggctaggctaccgaacagtacttga

SEQ ID NO: 13508 - DNA, 37 bp, Artificial Sequence
  Synthetic oligonucleotide
gtcagtgcgattcactcgtgattctcgctagtagcga

SEQ ID NO: 13509 - DNA, 37 bp, Artificial Sequence
  Synthetic oligonucleotide
ttagacgttggtaccaggagtgatatttgtatcttga

SEQ ID NO: 13510 - DNA, 38 bp, Artificial Sequence
  Synthetic oligonucleotide
gtccgagtagcgctggttgagcgatccggaacgtgtga

SEQ ID NO: 13511 - DNA, 35 bp, Artificial Sequence
  Synthetic oligonucleotide
atccccgttggaagacggtgcaattgtaggctgtt

SEQ ID NO: 13512 - DNA, 38 bp, Artificial Sequence
  Synthetic oligonucleotide
ataatgcggttagtcgccatcattggtatccgatgtga

SEQ ID NO: 13513 - DNA, 37 bp, Artificial Sequence
  Synthetic oligonucleotide
cacatgaggggaacccctgcatgtccatggacatcga

SEQ ID NO: 13514 - DNA, 37 bp, Artificial Sequence
  Synthetic oligonucleotide
cctgagagatgtcagtctatgcttcgagagtataaga

SEQ ID NO: 13515 - DNA, 38 bp, Artificial Sequence
  Synthetic oligonucleotide
gggccatcattaggtggtgaatcaagacggtgagatga

SEQ ID NO: 13516 - DNA, 38 bp, Artificial Sequence
  Synthetic oligonucleotide
gtgccacgtacggtgggcctaccccatttgactaatga

SEQ ID NO: 13517 - DNA, 35 bp, Artificial Sequence
  Synthetic oligonucleotide
tactgcggcaagcaacaatagtactggcaagatgg

SEQ ID NO: 13518 - DNA, 37 bp, Artificial Sequence
  Synthetic oligonucleotide
aacaggttgaaggagcacactatcgtgggacggacga

SEQ ID NO: 13519 - DNA, 36 bp, Artificial Sequence
  Synthetic oligonucleotide
attaaattagcttgccattgagatacgttccactaa

SEQ ID NO: 13520 - DNA, 36 bp, Artificial Sequence
  Synthetic oligonucleotide
gtatcagcaggagtaggggcaccataacggtactaa

SEQ ID NO: 13521 - DNA, 35 bp, Artificial Sequence
  Synthetic oligonucleotide
aatagtcagcgtgccgactttcatagttctatcgt

SEQ ID NO: 13522 - DNA, 35 bp, Artificial Sequence
  Synthetic oligonucleotide
agagtgttcaagcggtctctccatcacgaaatcgt

SEQ ID NO: 13523 - DNA, 38 bp, Artificial Sequence
  Synthetic oligonucleotide
gcacatggcctaggagtcctaccatgacgggcgaacga

SEQ ID NO: 13524 - DNA, 37 bp, Artificial Sequence
  Synthetic oligonucleotide
gctctgcctccccttgttttagtcactgtatcacaga

SEQ ID NO: 13525 - DNA, 37 bp, Artificial Sequence
  Synthetic oligonucleotide
ggttgacacgctggagggcgcttcatttctgaaatga

SEQ ID NO: 13526 - DNA, 35 bp, Artificial Sequence
  Synthetic oligonucleotide
gtatggcgactatgtgtctcattgaatgcatgacg

SEQ ID NO: 13527 - DNA, 35 bp, Artificial Sequence
  Synthetic oligonucleotide
gtctctatactggaactgaggtgttatgagcgaga

SEQ ID NO: 13528 - DNA, 35 bp, Artificial Sequence
  Synthetic oligonucleotide
tgaggaacacgtttactgctagagttgccacctac

SEQ ID NO: 13529 - DNA, 37 bp, Artificial Sequence
  Synthetic oligonucleotide
ttggaaggattggggcccaggcaaaagaaactggcga

SEQ ID NO: 13530 - DNA, 38 bp, Artificial Sequence
  Synthetic oligonucleotide
agggaacggtgaatataatcaccggacaaggagtctga

SEQ ID NO: 13531 - DNA, 38 bp, Artificial Sequence
  Synthetic oligonucleotide
gcaatgtcatggttgttttcgagcgagtgtgaatgtga

SEQ ID NO: 13532 - DNA, 35 bp, Artificial Sequence
  Synthetic oligonucleotide
aatcgccatggctgagtacgtggtgatgagtgata

SEQ ID NO: 13533 - DNA, 38 bp, Artificial Sequence
  Synthetic oligonucleotide
aaagacaagtgcgtgtcataatcataggcaagtagtga

SEQ ID NO: 13534 - DNA, 36 bp, Artificial Sequence
  Synthetic oligonucleotide
acacgccggagtcgtgtgctggcgcaagtcaatgta

SEQ ID NO: 13535 - DNA, 36 bp, Artificial Sequence
  Synthetic oligonucleotide
accatcgcccaattacacgttacgtactccatgtta

SEQ ID NO: 13536 - DNA, 38 bp, Artificial Sequence
  Synthetic oligonucleotide
agtacccaggttgcatgtactactaataattagcgtga

SEQ ID NO: 13537 - DNA, 35 bp, Artificial Sequence
  Synthetic oligonucleotide
atagatctcaaatcgcaggccagggtagtacgacg

SEQ ID NO: 13538 - DNA, 37 bp, Artificial Sequence
  Synthetic oligonucleotide
catggcatagtaatgtatacaaggagactatgctaga

SEQ ID NO: 13539 - DNA, 37 bp, Artificial Sequence
  Synthetic oligonucleotide
cctaatacgagctggggactttggcatcaggcgacga

SEQ ID NO: 13540 - DNA, 36 bp, Artificial Sequence
  Synthetic oligonucleotide
gcaccatggagttgtttgattaaacacaggggggga

SEQ ID NO: 13541 - DNA, 37 bp, Artificial Sequence
  Synthetic oligonucleotide
gcgaaatgatccaggtgttttatagatggcctcagga

SEQ ID NO: 13542 - DNA, 35 bp, Artificial Sequence
  Synthetic oligonucleotide
ggttgtggtgggggaactaatgactgtaccatgaa

SEQ ID NO: 13543 - DNA, 35 bp, Artificial Sequence
  Synthetic oligonucleotide
gtgagacgaatgggcttacatgcgcattaagagtt

SEQ ID NO: 13544 - DNA, 35 bp, Artificial Sequence
  Synthetic oligonucleotide
tacatcgcccgcccggtgttatcgggtaatcgggt

SEQ ID NO: 13545 - DNA, 36 bp, Artificial Sequence
  Synthetic oligonucleotide
tcacttcgtcagttacatgactcgagtgtatcgata

SEQ ID NO: 13546 - DNA, 36 bp, Artificial Sequence
  Synthetic oligonucleotide
tcagcctatgggatataaagtatgggttggtaagga

SEQ ID NO: 13547 - DNA, 35 bp, Artificial Sequence
  Synthetic oligonucleotide
tcatgagtcgggctgtgttcgcgtacctggggttt

SEQ ID NO: 13548 - DNA, 37 bp, Artificial Sequence
  Synthetic oligonucleotide
tccatcggggttgttggtggcttggggatgggtacga

SEQ ID NO: 13549 - DNA, 35 bp, Artificial Sequence
  Synthetic oligonucleotide
ttcattcgcgggttaggggtcgtaatcagtgtgaa

SEQ ID NO: 13550 - DNA, 38 bp, Artificial Sequence
  Synthetic oligonucleotide
tcgcctaggctttgcagtaacggccgtccacttcatga

SEQ ID NO: 13551 - DNA, 37 bp, Artificial Sequence
  Synthetic oligonucleotide
tacaacgatactaacgcatgttgtaaagtgtgcatga

SEQ ID NO: 13552 - DNA, 35 bp, Artificial Sequence
  Synthetic oligonucleotide
aaatacgagatagctcaatctcccgagttggggta

SEQ ID NO: 13553 - DNA, 38 bp, Artificial Sequence
  Synthetic oligonucleotide
aatgtgtacatggtccgactacatagtgcctggagtga

SEQ ID NO: 13554 - DNA, 36 bp, Artificial Sequence
  Synthetic oligonucleotide
actggtggagtccgatccggcgccacctccaggtta

SEQ ID NO: 13555 - DNA, 36 bp, Artificial Sequence
  Synthetic oligonucleotide
agaagtagctggaaacatcgatacccatgctacgta

SEQ ID NO: 13556 - DNA, 36 bp, Artificial Sequence
  Synthetic oligonucleotide
atgtccatgtccgtgcgacccactggccatggtgaa

SEQ ID NO: 13557 - DNA, 36 bp, Artificial Sequence
  Synthetic oligonucleotide
catggagacgatgaccggtgccgacgaccgggtcga

SEQ ID NO: 13558 - DNA, 35 bp, Artificial Sequence
  Synthetic oligonucleotide
cgcatgatatatacgcagtcatgttgggatacatc

SEQ ID NO: 13559 - DNA, 36 bp, Artificial Sequence
  Synthetic oligonucleotide
ctgagtggttgcggtaccagtcattaacgttatgca

SEQ ID NO: 13560 - DNA, 37 bp, Artificial Sequence
  Synthetic oligonucleotide
gagatcacgtggcactgacccaccagcaagtacggga

SEQ ID NO: 13561 - DNA, 38 bp, Artificial Sequence
  Synthetic oligonucleotide
gcacatcatgtaaggcggaacacctagagtaagcttga

SEQ ID NO: 13562 - DNA, 36 bp, Artificial Sequence
  Synthetic oligonucleotide
gcgggtgccagccgcactgcatacccgtcacttcca

SEQ ID NO: 13563 - DNA, 38 bp, Artificial Sequence
  Synthetic oligonucleotide
gctgtacacgtgtacacccgttgactgtcagtgattga

SEQ ID NO: 13564 - DNA, 36 bp, Artificial Sequence
  Synthetic oligonucleotide
gtatagggaacaaatctaccgtattgcacagataaa

SEQ ID NO: 13565 - DNA, 38 bp, Artificial Sequence
  Synthetic oligonucleotide
gtcagacctggaagtttcccacgcatgtaccgcaatga

SEQ ID NO: 13566 - DNA, 37 bp, Artificial Sequence
  Synthetic oligonucleotide
gtcggtggtcacgagaggactcactaggccttttgga

SEQ ID NO: 13567 - DNA, 37 bp, Artificial Sequence
  Synthetic oligonucleotide
tatggtctggttcataagggtgccctcccggaacgga

SEQ ID NO: 13568 - DNA, 35 bp, Artificial Sequence
  Synthetic oligonucleotide
tgaaacggagccgttagaccggagatggtagctaa

SEQ ID NO: 13569 - DNA, 37 bp, Artificial Sequence
  Synthetic oligonucleotide
tgaggccaggcacacgtataaactattgcaggactga

SEQ ID NO: 13570 - DNA, 35 bp, Artificial Sequence
  Synthetic oligonucleotide
tgtacagttgctactagggaggtagtaattgtatc

SEQ ID NO: 13571 - DNA, 35 bp, Artificial Sequence
  Synthetic oligonucleotide
ttgtggcatttgtcaaggtcaggggatgctccaaa

SEQ ID NO: 13572 - DNA, 36 bp, Artificial Sequence
  Synthetic oligonucleotide
actaagtcagtacgctattcgtacttgtcaaagcaa

SEQ ID NO: 13573 - DNA, 38 bp, Artificial Sequence
  Synthetic oligonucleotide
agactggaaactcatgaggcgatgaacagggtgcgtga

SEQ ID NO: 13574 - DNA, 35 bp, Artificial Sequence
  Synthetic oligonucleotide
gaatgccaacctgatcggaattgactggacatatc

SEQ ID NO: 13575 - DNA, 36 bp, Artificial Sequence
  Synthetic oligonucleotide
gagacacgtattagttaagccgcctacagggtacca

SEQ ID NO: 13576 - DNA, 36 bp, Artificial Sequence
  Synthetic oligonucleotide
aaacacgagacaggggtctctgaagacgtagtaata

SEQ ID NO: 13577 - DNA, 38 bp, Artificial Sequence
  Synthetic oligonucleotide
aaacggcggtagtatgctcgtaatagagccgtttgtga

SEQ ID NO: 13578 - DNA, 36 bp, Artificial Sequence
  Synthetic oligonucleotide
actcccagtcgacctcgtggcaacggggttttagta

SEQ ID NO: 13579 - DNA, 35 bp, Artificial Sequence
  Synthetic oligonucleotide
agcatggccacagcaacaggaacattccggctgtg

SEQ ID NO: 13580 - DNA, 35 bp, Artificial Sequence
  Synthetic oligonucleotide
agggcgtttgtctttgtaggggggacggtctccaa

SEQ ID NO: 13581 - DNA, 37 bp, Artificial Sequence
  Synthetic oligonucleotide
agtccacggtctgtgttacgggggtcttactaggaga

SEQ ID NO: 13582 - DNA, 38 bp, Artificial Sequence
  Synthetic oligonucleotide
agtgtgccgacaacgttatgtaaggctatgtactatga

SEQ ID NO: 13583 - DNA, 36 bp, Artificial Sequence
  Synthetic oligonucleotide
atatgctatacggggatagagaaccgcatagacgca

SEQ ID NO: 13584 - DNA, 37 bp, Artificial Sequence
  Synthetic oligonucleotide
attgggtggatgggggatgataggctttcgtaagcga

SEQ ID NO: 13585 - DNA, 35 bp, Artificial Sequence
  Synthetic oligonucleotide
caatcaatgggtagaactgctgacacggagtggtg

SEQ ID NO: 13586 - DNA, 37 bp, Artificial Sequence
  Synthetic oligonucleotide
ccaagactgcaggtgggacacagttagttggctagga

SEQ ID NO: 13587 - DNA, 36 bp, Artificial Sequence
  Synthetic oligonucleotide
ctcgtcgaaccacgtttgcgaccgacaacatttcga

SEQ ID NO: 13588 - DNA, 35 bp, Artificial Sequence
  Synthetic oligonucleotide
gaacaacgtactactagaggcgaaccagccttggc

SEQ ID NO: 13589 - DNA, 36 bp, Artificial Sequence
  Synthetic oligonucleotide
gaacgacaagtttcatcaatggctgagctccgcaaa

SEQ ID NO: 13590 - DNA, 35 bp, Artificial Sequence
  Synthetic oligonucleotide
gaagtggactatcggtccttttgcgctacgagtgg

SEQ ID NO: 13591 - DNA, 36 bp, Artificial Sequence
  Synthetic oligonucleotide
gacgggggggtaacgcagtaagggagagaaccagga

SEQ ID NO: 13592 - DNA, 37 bp, Artificial Sequence
  Synthetic oligonucleotide
gcactgctgttatgagaatcaggcgcagttatataga

SEQ ID NO: 13593 - DNA, 36 bp, Artificial Sequence
  Synthetic oligonucleotide
gcactggaagatgccgccaaggtcttctcgacctta

SEQ ID NO: 13594 - DNA, 35 bp, Artificial Sequence
  Synthetic oligonucleotide
gcagaaaattagatgtgcggccattcagacgtatt

SEQ ID NO: 13595 - DNA, 35 bp, Artificial Sequence
  Synthetic oligonucleotide
gcaggagtgaaggcgtttgtgagtagatctcatgt

SEQ ID NO: 13596 - DNA, 38 bp, Artificial Sequence
  Synthetic oligonucleotide
gcgaaagcacttctcatgctgaaagtttaagctaatga

SEQ ID NO: 13597 - DNA, 36 bp, Artificial Sequence
  Synthetic oligonucleotide
gcgcggagcttcggggactattcagtgtccggacta

SEQ ID NO: 13598 - DNA, 38 bp, Artificial Sequence
  Synthetic oligonucleotide
gcggtgtattgctgtcagtccgctagatggtgaattga

SEQ ID NO: 13599 - DNA, 35 bp, Artificial Sequence
  Synthetic oligonucleotide
gcgttaacagtctagatgggtattggtatggtctg

SEQ ID NO: 13600 - DNA, 37 bp, Artificial Sequence
  Synthetic oligonucleotide
gctctagcgttcaacgcggagggggtcgtactgagga

SEQ ID NO: 13601 - DNA, 37 bp, Artificial Sequence
  Synthetic oligonucleotide
gctggctccccccgtgtgaggcattaaccgcgtctga

SEQ ID NO: 13602 - DNA, 38 bp, Artificial Sequence
  Synthetic oligonucleotide
gctgtgcatgaatatagtagtagaacgctttgggctga

SEQ ID NO: 13603 - DNA, 35 bp, Artificial Sequence
  Synthetic oligonucleotide
ggacccgatgtccttagatagggagtcacagtagc

SEQ ID NO: 13604 - DNA, 38 bp, Artificial Sequence
  Synthetic oligonucleotide
ggatacgatcaattttaatgtctttaggagcacactga

SEQ ID NO: 13605 - DNA, 36 bp, Artificial Sequence
  Synthetic oligonucleotide
gtacgatctagtagtacagtgatcattacggggtga

SEQ ID NO: 13606 - DNA, 35 bp, Artificial Sequence
  Synthetic oligonucleotide
gtatcgactctacatgcccgtgtttagtactccga

SEQ ID NO: 13607 - DNA, 34 bp, Artificial Sequence
  Synthetic oligonucleotide
gtcaaggagccgtattactgttcgagaacgtctt

SEQ ID NO: 13608 - DNA, 35 bp, Artificial Sequence
  Synthetic oligonucleotide
gtctgcagagctgatcggctccatgtttaactccg

SEQ ID NO: 13609 - DNA, 37 bp, Artificial Sequence
  Synthetic oligonucleotide
gtgagaccttcgtaaggggccatcagaagcaccgcga

SEQ ID NO: 13610 - DNA, 34 bp, Artificial Sequence
  Synthetic oligonucleotide
gttacagttggtcagatcaaggaacctcgtttag

SEQ ID NO: 13611 - DNA, 37 bp, Artificial Sequence
  Synthetic oligonucleotide
gttgttccatatagactatagtcgcatggcccgggga

SEQ ID NO: 13612 - DNA, 38 bp, Artificial Sequence
  Synthetic oligonucleotide
tactgaccggccggtgcctatacttgggacgttggtga

SEQ ID NO: 13613 - DNA, 38 bp, Artificial Sequence
  Synthetic oligonucleotide
taggtctaagtccataacgggctatcttggacctgtga

SEQ ID NO: 13614 - DNA, 36 bp, Artificial Sequence
  Synthetic oligonucleotide
tcacaacgcttgggctctgggtttatagtctgaaaa

SEQ ID NO: 13615 - DNA, 36 bp, Artificial Sequence
  Synthetic oligonucleotide
tcctgtcgaggtgaacgcacagcattgtactagaaa

SEQ ID NO: 13616 - DNA, 35 bp, Artificial Sequence
  Synthetic oligonucleotide
tctccgtgccgacaggtccaccaataggcgcaata

SEQ ID NO: 13617 - DNA, 37 bp, Artificial Sequence
  Synthetic oligonucleotide
tgaacgtgcgtctacgtactgattgttctgcgtgcga

SEQ ID NO: 13618 - DNA, 36 bp, Artificial Sequence
  Synthetic oligonucleotide
tgagctacaatatgcattgcactgtaagcactttga

SEQ ID NO: 13619 - DNA, 38 bp, Artificial Sequence
  Synthetic oligonucleotide
tgcatcgcgtagcgcgtgaaccgaggcaactcaattga

SEQ ID NO: 13620 - DNA, 35 bp, Artificial Sequence
  Synthetic oligonucleotide
ttcgctgcattcataggttggttttaaggtaacat

SEQ ID NO: 13621 - DNA, 37 bp, Artificial Sequence
  Synthetic oligonucleotide
tttgagaaaagggctgttgcctgcatacctacgccga

SEQ ID NO: 13622 - DNA, 38 bp, Artificial Sequence
  Synthetic oligonucleotide
gccaagtcagagtgaagcgacgtggggcaacgaactga

SEQ ID NO: 13623 - DNA, 35 bp, Artificial Sequence
  Synthetic oligonucleotide
gctccgggtaatggccggggccgtgacaaagagta

SEQ ID NO: 13624 - DNA, 36 bp, Artificial Sequence
  Synthetic oligonucleotide
aagggggggaacaatgaagccgaagaaaagaaacta

SEQ ID NO: 13625 - DNA, 37 bp, Artificial Sequence
  Synthetic oligonucleotide
agccactgcatcccggttcggcgtcctagaccttaga

SEQ ID NO: 13626 - DNA, 38 bp, Artificial Sequence
  Synthetic oligonucleotide
gcacctcccgaccacacgcttaccctagttcttgctga

SEQ ID NO: 13627 - DNA, 35 bp, Artificial Sequence
  Synthetic oligonucleotide
gtactttagctggtaattacgagtggcaacatccc

SEQ ID NO: 13628 - DNA, 37 bp, Artificial Sequence
  Synthetic oligonucleotide
tcgggacgctggactattaagtggaggttttgaacga

SEQ ID NO: 13629 - DNA, 36 bp, Artificial Sequence
  Synthetic oligonucleotide
aatgaacgtacccgactaagacagctaggaatctta

SEQ ID NO: 13630 - DNA, 36 bp, Artificial Sequence
  Synthetic oligonucleotide
gttacagttcggtagtcagtcgcaaggtatgaccaa

SEQ ID NO: 13631 - DNA, 38 bp, Artificial Sequence
  Synthetic oligonucleotide
aaataggtcatatactctgtcctgcagaacgggaatga

SEQ ID NO: 13632 - DNA, 35 bp, Artificial Sequence
  Synthetic oligonucleotide
aacgatcagccgtcgttttatatattttggctggg

SEQ ID NO: 13633 - DNA, 36 bp, Artificial Sequence
  Synthetic oligonucleotide
aagaggcgggatgtacgcatgccaggcctcactgaa

SEQ ID NO: 13634 - DNA, 35 bp, Artificial Sequence
  Synthetic oligonucleotide
aagcctggtgactcttcgtatgtaggtggacaaag

SEQ ID NO: 13635 - DNA, 37 bp, Artificial Sequence
  Synthetic oligonucleotide
aaggtcatggcgcgacctgctaacttattgctggcga

SEQ ID NO: 13636 - DNA, 37 bp, Artificial Sequence
  Synthetic oligonucleotide
aattatagggccgaggggtggtcgtaaaaggttctga

SEQ ID NO: 13637 - DNA, 35 bp, Artificial Sequence
  Synthetic oligonucleotide
aattcccacgtaccatcccatcttgcgtgatgagg

SEQ ID NO: 13638 - DNA, 36 bp, Artificial Sequence
  Synthetic oligonucleotide
acaacgtgggagcacgattcaggggatggtggtaca

SEQ ID NO: 13639 - DNA, 35 bp, Artificial Sequence
  Synthetic oligonucleotide
acaattctacccgggcacggaaaccaggctgacac

SEQ ID NO: 13640 - DNA, 37 bp, Artificial Sequence
  Synthetic oligonucleotide
actcgagcagacatctcaaggcaaattcttacttgga

SEQ ID NO: 13641 - DNA, 36 bp, Artificial Sequence
  Synthetic oligonucleotide
actggggaactacacccacggaggttgttagcatga

SEQ ID NO: 13642 - DNA, 38 bp, Artificial Sequence
  Synthetic oligonucleotide
agaagtaactgctgattcttaagctgtggcgcccatga

SEQ ID NO: 13643 - DNA, 37 bp, Artificial Sequence
  Synthetic oligonucleotide
agcataggacgggtacctgggggcctggtctaaggga

SEQ ID NO: 13644 - DNA, 36 bp, Artificial Sequence
  Synthetic oligonucleotide
agcatgtcctcttaggtgccaacatgggtggacgta

SEQ ID NO: 13645 - DNA, 35 bp, Artificial Sequence
  Synthetic oligonucleotide
agggggtacgcctacggtagagcacatgctatccc

SEQ ID NO: 13646 - DNA, 37 bp, Artificial Sequence
  Synthetic oligonucleotide
aggttcgcgagtagggaaagcaggaccaaactgttga

SEQ ID NO: 13647 - DNA, 38 bp, Artificial Sequence
  Synthetic oligonucleotide
agtcatgggggtagtgtatgtagatgggagaggtttga

SEQ ID NO: 13648 - DNA, 37 bp, Artificial Sequence
  Synthetic oligonucleotide
atagcagaacacgaggcaatatttccgatgacaggga

SEQ ID NO: 13649 - DNA, 36 bp, Artificial Sequence
  Synthetic oligonucleotide
atcaatctgacaggtcctttggcgttggcgaggtga

SEQ ID NO: 13650 - DNA, 35 bp, Artificial Sequence
  Synthetic oligonucleotide
caggaggacttctgcagttctgggtgtgacgctat

SEQ ID NO: 13651 - DNA, 37 bp, Artificial Sequence
  Synthetic oligonucleotide
cataccacgggatacgatcctagaacgtggtggacga

SEQ ID NO: 13652 - DNA, 35 bp, Artificial Sequence
  Synthetic oligonucleotide
ccgattgggcgttcgattgcattgtctcctagtgc

SEQ ID NO: 13653 - DNA, 36 bp, Artificial Sequence
  Synthetic oligonucleotide
cgattcggatccatgtccaagggaattgtactgcca

SEQ ID NO: 13654 - DNA, 36 bp, Artificial Sequence
  Synthetic oligonucleotide
cgcacgccccgctgtcttggtaggttaagaatttta

SEQ ID NO: 13655 - DNA, 35 bp, Artificial Sequence
  Synthetic oligonucleotide
gaacgttaacatgatcataatactggccgacgaat

SEQ ID NO: 13656 - DNA, 38 bp, Artificial Sequence
  Synthetic oligonucleotide
gaatgcattcctggggtcttaggtcaaaactgtagtga

SEQ ID NO: 13657 - DNA, 37 bp, Artificial Sequence
  Synthetic oligonucleotide
gaccacttgagaggaaccaaaggtgcatatcacggga

SEQ ID NO: 13658 - DNA, 38 bp, Artificial Sequence
  Synthetic oligonucleotide
gattaaccggagcagagtccctagcggaccgattgtga

SEQ ID NO: 13659 - DNA, 36 bp, Artificial Sequence
  Synthetic oligonucleotide
gcaactgcaagtactggcgacattcgtgaggagata

SEQ ID NO: 13660 - DNA, 37 bp, Artificial Sequence
  Synthetic oligonucleotide
gcaggcaaggggacggaaaaatatggcaacgaatcga

SEQ ID NO: 13661 - DNA, 36 bp, Artificial Sequence
  Synthetic oligonucleotide
gcccgtacatccgtcaatgggttcaggccttcgata

SEQ ID NO: 13662 - DNA, 36 bp, Artificial Sequence
  Synthetic oligonucleotide
gccgccacggatacatgactgctggattacgtctta

SEQ ID NO: 13663 - DNA, 35 bp, Artificial Sequence
  Synthetic oligonucleotide
gccgggcatggatatacacgtacatgactttaggg

SEQ ID NO: 13664 - DNA, 37 bp, Artificial Sequence
  Synthetic oligonucleotide
gcgcaagtccaacaaattaggctcacatgcgctcgga

SEQ ID NO: 13665 - DNA, 37 bp, Artificial Sequence
  Synthetic oligonucleotide
gcgctaactgtgtccattctacgtgctcaatgtttga

SEQ ID NO: 13666 - DNA, 37 bp, Artificial Sequence
  Synthetic oligonucleotide
gcgtgtaatgcgcaggaaatggtgtcaattcatatga

SEQ ID NO: 13667 - DNA, 37 bp, Artificial Sequence
  Synthetic oligonucleotide
gctgatccggcgattaggggcgggttactatcctgga

SEQ ID NO: 13668 - DNA, 35 bp, Artificial Sequence
  Synthetic oligonucleotide
gctgcaatgctccctagagcttctggcttaagtgg

SEQ ID NO: 13669 - DNA, 38 bp, Artificial Sequence
  Synthetic oligonucleotide
ggaaactgagtgaccggcggggagagtcagggcactga

SEQ ID NO: 13670 - DNA, 38 bp, Artificial Sequence
  Synthetic oligonucleotide
ggcctcccgattcaaagatacaaggatcggtggtatga

SEQ ID NO: 13671 - DNA, 37 bp, Artificial Sequence
  Synthetic oligonucleotide
ggcttcgttggattgacgtatgtcataagtatcccga

SEQ ID NO: 13672 - DNA, 36 bp, Artificial Sequence
  Synthetic oligonucleotide
gggggagttatgtccgaggtaggttttcaacattaa

SEQ ID NO: 13673 - DNA, 36 bp, Artificial Sequence
  Synthetic oligonucleotide
ggggtccacgtatccgcgatatcaacggtttgtgca

SEQ ID NO: 13674 - DNA, 37 bp, Artificial Sequence
  Synthetic oligonucleotide
gtaacgatgctagctaaaaagcggtaagtgcgatgga

SEQ ID NO: 13675 - DNA, 38 bp, Artificial Sequence
  Synthetic oligonucleotide
gtacacaccgtgaaaataaagagccttgagtgaggtga

SEQ ID NO: 13676 - DNA, 37 bp, Artificial Sequence
  Synthetic oligonucleotide
gtacattaaccagcctaagtgtagttccctcatcgga

SEQ ID NO: 13677 - DNA, 38 bp, Artificial Sequence
  Synthetic oligonucleotide
gtacgggtactgcgcgtagctcccacatgtgcctatga

SEQ ID NO: 13678 - DNA, 38 bp, Artificial Sequence
  Synthetic oligonucleotide
gtcccggaatcctaaatctgaaattacgacggtactga

SEQ ID NO: 13679 - DNA, 35 bp, Artificial Sequence
  Synthetic oligonucleotide
gtctgtttatctaatactccgcgaacttagagggg

SEQ ID NO: 13680 - DNA, 35 bp, Artificial Sequence
  Synthetic oligonucleotide
gtgactttaggctaagcgttctcgaacccaacaac

SEQ ID NO: 13681 - DNA, 37 bp, Artificial Sequence
  Synthetic oligonucleotide
gtgtaacgtgatactcgtgtcacaccctcctgaggga

SEQ ID NO: 13682 - DNA, 38 bp, Artificial Sequence
  Synthetic oligonucleotide
gtgtagccttcctagcggcatacacaggtatgacctga

SEQ ID NO: 13683 - DNA, 38 bp, Artificial Sequence
  Synthetic oligonucleotide
gtgtataaccatctacccccctatggtgtcctatatga

SEQ ID NO: 13684 - DNA, 36 bp, Artificial Sequence
  Synthetic oligonucleotide
taccccgcatcggggctatgagactcctaactccaa

SEQ ID NO: 13685 - DNA, 35 bp, Artificial Sequence
  Synthetic oligonucleotide
tagacaaacgacggacgggcgggacctccatgaag

SEQ ID NO: 13686 - DNA, 38 bp, Artificial Sequence
  Synthetic oligonucleotide
tagtccatgccgtatctggattgctatgtggtaggtga

SEQ ID NO: 13687 - DNA, 35 bp, Artificial Sequence
  Synthetic oligonucleotide
tagttgcatgggcccctataacttacggaacttga

SEQ ID NO: 13688 - DNA, 36 bp, Artificial Sequence
  Synthetic oligonucleotide
tcacacgctatagtgagttgcagtataagatcctta

SEQ ID NO: 13689 - DNA, 35 bp, Artificial Sequence
  Synthetic oligonucleotide
tcaccaagggtgagcaacttagaccgcgtccatca

SEQ ID NO: 13690 - DNA, 36 bp, Artificial Sequence
  Synthetic oligonucleotide
tcatgcgctgctacgtccatggctagtccggatgga

SEQ ID NO: 13691 - DNA, 37 bp, Artificial Sequence
  Synthetic oligonucleotide
tccgagtacatggggtgagctatgtggtccgtcgtga

SEQ ID NO: 13692 - DNA, 36 bp, Artificial Sequence
  Synthetic oligonucleotide
tgacgttgaaatagcggcgcaaatgctcggcaacaa

SEQ ID NO: 13693 - DNA, 38 bp, Artificial Sequence
  Synthetic oligonucleotide
tgactgaatttggctataggctattctcgtcaatatga

SEQ ID NO: 13694 - DNA, 38 bp, Artificial Sequence
  Synthetic oligonucleotide
tggaatttctgatcagacgtcccaaaagtgttgtttga

SEQ ID NO: 13695 - DNA, 38 bp, Artificial Sequence
  Synthetic oligonucleotide
tggttttcacaagactgctcgtagccatgtctgtatga

SEQ ID NO: 13696 - DNA, 38 bp, Artificial Sequence
  Synthetic oligonucleotide
tgtccttcgagttgtcaaactgaaaggacctaagttga

SEQ ID NO: 13697 - DNA, 38 bp, Artificial Sequence
  Synthetic oligonucleotide
tgttaacgttcaaggctggttggagatcaggacgatga

SEQ ID NO: 13698 - DNA, 38 bp, Artificial Sequence
  Synthetic oligonucleotide
ttaagacgcgtggagtgcgaactctagaaaacaggtga

SEQ ID NO: 13699 - DNA, 35 bp, Artificial Sequence
  Synthetic oligonucleotide
ttcccataacaatgctgtgatgaaagtaaattacg

SEQ ID NO: 13700 - DNA, 37 bp, Artificial Sequence
  Synthetic oligonucleotide
ttgagcctcacggggactccacatgggggtgaggaga

SEQ ID NO: 13701 - DNA, 36 bp, Artificial Sequence
  Synthetic oligonucleotide
ttgatttttcgggtgttccctatgggtggtacgtta

SEQ ID NO: 13702 - DNA, 35 bp, Artificial Sequence
  Synthetic oligonucleotide
ttggttgggtagagcctactaagacgtatacaaga

SEQ ID NO: 13703 - DNA, 38 bp, Artificial Sequence
  Synthetic oligonucleotide
atcgacttccgtaatgtagtatatatgtaggttaatga

SEQ ID NO: 13704 - DNA, 38 bp, Artificial Sequence
  Synthetic oligonucleotide
gaccggttcgtgaaggagggattacccaataggtctga

SEQ ID NO: 13705 - DNA, 35 bp, Artificial Sequence
  Synthetic oligonucleotide
aactgcctgcaaaatatgaagtagctggtgtaata

SEQ ID NO: 13706 - DNA, 36 bp, Artificial Sequence
  Synthetic oligonucleotide
ccctcccgcgtcaattaacttcgaggcttcgcgata

SEQ ID NO: 13707 - DNA, 35 bp, Artificial Sequence
  Synthetic oligonucleotide
gacaattacaccaagttggtggccgctgctggggg

SEQ ID NO: 13708 - DNA, 38 bp, Artificial Sequence
  Synthetic oligonucleotide
gcatgcgggagacctctaatcttttcacaggactatga

SEQ ID NO: 13709 - DNA, 37 bp, Artificial Sequence
  Synthetic oligonucleotide
gtatcggaccgttaaggtcacaccttgttttaagtga

SEQ ID NO: 13710 - DNA, 37 bp, Artificial Sequence
  Synthetic oligonucleotide
gtgtcgtaggggagggagtggtggttgtatattgcga

SEQ ID NO: 13711 - DNA, 36 bp, Artificial Sequence
  Synthetic oligonucleotide
tacgcagtcagtggcgtaccatgtagtatcgtaata

SEQ ID NO: 13712 - DNA, 36 bp, Artificial Sequence
  Synthetic oligonucleotide
tatccatgagtgggacgaatgtacccagcatagcga

SEQ ID NO: 13713 - DNA, 38 bp, Artificial Sequence
  Synthetic oligonucleotide
tgacaccgagttttacccgcgtgtagttcaaacaatga

SEQ ID NO: 13714 - DNA, 37 bp, Artificial Sequence
  Synthetic oligonucleotide
ttaacctagctggtaaggcccacggtcgacccggtga

SEQ ID NO: 13715 - DNA, 35 bp, Artificial Sequence
  Synthetic oligonucleotide
ttgtaacagccttgtagcggtttgctagaatagta

SEQ ID NO: 13716 - DNA, 36 bp, Artificial Sequence
  Synthetic oligonucleotide
ttgtggtaggggtacgaaggcgaacgattaggccta

SEQ ID NO: 13717 - DNA, 37 bp, Artificial Sequence
  Synthetic oligonucleotide
cccacgagataaggcgggatctgcagtggttaactga

SEQ ID NO: 13718 - DNA, 35 bp, Artificial Sequence
  Synthetic oligonucleotide
gtggggaggcaagggaacaacggttgaatcgaggt

SEQ ID NO: 13719 - DNA, 37 bp, Artificial Sequence
  Synthetic oligonucleotide
acgcagtagtagatagttatcgatatttctagttaga

SEQ ID NO: 13720 - DNA, 36 bp, Artificial Sequence
  Synthetic oligonucleotide
cgctttcgtgcactccggtcccttcttcatactgta

SEQ ID NO: 13721 - DNA, 38 bp, Artificial Sequence
  Synthetic oligonucleotide
aacaatggtctctagcaccattagcggagcgaacctga

SEQ ID NO: 13722 - DNA, 38 bp, Artificial Sequence
  Synthetic oligonucleotide
aacaccgccactttagtgttaaccaggttgtgacttga

SEQ ID NO: 13723 - DNA, 35 bp, Artificial Sequence
  Synthetic oligonucleotide
acattcgcagcccaattagcgatcacgcctcattt

SEQ ID NO: 13724 - DNA, 35 bp, Artificial Sequence
  Synthetic oligonucleotide
agcacttagtgctttccgaaccgaatggacaggga

SEQ ID NO: 13725 - DNA, 36 bp, Artificial Sequence
  Synthetic oligonucleotide
agtatacacgcacgtgcgatcgccatgaacctcgga

SEQ ID NO: 13726 - DNA, 36 bp, Artificial Sequence
  Synthetic oligonucleotide
gacttccgcaccgtacacgtattgtgtctttgtgta

SEQ ID NO: 13727 - DNA, 35 bp, Artificial Sequence
  Synthetic oligonucleotide
gctcagatcaacaggactcctcatttagacaaggg

SEQ ID NO: 13728 - DNA, 35 bp, Artificial Sequence
  Synthetic oligonucleotide
gctgggtgtgccgtggactccgtcctgcaccctac

SEQ ID NO: 13729 - DNA, 37 bp, Artificial Sequence
  Synthetic oligonucleotide
gctgtggcatacactgctcccatagtttcttaggtga

SEQ ID NO: 13730 - DNA, 35 bp, Artificial Sequence
  Synthetic oligonucleotide
ggttgggatcataagggtcgtacttcctctcacac

SEQ ID NO: 13731 - DNA, 37 bp, Artificial Sequence
  Synthetic oligonucleotide
taagtgagctcaggcctactcaaatgttgtcgataga

SEQ ID NO: 13732 - DNA, 36 bp, Artificial Sequence
  Synthetic oligonucleotide
tagttggagtcttgaatcattcccgtaagtacggta

SEQ ID NO: 13733 - DNA, 38 bp, Artificial Sequence
  Synthetic oligonucleotide
tgtcccagcgtacactgtatgatgggcgccgagggtga

SEQ ID NO: 13734 - DNA, 37 bp, Artificial Sequence
  Synthetic oligonucleotide
gctatctagttagtaccgatcaatatagccccaggga

SEQ ID NO: 13735 - DNA, 35 bp, Artificial Sequence
  Synthetic oligonucleotide
tgtcatgcagacgaccctgtgttcggactggtcac

SEQ ID NO: 13736 - DNA, 38 bp, Artificial Sequence
  Synthetic oligonucleotide
tgttccgcaggtttagatttacaatgtcaactaattga

SEQ ID NO: 13737 - DNA, 36 bp, Artificial Sequence
  Synthetic oligonucleotide
agacgcatgatcgggtcatgacggggctatggtaaa

SEQ ID NO: 13738 - DNA, 35 bp, Artificial Sequence
  Synthetic oligonucleotide
ggaagtactgcggtctaagcgaatgatacgtgggt

SEQ ID NO: 13739 - DNA, 37 bp, Artificial Sequence
  Synthetic oligonucleotide
aagcatcacaaatgagactgacgtgtcaaaggagaga

SEQ ID NO: 13740 - DNA, 35 bp, Artificial Sequence
  Synthetic oligonucleotide
aagctgctattttcatggaattcaagataagtgcg

SEQ ID NO: 13741 - DNA, 37 bp, Artificial Sequence
  Synthetic oligonucleotide
agaaacgcaggcgagtgattactgaggtgacattcga

SEQ ID NO: 13742 - DNA, 38 bp, Artificial Sequence
  Synthetic oligonucleotide
agttaaaatcagatttaatgcgcccctagcgcagatga

SEQ ID NO: 13743 - DNA, 35 bp, Artificial Sequence
  Synthetic oligonucleotide
atacgactacacgctgggactttgggactccaagg

SEQ ID NO: 13744 - DNA, 37 bp, Artificial Sequence
  Synthetic oligonucleotide
atagcgaccgtggctctggtactatacaggagaggga

SEQ ID NO: 13745 - DNA, 35 bp, Artificial Sequence
  Synthetic oligonucleotide
ccacttgagcttgtgagttcgcttctgtgaatgtc

SEQ ID NO: 13746 - DNA, 36 bp, Artificial Sequence
  Synthetic oligonucleotide
ctccacacgcgcgcggtcatctagggacgtagtaga

SEQ ID NO: 13747 - DNA, 37 bp, Artificial Sequence
  Synthetic oligonucleotide
gactggtaatgggcgtatctttagacctgaagtggga

SEQ ID NO: 13748 - DNA, 37 bp, Artificial Sequence
  Synthetic oligonucleotide
gagcatagtcgaccacgtacagtccgcttatggttga

SEQ ID NO: 13749 - DNA, 37 bp, Artificial Sequence
  Synthetic oligonucleotide
gaggagtcagccggggaggtagatcgaacggtgtgga

SEQ ID NO: 13750 - DNA, 38 bp, Artificial Sequence
  Synthetic oligonucleotide
gcgtcatgtaataatagaacgctaatcgtgttcaatga

SEQ ID NO: 13751 - DNA, 37 bp, Artificial Sequence
  Synthetic oligonucleotide
ggtgggtgtcggagacatagtgtcatagggccattga

SEQ ID NO: 13752 - DNA, 37 bp, Artificial Sequence
  Synthetic oligonucleotide
gtaacaattacgtgctggaccaatagtccatgtctga

SEQ ID NO: 13753 - DNA, 38 bp, Artificial Sequence
  Synthetic oligonucleotide
gtagtcagctgaagcatggtagacacctgcaatactga

SEQ ID NO: 13754 - DNA, 36 bp, Artificial Sequence
  Synthetic oligonucleotide
gtattgtcattcggcgctagccactcttgatcctga

SEQ ID NO: 13755 - DNA, 38 bp, Artificial Sequence
  Synthetic oligonucleotide
gtcaatgtagacgcgcctgagaaagggattcgttatga

SEQ ID NO: 13756 - DNA, 36 bp, Artificial Sequence
  Synthetic oligonucleotide
gtgcaccgctaaggaactttgacttggaatcttgga

SEQ ID NO: 13757 - DNA, 38 bp, Artificial Sequence
  Synthetic oligonucleotide
gttgggataaccagatgaaggtgtttctttggtcctga

SEQ ID NO: 13758 - DNA, 35 bp, Artificial Sequence
  Synthetic oligonucleotide
gttgtgcggcttgtcgagttttttcttcagaggcc

SEQ ID NO: 13759 - DNA, 35 bp, Artificial Sequence
  Synthetic oligonucleotide
tcatccatccattgtgcagttataaggtgaaggta

SEQ ID NO: 13760 - DNA, 37 bp, Artificial Sequence
  Synthetic oligonucleotide
tccacgtgtggtttggaatgtggtttcctcgactaga

SEQ ID NO: 13761 - DNA, 35 bp, Artificial Sequence
  Synthetic oligonucleotide
tgtgagcagtctagtaaatagctggaagcttattg

SEQ ID NO: 13762 - DNA, 38 bp, Artificial Sequence
  Synthetic oligonucleotide
ttgacgaaccctgcgtcatcgatcgtcattaggtgtga

SEQ ID NO: 13763 - DNA, 37 bp, Artificial Sequence
  Synthetic oligonucleotide
gagatagcatacatatcaagtagcacgggacgctaga

SEQ ID NO: 13764 - DNA, 35 bp, Artificial Sequence
  Synthetic oligonucleotide
gcacggcggtcatacgtgcaccaacttgtcaacag

SEQ ID NO: 13765 - DNA, 37 bp, Artificial Sequence
  Synthetic oligonucleotide
gccatatgactggaagtggggtatgttcttcgattga

SEQ ID NO: 13766 - DNA, 35 bp, Artificial Sequence
  Synthetic oligonucleotide
agctcaacctctgaatcagccctagtcgctatccg

SEQ ID NO: 13767 - DNA, 38 bp, Artificial Sequence
  Synthetic oligonucleotide
gagctgacccggaatataaggtttaagagtgcccttga

SEQ ID NO: 13768 - DNA, 34 bp, Artificial Sequence
  Synthetic oligonucleotide
gtagctcagaagaccggagctatggctaagactg

SEQ ID NO: 13769 - DNA, 38 bp, Artificial Sequence
  Synthetic oligonucleotide
aacgtaaacaggcgaagcttaaggcgtctaaccggtga

SEQ ID NO: 13770 - DNA, 35 bp, Artificial Sequence
  Synthetic oligonucleotide
gagaacgaagtggttatatatggttggaggtcagc

SEQ ID NO: 13771 - DNA, 36 bp, Artificial Sequence
  Synthetic oligonucleotide
aaatggctaaggtcatgtttgaaagcttaggaagaa

SEQ ID NO: 13772 - DNA, 37 bp, Artificial Sequence
  Synthetic oligonucleotide
aacgctacaccgacctggcaggtgggccaagccaaga

SEQ ID NO: 13773 - DNA, 35 bp, Artificial Sequence
  Synthetic oligonucleotide
aagcacgtgtagcctctgctatgttagctgtagtc

SEQ ID NO: 13774 - DNA, 38 bp, Artificial Sequence
  Synthetic oligonucleotide
acaagatggcaattacgtcaatactacggacgacgtga

SEQ ID NO: 13775 - DNA, 38 bp, Artificial Sequence
  Synthetic oligonucleotide
acggaggcatcagcatggatgcggaatgtagggcatga

SEQ ID NO: 13776 - DNA, 36 bp, Artificial Sequence
  Synthetic oligonucleotide
actaacgaacagggccaagtccaggtttaagacaga

SEQ ID NO: 13777 - DNA, 36 bp, Artificial Sequence
  Synthetic oligonucleotide
atcagggggcaggccgcgaagcttagatactgacga

SEQ ID NO: 13778 - DNA, 33 bp, Artificial Sequence
  Synthetic oligonucleotide
attgtcccgagcattcctgaaggttcaacctga

SEQ ID NO: 13779 - DNA, 35 bp, Artificial Sequence
  Synthetic oligonucleotide
cccgaagttgcttatacgttgtacggagacgaaag

SEQ ID NO: 13780 - DNA, 37 bp, Artificial Sequence
  Synthetic oligonucleotide
ccgggctaattatgtccggggacgtacggggttatga

SEQ ID NO: 13781 - DNA, 38 bp, Artificial Sequence
  Synthetic oligonucleotide
cctcatacagaggtggtctatatatggggccaacttga

SEQ ID NO: 13782 - DNA, 36 bp, Artificial Sequence
  Synthetic oligonucleotide
cgaacgactacggtgagttctcaagacgaactggta

SEQ ID NO: 13783 - DNA, 38 bp, Artificial Sequence
  Synthetic oligonucleotide
gccagaaggttaagcagattgtttgggaagggatttga

SEQ ID NO: 13784 - DNA, 35 bp, Artificial Sequence
  Synthetic oligonucleotide
gcgactaaaatctgagcaatgttttaggtcatcca

SEQ ID NO: 13785 - DNA, 37 bp, Artificial Sequence
  Synthetic oligonucleotide
gcgcgctgtttatactggtccaataaactatgatcga

SEQ ID NO: 13786 - DNA, 36 bp, Artificial Sequence
  Synthetic oligonucleotide
gctcggacgagataagtgcactctttagtattgaga

SEQ ID NO: 13787 - DNA, 36 bp, Artificial Sequence
  Synthetic oligonucleotide
gggggctgccaagtgtttaaaatacctttacacgta

SEQ ID NO: 13788 - DNA, 35 bp, Artificial Sequence
  Synthetic oligonucleotide
ggttggaccgcagtcgactatcgaccccccaggta

SEQ ID NO: 13789 - DNA, 36 bp, Artificial Sequence
  Synthetic oligonucleotide
gtatgcagaaatcacggtagtagtactttgagggta

SEQ ID NO: 13790 - DNA, 38 bp, Artificial Sequence
  Synthetic oligonucleotide
gtcggggtcaacgccttatgaaagttcacaggctatga

SEQ ID NO: 13791 - DNA, 36 bp, Artificial Sequence
  Synthetic oligonucleotide
gtcggtggtatctatcctatgtgtgttgtgctccta

SEQ ID NO: 13792 - DNA, 35 bp, Artificial Sequence
  Synthetic oligonucleotide
gtgaggttgtacttcgcatgaattagtattgaagg

SEQ ID NO: 13793 - DNA, 37 bp, Artificial Sequence
  Synthetic oligonucleotide
tacgaagaaagggaggcaggcttgattcatagaggga

SEQ ID NO: 13794 - DNA, 38 bp, Artificial Sequence
  Synthetic oligonucleotide
tacgggggtgactgtagttgcgcgatcaagcttattga

SEQ ID NO: 13795 - DNA, 36 bp, Artificial Sequence
  Synthetic oligonucleotide
tacttgtagctctgctccggttatacaagttaggaa

SEQ ID NO: 13796 - DNA, 38 bp, Artificial Sequence
  Synthetic oligonucleotide
tcacggactcatccatctgagaaactattgtaacttga

SEQ ID NO: 13797 - DNA, 35 bp, Artificial Sequence
  Synthetic oligonucleotide
tccgcggaatcggtggggacgttacctggctgtcc

SEQ ID NO: 13798 - DNA, 35 bp, Artificial Sequence
  Synthetic oligonucleotide
tcgttccaataggacaggttgcatatttcgaacgg

SEQ ID NO: 13799 - DNA, 36 bp, Artificial Sequence
  Synthetic oligonucleotide
ttatgcgatagtcagaaagagctatcgaggttagta

SEQ ID NO: 13800 - DNA, 36 bp, Artificial Sequence
  Synthetic oligonucleotide
ttctagctcgcggtcttctataccagacatggctta

SEQ ID NO: 13801 - DNA, 35 bp, Artificial Sequence
  Synthetic oligonucleotide
ttgattgtgctcaaggatgcagtaggattgccgga

SEQ ID NO: 13802 - DNA, 38 bp, Artificial Sequence
  Synthetic oligonucleotide
ttgcggctaggaaacggtgagggagttcagtcgcatga

SEQ ID NO: 13803 - DNA, 38 bp, Artificial Sequence
  Synthetic oligonucleotide
tttagcgccggtcagagcaacgacatagacagccctga

SEQ ID NO: 13804 - DNA, 36 bp, Artificial Sequence
  Synthetic oligonucleotide
gactagagggagcgttcttgactccatagcgagata

SEQ ID NO: 13805 - DNA, 36 bp, Artificial Sequence
  Synthetic oligonucleotide
gggtccgtagcaccacggcaccggtggtgcgcacta

SEQ ID NO: 13806 - DNA, 38 bp, Artificial Sequence
  Synthetic oligonucleotide
agtgcactgcagcgtggtactggacggggagagactga

SEQ ID NO: 13807 - DNA, 36 bp, Artificial Sequence
  Synthetic oligonucleotide
attcagtactaaccgggggtaatcagccgccgcgga

SEQ ID NO: 13808 - DNA, 36 bp, Artificial Sequence
  Synthetic oligonucleotide
ttactgtaactgcgtggtaagagataataagtggga

SEQ ID NO: 13809 - DNA, 36 bp, Artificial Sequence
  Synthetic oligonucleotide
tttcagaacattaaatgtcgtgcagtcacatggcta

SEQ ID NO: 13810 - DNA, 37 bp, Artificial Sequence
  Synthetic oligonucleotide
attaacagtggcaaattttatgacgtgaatcatggga

SEQ ID NO: 13811 - DNA, 38 bp, Artificial Sequence
  Synthetic oligonucleotide
gagtcatgggtcgacagttgacttagccgagggattga

SEQ ID NO: 13812 - DNA, 36 bp, Artificial Sequence
  Synthetic oligonucleotide
gaattgagtaccatcttgtggtgccatgcccttaaa

SEQ ID NO: 13813 - DNA, 35 bp, Artificial Sequence
  Synthetic oligonucleotide
gccctatatgctgatggagacaatttagccgccgc

SEQ ID NO: 13814 - DNA, 35 bp, Artificial Sequence
  Synthetic oligonucleotide
tctaactgcgtacgtagtaggggttcttttggcga

SEQ ID NO: 13815 - DNA, 35 bp, Artificial Sequence
  Synthetic oligonucleotide
aaacctacagcccctgtatggtaggggcgccatta

SEQ ID NO: 13816 - DNA, 38 bp, Artificial Sequence
  Synthetic oligonucleotide
aaacggtctgtcgcggtcgagaatggaccgtaaagtga

SEQ ID NO: 13817 - DNA, 36 bp, Artificial Sequence
  Synthetic oligonucleotide
aacaggcgtccgaaactatctttgggcgtcttgcga

SEQ ID NO: 13818 - DNA, 38 bp, Artificial Sequence
  Synthetic oligonucleotide
aacctggcccgctgcaacttggcctcagtcagtcatga

SEQ ID NO: 13819 - DNA, 38 bp, Artificial Sequence
  Synthetic oligonucleotide
aagcgtaaccctaacctcggagcccagccacagactga

SEQ ID NO: 13820 - DNA, 38 bp, Artificial Sequence
  Synthetic oligonucleotide
accccgcggaccgtagtttgagtctagcactgcgctga

SEQ ID NO: 13821 - DNA, 35 bp, Artificial Sequence
  Synthetic oligonucleotide
accgtattgtgctagtcgaacccgatgcgctatca

SEQ ID NO: 13822 - DNA, 35 bp, Artificial Sequence
  Synthetic oligonucleotide
acgtccaattcagttttatgcaactacggacgttg

SEQ ID NO: 13823 - DNA, 37 bp, Artificial Sequence
  Synthetic oligonucleotide
actggtcctgtaggtgcctctgtaacttatcctgcga

SEQ ID NO: 13824 - DNA, 35 bp, Artificial Sequence
  Synthetic oligonucleotide
agacaaaccatccggatgttttggggttttctcga

SEQ ID NO: 13825 - DNA, 35 bp, Artificial Sequence
  Synthetic oligonucleotide
agacaagtgatcctaggctccagggttggccccag

SEQ ID NO: 13826 - DNA, 36 bp, Artificial Sequence
  Synthetic oligonucleotide
aggtaccacgtggagagcgctggtacgtgactatta

SEQ ID NO: 13827 - DNA, 38 bp, Artificial Sequence
  Synthetic oligonucleotide
atcttcagaatcgtacttggggtcttgggaattattga

SEQ ID NO: 13828 - DNA, 36 bp, Artificial Sequence
  Synthetic oligonucleotide
atgagggccggggccgagttaacctgcgagtttgta

SEQ ID NO: 13829 - DNA, 35 bp, Artificial Sequence
  Synthetic oligonucleotide
ctctagtcaccccattcatgtgtcctcgggaagga

SEQ ID NO: 13830 - DNA, 35 bp, Artificial Sequence
  Synthetic oligonucleotide
ctgactcctcgtggtcataagctgagtgtagatgg

SEQ ID NO: 13831 - DNA, 36 bp, Artificial Sequence
  Synthetic oligonucleotide
gaatgaatcgaatggtggtgtttgcaaatatggcta

SEQ ID NO: 13832 - DNA, 38 bp, Artificial Sequence
  Synthetic oligonucleotide
gaattcaaatgaagacatcggatgtcaacacatcctga

SEQ ID NO: 13833 - DNA, 37 bp, Artificial Sequence
  Synthetic oligonucleotide
gacactccccctgcgtccttatttcatctcactgcga

SEQ ID NO: 13834 - DNA, 35 bp, Artificial Sequence
  Synthetic oligonucleotide
gacgtgaaggaattacagacacgtccctgtattat

SEQ ID NO: 13835 - DNA, 35 bp, Artificial Sequence
  Synthetic oligonucleotide
gatcagcagattgcgacgttgactggaggagcggc

SEQ ID NO: 13836 - DNA, 35 bp, Artificial Sequence
  Synthetic oligonucleotide
gatgttcatgggaaggatccaaggatcataaggtt

SEQ ID NO: 13837 - DNA, 38 bp, Artificial Sequence
  Synthetic oligonucleotide
gattaactcagttagctcaggggtaattacttggctga

SEQ ID NO: 13838 - DNA, 36 bp, Artificial Sequence
  Synthetic oligonucleotide
gattcctagccgtgcggttatgactgtctacgaata

SEQ ID NO: 13839 - DNA, 38 bp, Artificial Sequence
  Synthetic oligonucleotide
gcaaatatgcgactctcgagacggttgtgttggcatga

SEQ ID NO: 13840 - DNA, 37 bp, Artificial Sequence
  Synthetic oligonucleotide
gcaagtgcacctcctgttaccacagtcaatttggtga

SEQ ID NO: 13841 - DNA, 36 bp, Artificial Sequence
  Synthetic oligonucleotide
gcatttaccaaggtccatgggattcgtgaaagctaa

SEQ ID NO: 13842 - DNA, 37 bp, Artificial Sequence
  Synthetic oligonucleotide
gcatttcaacaacggtaatagaggcatttataggaga

SEQ ID NO: 13843 - DNA, 36 bp, Artificial Sequence
  Synthetic oligonucleotide
gcgcagtatcgcgcgatctgctatgtgcacacgcca

SEQ ID NO: 13844 - DNA, 36 bp, Artificial Sequence
  Synthetic oligonucleotide
gcggactaacaagacattgcgttgtaaatgtacgga

SEQ ID NO: 13845 - DNA, 35 bp, Artificial Sequence
  Synthetic oligonucleotide
gcgtgacgaccatcgatatcgtgacttaggtacat

SEQ ID NO: 13846 - DNA, 38 bp, Artificial Sequence
  Synthetic oligonucleotide
gcgtgatggagtagcacgtaagcaatgaaaacagatga

SEQ ID NO: 13847 - DNA, 36 bp, Artificial Sequence
  Synthetic oligonucleotide
gctcccgccaataggtcgtttacgtggcacggacat

SEQ ID NO: 13848 - DNA, 35 bp, Artificial Sequence
  Synthetic oligonucleotide
gcttgacatagtgggagcacggaggtcatggaagt

SEQ ID NO: 13849 - DNA, 38 bp, Artificial Sequence
  Synthetic oligonucleotide
ggacaaagttccacatgtatagtaggtcggtctattga

SEQ ID NO: 13850 - DNA, 37 bp, Artificial Sequence
  Synthetic oligonucleotide
ggagggtggggagtctcaattttggttcagccatcga

SEQ ID NO: 13851 - DNA, 38 bp, Artificial Sequence
  Synthetic oligonucleotide
ggcgttgaccgtcgcctcaactagcattataggactga

SEQ ID NO: 13852 - DNA, 35 bp, Artificial Sequence
  Synthetic oligonucleotide
ggctgttcagtatcattgtctggaagcactcaatg

SEQ ID NO: 13853 - DNA, 37 bp, Artificial Sequence
  Synthetic oligonucleotide
ggtaatccccgggctggcgacaattaatctgaaggga

SEQ ID NO: 13854 - DNA, 38 bp, Artificial Sequence
  Synthetic oligonucleotide
ggtgggtgttacacactaaggagtggaatcagtgctga

SEQ ID NO: 13855 - DNA, 36 bp, Artificial Sequence
  Synthetic oligonucleotide
ggttacggacggtcaaaggatggtaacgcgtactga

SEQ ID NO: 13856 - DNA, 37 bp, Artificial Sequence
  Synthetic oligonucleotide
gtacagactgggtcgatcagccgtatgtcgagggcga

SEQ ID NO: 13857 - DNA, 37 bp, Artificial Sequence
  Synthetic oligonucleotide
gtactaaagttgagaggttatggaccactccttccga

SEQ ID NO: 13858 - DNA, 35 bp, Artificial Sequence
  Synthetic oligonucleotide
gtctgggccaatcgccacgacatagtttcatgtga

SEQ ID NO: 13859 - DNA, 38 bp, Artificial Sequence
  Synthetic oligonucleotide
gtggtgaacctgcaggagctgaccaatatgcgcgttga

SEQ ID NO: 13860 - DNA, 38 bp, Artificial Sequence
  Synthetic oligonucleotide
gttgacgtatgatccgtggttttccgccccgctgttga

SEQ ID NO: 13861 - DNA, 36 bp, Artificial Sequence
  Synthetic oligonucleotide
gttgtttctgggacgattgtcgggttcacatcatta

SEQ ID NO: 13862 - DNA, 36 bp, Artificial Sequence
  Synthetic oligonucleotide
tacccggcctacctccttgagaaattatttccaata

SEQ ID NO: 13863 - DNA, 36 bp, Artificial Sequence
  Synthetic oligonucleotide
tagggtaatgtcgcgagattactgtggttagcttaa

SEQ ID NO: 13864 - DNA, 36 bp, Artificial Sequence
  Synthetic oligonucleotide
tcaatgtctccggttagaaacggtaagcaacgatga

SEQ ID NO: 13865 - DNA, 36 bp, Artificial Sequence
  Synthetic oligonucleotide
tccacgctaggaaactcttggaaaagggggtgctta

SEQ ID NO: 13866 - DNA, 36 bp, Artificial Sequence
  Synthetic oligonucleotide
tccatacggttgcattctgaatgtctcaacacgcga

SEQ ID NO: 13867 - DNA, 35 bp, Artificial Sequence
  Synthetic oligonucleotide
tccgacaacacgtcgtcatttatagcttttattat

SEQ ID NO: 13868 - DNA, 35 bp, Artificial Sequence
  Synthetic oligonucleotide
tcgaagtctgcaacgataggtaaaacgtactactc

SEQ ID NO: 13869 - DNA, 37 bp, Artificial Sequence
  Synthetic oligonucleotide
tcgacgcggataagaaggccccgcgcggataggacga

SEQ ID NO: 13870 - DNA, 37 bp, Artificial Sequence
  Synthetic oligonucleotide
tgacacatcctcatgatgtacactgttcagggcatga

SEQ ID NO: 13871 - DNA, 35 bp, Artificial Sequence
  Synthetic oligonucleotide
tgagtcattcgtttaaaacgggggtccgacaatat

SEQ ID NO: 13872 - DNA, 36 bp, Artificial Sequence
  Synthetic oligonucleotide
tgatgaactatcgccgctgacatgtgtgctcattga

SEQ ID NO: 13873 - DNA, 38 bp, Artificial Sequence
  Synthetic oligonucleotide
tgcccgcacaaagagcgcgtaagcacgcatgcgagtga

SEQ ID NO: 13874 - DNA, 37 bp, Artificial Sequence
  Synthetic oligonucleotide
tgttggcttgccaaaaagtgactaataatattgggga

SEQ ID NO: 13875 - DNA, 35 bp, Artificial Sequence
  Synthetic oligonucleotide
tgtttgctctcgaagagactactaaacctgcggga

SEQ ID NO: 13876 - DNA, 36 bp, Artificial Sequence
  Synthetic oligonucleotide
ttacgtctgggaggggaatttgttattattcgagga

SEQ ID NO: 13877 - DNA, 37 bp, Artificial Sequence
  Synthetic oligonucleotide
ttattgggtcggagttaagtatcagcgaccgggtcga

SEQ ID NO: 13878 - DNA, 37 bp, Artificial Sequence
  Synthetic oligonucleotide
ttgcatacgtgacaaccgaggtcttgtaggaatacga

SEQ ID NO: 13879 - DNA, 37 bp, Artificial Sequence
  Synthetic oligonucleotide
ttgcgccgctgcacaagttccagttggcgacttggga

SEQ ID NO: 13880 - DNA, 35 bp, Artificial Sequence
  Synthetic oligonucleotide
ttggtggtagcaaactaatctaaaaatcgtgcgtg

SEQ ID NO: 13881 - DNA, 35 bp, Artificial Sequence
  Synthetic oligonucleotide
ttgtgcggaaaaggtaatcgtgtattatgacccgg

SEQ ID NO: 13882 - DNA, 36 bp, Artificial Sequence
  Synthetic oligonucleotide
ttgttagcaagtaccggtgcttttaccagaagctga

SEQ ID NO: 13883 - DNA, 36 bp, Artificial Sequence
  Synthetic oligonucleotide
ttttttgcccaagcaaataccccttaaccgcagtca

SEQ ID NO: 13884 - DNA, 37 bp, Artificial Sequence
  Synthetic oligonucleotide
gctgctaatctgatccgatgttgcatggtcgacacga

SEQ ID NO: 13885 - DNA, 37 bp, Artificial Sequence
  Synthetic oligonucleotide
ggttaaatcgtcgaactatatatggccatgattggga

SEQ ID NO: 13886 - DNA, 36 bp, Artificial Sequence
  Synthetic oligonucleotide
tcatactgacagtccgaaggggaggtcagcagatta

SEQ ID NO: 13887 - DNA, 38 bp, Artificial Sequence
  Synthetic oligonucleotide
ttacccgtcatagtgtaggggtagaaatcgtcatctga

SEQ ID NO: 13888 - DNA, 36 bp, Artificial Sequence
  Synthetic oligonucleotide
ggacatgcaaacatcttggattggtgtacacgtgaa

SEQ ID NO: 13889 - DNA, 35 bp, Artificial Sequence
  Synthetic oligonucleotide
ggtcgcatggtgcgactcaccacgactgtaattct

SEQ ID NO: 13890 - DNA, 36 bp, Artificial Sequence
  Synthetic oligonucleotide
ttcacggaagcatagtcgtcattagccagggagcta

SEQ ID NO: 13891 - DNA, 36 bp, Artificial Sequence
  Synthetic oligonucleotide
aaccacacagtcgcttgttgcttaaatcgttgtgta

SEQ ID NO: 13892 - DNA, 37 bp, Artificial Sequence
  Synthetic oligonucleotide
aacggtcgtcctaaaaaacgtttggcaaggacaggga

SEQ ID NO: 13893 - DNA, 36 bp, Artificial Sequence
  Synthetic oligonucleotide
agcaccttaaggtggccgattcggaaaggatctaaa

SEQ ID NO: 13894 - DNA, 36 bp, Artificial Sequence
  Synthetic oligonucleotide
gagcggatacacctgtccgcggtcacttacgggata

SEQ ID NO: 13895 - DNA, 36 bp, Artificial Sequence
  Synthetic oligonucleotide
gatcgacttagttgatgtctcacgtatagaagggga

SEQ ID NO: 13896 - DNA, 33 bp, Artificial Sequence
  Synthetic oligonucleotide
gatcgatatgctgactcatctgagtcacgggga

SEQ ID NO: 13897 - DNA, 35 bp, Artificial Sequence
  Synthetic oligonucleotide
gcaacatagtgtcttcacatgtttgagtatatctg

SEQ ID NO: 13898 - DNA, 35 bp, Artificial Sequence
  Synthetic oligonucleotide
ggtaattcgcaactttacttcgtcgccccctaccg

SEQ ID NO: 13899 - DNA, 35 bp, Artificial Sequence
  Synthetic oligonucleotide
gtatgcctagccgtaagccgggaggccaatgcctg

SEQ ID NO: 13900 - DNA, 36 bp, Artificial Sequence
  Synthetic oligonucleotide
gttaaactggttcacacgtatgcactacgatatcaa

SEQ ID NO: 13901 - DNA, 35 bp, Artificial Sequence
  Synthetic oligonucleotide
gttgctctccaagcagtccgtgtgttagggtaggg

SEQ ID NO: 13902 - DNA, 35 bp, Artificial Sequence
  Synthetic oligonucleotide
tcccggggtatggggagtacggcctacacgttggt

SEQ ID NO: 13903 - DNA, 35 bp, Artificial Sequence
  Synthetic oligonucleotide
tcgcttgtaaggaactatttgggttggggtatgga

SEQ ID NO: 13904 - DNA, 35 bp, Artificial Sequence
  Synthetic oligonucleotide
tgaggctcaatgcaacgtatcgtgcttgacaacga

SEQ ID NO: 13905 - DNA, 35 bp, Artificial Sequence
  Synthetic oligonucleotide
tgtggtgtcgtgatctcgaccttataaccctatcg

SEQ ID NO: 13906 - DNA, 36 bp, Artificial Sequence
  Synthetic oligonucleotide
agccgggaccggctccgaccttggacgatctggtca

SEQ ID NO: 13907 - DNA, 36 bp, Artificial Sequence
  Synthetic oligonucleotide
atgatcacccaggtgtgctaattctggccaaaggta

SEQ ID NO: 13908 - DNA, 38 bp, Artificial Sequence
  Synthetic oligonucleotide
gttcgcacaaggggagacatggacgtctaaccacctga

SEQ ID NO: 13909 - DNA, 37 bp, Artificial Sequence
  Synthetic oligonucleotide
aaagggggaggggcgctaaccatgggttattaacaga

SEQ ID NO: 13910 - DNA, 36 bp, Artificial Sequence
  Synthetic oligonucleotide
aacgtatatatgtcgcgacgagacgataaacagaca

SEQ ID NO: 13911 - DNA, 35 bp, Artificial Sequence
  Synthetic oligonucleotide
aagatatgagggacttgcttaagaatcacctaagg

SEQ ID NO: 13912 - DNA, 35 bp, Artificial Sequence
  Synthetic oligonucleotide
aagtcattaaattcaagagcccgcgggtcttagtc

SEQ ID NO: 13913 - DNA, 35 bp, Artificial Sequence
  Synthetic oligonucleotide
aagtcgatgctaaggatatcgacgagggtgtaaca

SEQ ID NO: 13914 - DNA, 37 bp, Artificial Sequence
  Synthetic oligonucleotide
aagtgaggggaattccgtacactatcacttagctaga

SEQ ID NO: 13915 - DNA, 35 bp, Artificial Sequence
  Synthetic oligonucleotide
aatcccacaaaagatctggatcgctggcaaaacca

SEQ ID NO: 13916 - DNA, 35 bp, Artificial Sequence
  Synthetic oligonucleotide
aatgaagtgtcctgtagggcctggttaggaagttt

SEQ ID NO: 13917 - DNA, 36 bp, Artificial Sequence
  Synthetic oligonucleotide
acataagaggccttctagggtcattctgcatactta

SEQ ID NO: 13918 - DNA, 36 bp, Artificial Sequence
  Synthetic oligonucleotide
accatacgtactgtcctcaccagggaaaaatggaga

SEQ ID NO: 13919 - DNA, 35 bp, Artificial Sequence
  Synthetic oligonucleotide
acccacggtggtgtgaggcttggtaatttagcgta

SEQ ID NO: 13920 - DNA, 38 bp, Artificial Sequence
  Synthetic oligonucleotide
acgcgccgcactgtgtgtgctccttgactcatacgtga

SEQ ID NO: 13921 - DNA, 37 bp, Artificial Sequence
  Synthetic oligonucleotide
actaacggaactgcgccctgctcataataggtatgga

SEQ ID NO: 13922 - DNA, 35 bp, Artificial Sequence
  Synthetic oligonucleotide
actcccaattcaggtcgtactgagtgcggagaagt

SEQ ID NO: 13923 - DNA, 38 bp, Artificial Sequence
  Synthetic oligonucleotide
actctgcagtagggccaccaatgtatcatgtctactga

SEQ ID NO: 13924 - DNA, 35 bp, Artificial Sequence
  Synthetic oligonucleotide
actgctcaagacgtcccgctggggccggcacatat

SEQ ID NO: 13925 - DNA, 36 bp, Artificial Sequence
  Synthetic oligonucleotide
agaacgaagtgtcgcgccacatggctggtggtatga

SEQ ID NO: 13926 - DNA, 35 bp, Artificial Sequence
  Synthetic oligonucleotide
agagagacactcctgtgccgagagcgcgagttgga

SEQ ID NO: 13927 - DNA, 36 bp, Artificial Sequence
  Synthetic oligonucleotide
agcactccacgggggtgagtgaccgccccgatcaga

SEQ ID NO: 13928 - DNA, 35 bp, Artificial Sequence
  Synthetic oligonucleotide
aggaaagtcctttggaagaatgcctcctcctgtgt

SEQ ID NO: 13929 - DNA, 38 bp, Artificial Sequence
  Synthetic oligonucleotide
agtgcatgtaattttgggagagtcctgaagttttgtga

SEQ ID NO: 13930 - DNA, 35 bp, Artificial Sequence
  Synthetic oligonucleotide
agttgttttaaaccgccctagtacgatggcgctcc

SEQ ID NO: 13931 - DNA, 38 bp, Artificial Sequence
  Synthetic oligonucleotide
atactgcggatgaacccgaaaaggacagggtatagtga

SEQ ID NO: 13932 - DNA, 37 bp, Artificial Sequence
  Synthetic oligonucleotide
atagtaaggtcatgaataagatggggacggttcaaga

SEQ ID NO: 13933 - DNA, 38 bp, Artificial Sequence
  Synthetic oligonucleotide
atcgaagtggtggggaggtctacttagtacggtcatga

SEQ ID NO: 13934 - DNA, 38 bp, Artificial Sequence
  Synthetic oligonucleotide
atcgtacagacaacatttcacggatttagatacgttga

SEQ ID NO: 13935 - DNA, 38 bp, Artificial Sequence
  Synthetic oligonucleotide
atgtacgcatcagtacacacggactgcgctgttaatga

SEQ ID NO: 13936 - DNA, 35 bp, Artificial Sequence
  Synthetic oligonucleotide
atgtttagtcctttcattttgtgtataatatgatg

SEQ ID NO: 13937 - DNA, 37 bp, Artificial Sequence
  Synthetic oligonucleotide
atttttggacccgtttgaaaatacgcgactggtcgga

SEQ ID NO: 13938 - DNA, 37 bp, Artificial Sequence
  Synthetic oligonucleotide
cacaagaccgagaagctgtttgtgtaggtacgcgtga

SEQ ID NO: 13939 - DNA, 36 bp, Artificial Sequence
  Synthetic oligonucleotide
caccaagacgaatccgttccctcagtcacagcggga

SEQ ID NO: 13940 - DNA, 38 bp, Artificial Sequence
  Synthetic oligonucleotide
catttggttgggagaggcgctcatggcccctccagtga

SEQ ID NO: 13941 - DNA, 35 bp, Artificial Sequence
  Synthetic oligonucleotide
ccattggtgtgatcaactagtaattcaatgctcag

SEQ ID NO: 13942 - DNA, 38 bp, Artificial Sequence
  Synthetic oligonucleotide
ccctttgcgtggatttggatgttttagggcgagtttga

SEQ ID NO: 13943 - DNA, 36 bp, Artificial Sequence
  Synthetic oligonucleotide
ccggacggagggttggatactgcagtttttcgtgca

SEQ ID NO: 13944 - DNA, 37 bp, Artificial Sequence
  Synthetic oligonucleotide
cctaatctgccgggacaagtccgtaatagtaatacga

SEQ ID NO: 13945 - DNA, 36 bp, Artificial Sequence
  Synthetic oligonucleotide
cctgacggccacacagctagagtgggggacatatca

SEQ ID NO: 13946 - DNA, 35 bp, Artificial Sequence
  Synthetic oligonucleotide
gaagaacgctgcttaagtttttgatgttcgatacg

SEQ ID NO: 13947 - DNA, 37 bp, Artificial Sequence
  Synthetic oligonucleotide
gacatagtttgatcggagggtttcccggcctaccgga

SEQ ID NO: 13948 - DNA, 37 bp, Artificial Sequence
  Synthetic oligonucleotide
gacattcgtcgttcactagtcgaattgtaacatagga

SEQ ID NO: 13949 - DNA, 36 bp, Artificial Sequence
  Synthetic oligonucleotide
gacgcataggtcatgttggttagttggcgttctcta

SEQ ID NO: 13950 - DNA, 35 bp, Artificial Sequence
  Synthetic oligonucleotide
gacgggcatggacgtgcaagagatatttgggtgcg

SEQ ID NO: 13951 - DNA, 36 bp, Artificial Sequence
  Synthetic oligonucleotide
gagaatatataactgcattgtttcgagtctatataa

SEQ ID NO: 13952 - DNA, 35 bp, Artificial Sequence
  Synthetic oligonucleotide
gagccgggaccaagttggggaggtcaattggttgt

SEQ ID NO: 13953 - DNA, 38 bp, Artificial Sequence
  Synthetic oligonucleotide
gagcgcttgaggttatagctcttgcctagcaccaatga

SEQ ID NO: 13954 - DNA, 36 bp, Artificial Sequence
  Synthetic oligonucleotide
gatttaagtcgcgcactactgggatatgattgttga

SEQ ID NO: 13955 - DNA, 37 bp, Artificial Sequence
  Synthetic oligonucleotide
gcaataaagtcgtaagtcttatggtgtactttggtga

SEQ ID NO: 13956 - DNA, 37 bp, Artificial Sequence
  Synthetic oligonucleotide
gcaggaccgtgacctttccctaccaagcgacccgcga

SEQ ID NO: 13957 - DNA, 38 bp, Artificial Sequence
  Synthetic oligonucleotide
gcatggggctcactgagggtgaggggacatgatagtga

SEQ ID NO: 13958 - DNA, 36 bp, Artificial Sequence
  Synthetic oligonucleotide
gccgaccgggtcgggcaataatacgtaggctgcaca

SEQ ID NO: 13959 - DNA, 36 bp, Artificial Sequence
  Synthetic oligonucleotide
gccggtactcatggcgctattaggaccttgagtcga

SEQ ID NO: 13960 - DNA, 35 bp, Artificial Sequence
  Synthetic oligonucleotide
gcgttaattccatgattagcgaagcaattggttcg

SEQ ID NO: 13961 - DNA, 38 bp, Artificial Sequence
  Synthetic oligonucleotide
gctacacagaactgagttcccatgatccgattggctga

SEQ ID NO: 13962 - DNA, 36 bp, Artificial Sequence
  Synthetic oligonucleotide
gctacgtgttattgcgagggacggtctataagtgga

SEQ ID NO: 13963 - DNA, 37 bp, Artificial Sequence
  Synthetic oligonucleotide
gcttccaattcactgctcaagaagtgagtaagtgcga

SEQ ID NO: 13964 - DNA, 35 bp, Artificial Sequence
  Synthetic oligonucleotide
ggaaccccaggtcctgatgagacttgctggtccac

SEQ ID NO: 13965 - DNA, 36 bp, Artificial Sequence
  Synthetic oligonucleotide
gggcaccttaccagaatatatggagcccgttggtta

SEQ ID NO: 13966 - DNA, 35 bp, Artificial Sequence
  Synthetic oligonucleotide
gggtgcctagtgggcgctttaggggtaccacgcat

SEQ ID NO: 13967 - DNA, 37 bp, Artificial Sequence
  Synthetic oligonucleotide
ggtaggtttcttatgtgagtgcttcacagtaggaaga

SEQ ID NO: 13968 - DNA, 38 bp, Artificial Sequence
  Synthetic oligonucleotide
gtcgcctagggttgcccccaggagttacaagcaactga

SEQ ID NO: 13969 - DNA, 37 bp, Artificial Sequence
  Synthetic oligonucleotide
gtgatatcaggtccccggtgccactctgtactgcaga

SEQ ID NO: 13970 - DNA, 37 bp, Artificial Sequence
  Synthetic oligonucleotide
gtgccacgtatccgaatgattcgagaccatggtccga

SEQ ID NO: 13971 - DNA, 35 bp, Artificial Sequence
  Synthetic oligonucleotide
gtgggggatagttagcagagactggatctttttgt

SEQ ID NO: 13972 - DNA, 37 bp, Artificial Sequence
  Synthetic oligonucleotide
gtgtccaatccgaataagccgtcacgagtttaggaga

SEQ ID NO: 13973 - DNA, 35 bp, Artificial Sequence
  Synthetic oligonucleotide
gttaaggtcgcaccacgttaccggtgcagatttct

SEQ ID NO: 13974 - DNA, 35 bp, Artificial Sequence
  Synthetic oligonucleotide
gttgtccacgtacaggcttcacactgaggggtgta

SEQ ID NO: 13975 - DNA, 37 bp, Artificial Sequence
  Synthetic oligonucleotide
taagagggatcaatggattgtgagccggggagcggga

SEQ ID NO: 13976 - DNA, 38 bp, Artificial Sequence
  Synthetic oligonucleotide
taatgtagtggaacctcgtgagccacaggcggacttga

SEQ ID NO: 13977 - DNA, 38 bp, Artificial Sequence
  Synthetic oligonucleotide
tacagaaagagtcgaactatgcgttcagcaacttttga

SEQ ID NO: 13978 - DNA, 38 bp, Artificial Sequence
  Synthetic oligonucleotide
taccggggagtgaagacactctagaataggattcgtga

SEQ ID NO: 13979 - DNA, 36 bp, Artificial Sequence
  Synthetic oligonucleotide
taggggtacaaaggaggtaaaccagggaggtttaca

SEQ ID NO: 13980 - DNA, 38 bp, Artificial Sequence
  Synthetic oligonucleotide
tagttcctggccgctgtgaggcttcccacatacgatga

SEQ ID NO: 13981 - DNA, 35 bp, Artificial Sequence
  Synthetic oligonucleotide
tatagtgagttctacttaccggtactatgcaggtc

SEQ ID NO: 13982 - DNA, 35 bp, Artificial Sequence
  Synthetic oligonucleotide
tattccaagggaaagtctggtatctgaccataccg

SEQ ID NO: 13983 - DNA, 36 bp, Artificial Sequence
  Synthetic oligonucleotide
tcagagcggacggcctcatcatggagatacaccaca

SEQ ID NO: 13984 - DNA, 35 bp, Artificial Sequence
  Synthetic oligonucleotide
tccgaggggaaggccttgagaagttgttcgtcaca

SEQ ID NO: 13985 - DNA, 35 bp, Artificial Sequence
  Synthetic oligonucleotide
tcgggtaatccgaatcctacgcggtatagtagtta

SEQ ID NO: 13986 - DNA, 37 bp, Artificial Sequence
  Synthetic oligonucleotide
tctagggatcagatcactataccgtacgaaactttga

SEQ ID NO: 13987 - DNA, 36 bp, Artificial Sequence
  Synthetic oligonucleotide
tctcctgcgcttcacacgcccatgaaaaaggggcaa

SEQ ID NO: 13988 - DNA, 38 bp, Artificial Sequence
  Synthetic oligonucleotide
tcttctggcggggcgatggccgggccaggtttgaatga

SEQ ID NO: 13989 - DNA, 36 bp, Artificial Sequence
  Synthetic oligonucleotide
tgaaaactgcttttcatacgtctgcgtgtccagtca

SEQ ID NO: 13990 - DNA, 35 bp, Artificial Sequence
  Synthetic oligonucleotide
tgaataccaactatcgtgacagcctataaataacg

SEQ ID NO: 13991 - DNA, 37 bp, Artificial Sequence
  Synthetic oligonucleotide
tgacactcagggaatgctggattgaacaggttcacga

SEQ ID NO: 13992 - DNA, 37 bp, Artificial Sequence
  Synthetic oligonucleotide
tgcgacttagtccgaatcccattgtagtatggcccga

SEQ ID NO: 13993 - DNA, 36 bp, Artificial Sequence
  Synthetic oligonucleotide
tgcggcgaggcttcgccgcatcctttcagttcgaga

SEQ ID NO: 13994 - DNA, 38 bp, Artificial Sequence
  Synthetic oligonucleotide
tgtgggtcgtgctgctgatcaagtgctaattgatgtga

SEQ ID NO: 13995 - DNA, 35 bp, Artificial Sequence
  Synthetic oligonucleotide
tgtgtcctcagtactatgcgtaattcagtcagtga

SEQ ID NO: 13996 - DNA, 36 bp, Artificial Sequence
  Synthetic oligonucleotide
ttaacgggaaagactccttgccgtgttaaggttaca

SEQ ID NO: 13997 - DNA, 37 bp, Artificial Sequence
  Synthetic oligonucleotide
ttcaagagctgtgagagtcatcatgcatcgttcacga

SEQ ID NO: 13998 - DNA, 37 bp, Artificial Sequence
  Synthetic oligonucleotide
ttcacgcacgagataacgcgtcctagtccaggaagga

SEQ ID NO: 13999 - DNA, 36 bp, Artificial Sequence
  Synthetic oligonucleotide
ttccactgcgaatgggactcctcatgatttagggta

SEQ ID NO: 14000 - DNA, 35 bp, Artificial Sequence
  Synthetic oligonucleotide
ttgcgtacgtcatggatcggctttgagcactcttc

SEQ ID NO: 14001 - DNA, 37 bp, Artificial Sequence
  Synthetic oligonucleotide
ttggttacgcctgtcccgctcatagtggtaagagtga

SEQ ID NO: 14002 - DNA, 37 bp, Artificial Sequence
  Synthetic oligonucleotide
ttgtacctatttacgcgagccatgggtggtaagggga

SEQ ID NO: 14003 - DNA, 38 bp, Artificial Sequence
  Synthetic oligonucleotide
tttaacacggttgtgattagtctatagaggctgattga

SEQ ID NO: 14004 - DNA, 35 bp, Artificial Sequence
  Synthetic oligonucleotide
tttaatacggtctcaatcagggacgtcgcgccctt

SEQ ID NO: 14005 - DNA, 36 bp, Artificial Sequence
  Synthetic oligonucleotide
tttgcatacatgcagattgaagtcgggtattcgtga

SEQ ID NO: 14006 - DNA, 36 bp, Artificial Sequence
  Synthetic oligonucleotide
ttttaagtactcccgtgacgtgaaacactgcattta

SEQ ID NO: 14007 - DNA, 36 bp, Artificial Sequence
  Synthetic oligonucleotide
ttttagcttcggatttaggagggcgttccgtgtaca

SEQ ID NO: 14008 - DNA, 36 bp, Artificial Sequence
  Synthetic oligonucleotide
gcattgtttgatacgaactaagtactaagcggtcca

SEQ ID NO: 14009 - DNA, 35 bp, Artificial Sequence
  Synthetic oligonucleotide
aagggacggactttatgattatgcccagccccccc

SEQ ID NO: 14010 - DNA, 35 bp, Artificial Sequence
  Synthetic oligonucleotide
tcagaagtcgttcgtcgtatcctgcccgtacacag

SEQ ID NO: 14011 - DNA, 36 bp, Artificial Sequence
  Synthetic oligonucleotide
aaagtccagccgttcggggtgcggccccatgggtta

SEQ ID NO: 14012 - DNA, 37 bp, Artificial Sequence
  Synthetic oligonucleotide
actaccagggccgtgcgcaattgggcaatcttactga

SEQ ID NO: 14013 - DNA, 38 bp, Artificial Sequence
  Synthetic oligonucleotide
gaacgttataggatgtggtccagctaagcccctcctga

SEQ ID NO: 14014 - DNA, 38 bp, Artificial Sequence
  Synthetic oligonucleotide
gacacgagcgtgaggttttccagtgatgccgcttgtga

SEQ ID NO: 14015 - DNA, 36 bp, Artificial Sequence
  Synthetic oligonucleotide
gagcggacaccgagtatctatgagactaggtcgtca

SEQ ID NO: 14016 - DNA, 35 bp, Artificial Sequence
  Synthetic oligonucleotide
gcatttaagcccgtagtacaatcatagattggaag

SEQ ID NO: 14017 - DNA, 36 bp, Artificial Sequence
  Synthetic oligonucleotide
ggaacctatggcacaggcctactatacagttggcca

SEQ ID NO: 14018 - DNA, 35 bp, Artificial Sequence
  Synthetic oligonucleotide
ttatcaaaaggcgtttaggagtaggctataagcat

SEQ ID NO: 14019 - DNA, 37 bp, Artificial Sequence
  Synthetic oligonucleotide
gagactggctcacgcacaatctatgttattgctcgga

SEQ ID NO: 14020 - DNA, 37 bp, Artificial Sequence
  Synthetic oligonucleotide
tagatccgacttagggaggctagccttctgtatagga

SEQ ID NO: 14021 - DNA, 36 bp, Artificial Sequence
  Synthetic oligonucleotide
aacggggcaaacaggtggatcctaagcttggtccta

SEQ ID NO: 14022 - DNA, 37 bp, Artificial Sequence
  Synthetic oligonucleotide
aagggttgtcggggcggtatgcagaaggcggtaatga

SEQ ID NO: 14023 - DNA, 35 bp, Artificial Sequence
  Synthetic oligonucleotide
aatcatcgcgggggggatggtgctcgcaggggttg

SEQ ID NO: 14024 - DNA, 36 bp, Artificial Sequence
  Synthetic oligonucleotide
acaaggccgcaaaatattaatagggggcctagtgca

SEQ ID NO: 14025 - DNA, 37 bp, Artificial Sequence
  Synthetic oligonucleotide
actgccgaagcacaacggtagaaccaggaaacggcga

SEQ ID NO: 14026 - DNA, 36 bp, Artificial Sequence
  Synthetic oligonucleotide
agattcaatgagcgacgagtagatgcctgttcagaa

SEQ ID NO: 14027 - DNA, 38 bp, Artificial Sequence
  Synthetic oligonucleotide
agcaccactacataagttattcttgcacggctccatga

SEQ ID NO: 14028 - DNA, 35 bp, Artificial Sequence
  Synthetic oligonucleotide
aggctgtagaatagttcagatacgccatctccccc

SEQ ID NO: 14029 - DNA, 37 bp, Artificial Sequence
  Synthetic oligonucleotide
agtaatgaaccgctagaccaaataaattggtgtcgga

SEQ ID NO: 14030 - DNA, 35 bp, Artificial Sequence
  Synthetic oligonucleotide
agtgtgaaagcagttaaatacggcggaggggctct

SEQ ID NO: 14031 - DNA, 37 bp, Artificial Sequence
  Synthetic oligonucleotide
ataggatgcgtcactctgactgggccggctatagtga

SEQ ID NO: 14032 - DNA, 37 bp, Artificial Sequence
  Synthetic oligonucleotide
atcaaagactgcgtgggctcgattagaaatccaggga

SEQ ID NO: 14033 - DNA, 38 bp, Artificial Sequence
  Synthetic oligonucleotide
atctgagaccagattgggccatagggaccgagggctga

SEQ ID NO: 14034 - DNA, 35 bp, Artificial Sequence
  Synthetic oligonucleotide
ccttgcgccaaacgaaacttcaggacggtgcggag

SEQ ID NO: 14035 - DNA, 37 bp, Artificial Sequence
  Synthetic oligonucleotide
gaactagtggttagattatatagacagtggtttaaga

SEQ ID NO: 14036 - DNA, 35 bp, Artificial Sequence
  Synthetic oligonucleotide
gacgtgatttttgaacaagaacatcgcgacatgta

SEQ ID NO: 14037 - DNA, 38 bp, Artificial Sequence
  Synthetic oligonucleotide
gactccaggaatctgtttgggaataaactgggtcctga

SEQ ID NO: 14038 - DNA, 35 bp, Artificial Sequence
  Synthetic oligonucleotide
gagtacgccattacccgccattacggtacgtacat

SEQ ID NO: 14039 - DNA, 35 bp, Artificial Sequence
  Synthetic oligonucleotide
gatattgtcggatcgggtagtaagggcctatactg

SEQ ID NO: 14040 - DNA, 37 bp, Artificial Sequence
  Synthetic oligonucleotide
gcaagtaagggaggttcccccgacatgaacagggtga

SEQ ID NO: 14041 - DNA, 38 bp, Artificial Sequence
  Synthetic oligonucleotide
gcaccaaggaatgaaagagtctgatctcacggtggtga

SEQ ID NO: 14042 - DNA, 38 bp, Artificial Sequence
  Synthetic oligonucleotide
gccaaaactcaggaggttattgggattctaccgcatga

SEQ ID NO: 14043 - DNA, 38 bp, Artificial Sequence
  Synthetic oligonucleotide
gccaaggataccattctacgcgccaatcgaatgtctga

SEQ ID NO: 14044 - DNA, 37 bp, Artificial Sequence
  Synthetic oligonucleotide
gctcgggtcatgcggacctataatggctttataacga

SEQ ID NO: 14045 - DNA, 35 bp, Artificial Sequence
  Synthetic oligonucleotide
ggagcacccgcctggaactgctccacactggcgtt

SEQ ID NO: 14046 - DNA, 36 bp, Artificial Sequence
  Synthetic oligonucleotide
gggctcctccactatgaaggggagctttcggacgga

SEQ ID NO: 14047 - DNA, 38 bp, Artificial Sequence
  Synthetic oligonucleotide
gggggaatcgtagcggttacgcaacaccccgggggtga

SEQ ID NO: 14048 - DNA, 35 bp, Artificial Sequence
  Synthetic oligonucleotide
ggtggaccggggcttgacaccgcgtaacctacgtg

SEQ ID NO: 14049 - DNA, 35 bp, Artificial Sequence
  Synthetic oligonucleotide
gtactcctcaatctagtgcggccgttgctagacct

SEQ ID NO: 14050 - DNA, 35 bp, Artificial Sequence
  Synthetic oligonucleotide
gtgcctgcacagggccagacgagatctttttgccg

SEQ ID NO: 14051 - DNA, 38 bp, Artificial Sequence
  Synthetic oligonucleotide
gttcaaggcaagggggaggtatagtaggaaaccactga

SEQ ID NO: 14052 - DNA, 38 bp, Artificial Sequence
  Synthetic oligonucleotide
taggcgtgctggtcatggtctgttatgcgagaatttga

SEQ ID NO: 14053 - DNA, 37 bp, Artificial Sequence
  Synthetic oligonucleotide
tccatagcgagaatttattggagttacattcatgtga

SEQ ID NO: 14054 - DNA, 35 bp, Artificial Sequence
  Synthetic oligonucleotide
tccgttcagacacctgatcaactctagcgggggta

SEQ ID NO: 14055 - DNA, 36 bp, Artificial Sequence
  Synthetic oligonucleotide
ttaaagatatagatctgcacagccttgagacctgga

SEQ ID NO: 14056 - DNA, 36 bp, Artificial Sequence
  Synthetic oligonucleotide
tggtcctgagcaatcatggaagaaattaacattgta

SEQ ID NO: 14057 - DNA, 38 bp, Artificial Sequence
  Synthetic oligonucleotide
agttcgtaacattatgcgaatcttagcgaatcggatga

SEQ ID NO: 14058 - DNA, 38 bp, Artificial Sequence
  Synthetic oligonucleotide
ggactggtcttgggatcagtcgaaatggcgaggagtga

SEQ ID NO: 14059 - DNA, 35 bp, Artificial Sequence
  Synthetic oligonucleotide
gggggccgacatgcgacaaaacgcggggcaaacat

SEQ ID NO: 14060 - DNA, 37 bp, Artificial Sequence
  Synthetic oligonucleotide
tgataggtaataccctatttccgacagtaactgcaga

SEQ ID NO: 14061 - DNA, 37 bp, Artificial Sequence
  Synthetic oligonucleotide
tgtggacacctaaatgaaaagggagtgtgctaacgga

SEQ ID NO: 14062 - DNA, 37 bp, Artificial Sequence
  Synthetic oligonucleotide
ttgcgagataaagcataaggtatcaccgcaacgagga

SEQ ID NO: 14063 - DNA, 35 bp, Artificial Sequence
  Synthetic oligonucleotide
agcatcctacgtacgaatggcaaactaatgaaacc

SEQ ID NO: 14064 - DNA, 35 bp, Artificial Sequence
  Synthetic oligonucleotide
atcctggtcgtggggctcccatcgcaacgccttac

SEQ ID NO: 14065 - DNA, 35 bp, Artificial Sequence
  Synthetic oligonucleotide
gccttgtacacccttgtatgtggattgcggaagca

SEQ ID NO: 14066 - DNA, 38 bp, Artificial Sequence
  Synthetic oligonucleotide
ggtgtgcacctccgagcattgctgtttaggcgttgtga

SEQ ID NO: 14067 - DNA, 36 bp, Artificial Sequence
  Synthetic oligonucleotide
ggttctttgcgtatataatgcgaacggaccatgaca

SEQ ID NO: 14068 - DNA, 35 bp, Artificial Sequence
  Synthetic oligonucleotide
ttgaacagccgccgcggagttagcaatatttggcc

SEQ ID NO: 14069 - DNA, 37 bp, Artificial Sequence
  Synthetic oligonucleotide
acgcaaggtggtctcccccatggtgcgattataggga

SEQ ID NO: 14070 - DNA, 35 bp, Artificial Sequence
  Synthetic oligonucleotide
gcgaagtagcttacatatatatgacgatcgactag

SEQ ID NO: 14071 - DNA, 37 bp, Artificial Sequence
  Synthetic oligonucleotide
tacgtgcccggagtgtcatagaaacagggccgtctga

SEQ ID NO: 14072 - DNA, 36 bp, Artificial Sequence
  Synthetic oligonucleotide
tgtggtcgatgggtccgagttcaaagtggctaggga

SEQ ID NO: 14073 - DNA, 36 bp, Artificial Sequence
  Synthetic oligonucleotide
gaagacactcaggtgaggcacctaatggcataggta

SEQ ID NO: 14074 - DNA, 36 bp, Artificial Sequence
  Synthetic oligonucleotide
tactgcttcggggtgtaaggccacagtcgcttttga

SEQ ID NO: 14075 - DNA, 37 bp, Artificial Sequence
  Synthetic oligonucleotide
ttaatcacgacggtatatttgtggagtggggagtaga

SEQ ID NO: 14076 - DNA, 38 bp, Artificial Sequence
  Synthetic oligonucleotide
ttgtcatcatgctcgtcccggattggtttgtgagttga

SEQ ID NO: 14077 - DNA, 37 bp, Artificial Sequence
  Synthetic oligonucleotide
aagcataacgcataagagtacatctttagtcatgtga

SEQ ID NO: 14078 - DNA, 37 bp, Artificial Sequence
  Synthetic oligonucleotide
aatactagcctcgctaggacggaaatttggaggtgga

SEQ ID NO: 14079 - DNA, 35 bp, Artificial Sequence
  Synthetic oligonucleotide
aatgttaaggtctctccggtttgtaggaaccgagc

SEQ ID NO: 14080 - DNA, 36 bp, Artificial Sequence
  Synthetic oligonucleotide
acagtaacaggaggggaatctggatgagtcatcata

SEQ ID NO: 14081 - DNA, 36 bp, Artificial Sequence
  Synthetic oligonucleotide
accgcgggttcataggtcaccggaagggcttgagta

SEQ ID NO: 14082 - DNA, 38 bp, Artificial Sequence
  Synthetic oligonucleotide
acgactagaacgatctctactgtttagaacagtcttga

SEQ ID NO: 14083 - DNA, 37 bp, Artificial Sequence
  Synthetic oligonucleotide
actatcgttactcccacgtcatggaactgacgaccga

SEQ ID NO: 14084 - DNA, 38 bp, Artificial Sequence
  Synthetic oligonucleotide
actttcttggagacgcagtttggtgagtggggatctga

SEQ ID NO: 14085 - DNA, 35 bp, Artificial Sequence
  Synthetic oligonucleotide
agagtgcactctcgttcaactccggcgccctgtta

SEQ ID NO: 14086 - DNA, 35 bp, Artificial Sequence
  Synthetic oligonucleotide
agctatgtgaagtatcaatgcactcggataaggag

SEQ ID NO: 14087 - DNA, 35 bp, Artificial Sequence
  Synthetic oligonucleotide
agttacgcctgaaaaattccgaatgtgactgcaag

SEQ ID NO: 14088 - DNA, 35 bp, Artificial Sequence
  Synthetic oligonucleotide
atcgggccagaagtgtgaactcgtactgcaccaca

SEQ ID NO: 14089 - DNA, 38 bp, Artificial Sequence
  Synthetic oligonucleotide
atggttaggtcaagcgagcaccagacttgttccaatga

SEQ ID NO: 14090 - DNA, 35 bp, Artificial Sequence
  Synthetic oligonucleotide
attgttctgggacattggtagagacttctctattg

SEQ ID NO: 14091 - DNA, 35 bp, Artificial Sequence
  Synthetic oligonucleotide
caccgctgagtgaaccggtccactcatgtgggctg

SEQ ID NO: 14092 - DNA, 35 bp, Artificial Sequence
  Synthetic oligonucleotide
caggcaaatcgggcatacctgttcaatagaaagtg

SEQ ID NO: 14093 - DNA, 38 bp, Artificial Sequence
  Synthetic oligonucleotide
ccggtctgaagttcatttttatgttattttgtgcatga

SEQ ID NO: 14094 - DNA, 38 bp, Artificial Sequence
  Synthetic oligonucleotide
ctgtgtacgtactacgcatgggcgacggaaggcattga

SEQ ID NO: 14095 - DNA, 38 bp, Artificial Sequence
  Synthetic oligonucleotide
gaagacgttcggctcctaaagtcacacataggcgttga

SEQ ID NO: 14096 - DNA, 35 bp, Artificial Sequence
  Synthetic oligonucleotide
gaagtagttcctgtcatattgggtatcgatgaaaa

SEQ ID NO: 14097 - DNA, 36 bp, Artificial Sequence
  Synthetic oligonucleotide
gaattcggggggagcctgtgcaatgactgtccggta

SEQ ID NO: 14098 - DNA, 38 bp, Artificial Sequence
  Synthetic oligonucleotide
gcaaagtttcgtcaaggtcttacgcgccccttgaatga

SEQ ID NO: 14099 - DNA, 36 bp, Artificial Sequence
  Synthetic oligonucleotide
gcatccatgatcttaaggagcatagtgcacactata

SEQ ID NO: 14100 - DNA, 38 bp, Artificial Sequence
  Synthetic oligonucleotide
gcatccgtcggacacgggaccggcggtatgcacggtga

SEQ ID NO: 14101 - DNA, 36 bp, Artificial Sequence
  Synthetic oligonucleotide
gcccagcttcttaaggttatgggtatggactgcgaa

SEQ ID NO: 14102 - DNA, 35 bp, Artificial Sequence
  Synthetic oligonucleotide
gccgtaataacggatgaagtggggtatggtaggct

SEQ ID NO: 14103 - DNA, 38 bp, Artificial Sequence
  Synthetic oligonucleotide
gcgaagtcggaccaccgcacggcctgaggacgacttga

SEQ ID NO: 14104 - DNA, 38 bp, Artificial Sequence
  Synthetic oligonucleotide
gcgctccagagtgctcttccgcacagaaccgtatttga

SEQ ID NO: 14105 - DNA, 37 bp, Artificial Sequence
  Synthetic oligonucleotide
gctatgactgaaatcggagggtcagtaacagtacaga

SEQ ID NO: 14106 - DNA, 35 bp, Artificial Sequence
  Synthetic oligonucleotide
ggatacgttcagttacttcgccacgcacgtcatgc

SEQ ID NO: 14107 - DNA, 35 bp, Artificial Sequence
  Synthetic oligonucleotide
gggtccgtgaattggacgttagtagcggtaatatg

SEQ ID NO: 14108 - DNA, 37 bp, Artificial Sequence
  Synthetic oligonucleotide
ggtcgcgagcctgcattagcgtatcagcaatggccga

SEQ ID NO: 14109 - DNA, 36 bp, Artificial Sequence
  Synthetic oligonucleotide
ggttaagacttcgagacaagttctgaaggaagatta

SEQ ID NO: 14110 - DNA, 36 bp, Artificial Sequence
  Synthetic oligonucleotide
gtaacgccatactgtagttcacatgttagcggccta

SEQ ID NO: 14111 - DNA, 35 bp, Artificial Sequence
  Synthetic oligonucleotide
gtacttctggttgccaggatccactctaagtgagc

SEQ ID NO: 14112 - DNA, 36 bp, Artificial Sequence
  Synthetic oligonucleotide
gtagcatggcacctgctgagggtacacggtccacaa

SEQ ID NO: 14113 - DNA, 38 bp, Artificial Sequence
  Synthetic oligonucleotide
gtcctaccatgtagtatgtggacaacgcgcatgactga

SEQ ID NO: 14114 - DNA, 36 bp, Artificial Sequence
  Synthetic oligonucleotide
gttcagagtacatatcttagggtcggaggagtacaa

SEQ ID NO: 14115 - DNA, 37 bp, Artificial Sequence
  Synthetic oligonucleotide
gttcatgaaataggaagctcgttatcaattgcttgga

SEQ ID NO: 14116 - DNA, 38 bp, Artificial Sequence
  Synthetic oligonucleotide
taaaagaacggagggggtgttgctggtgaccgtcgtga

SEQ ID NO: 14117 - DNA, 36 bp, Artificial Sequence
  Synthetic oligonucleotide
taagtaaatctgataggacgcgaagtcctactctag

SEQ ID NO: 14118 - DNA, 38 bp, Artificial Sequence
  Synthetic oligonucleotide
taagttttcagtactgccccgcgctgtaggataggtga

SEQ ID NO: 14119 - DNA, 37 bp, Artificial Sequence
  Synthetic oligonucleotide
tacacgaagcagagacatttcagttatcccccgctga

SEQ ID NO: 14120 - DNA, 36 bp, Artificial Sequence
  Synthetic oligonucleotide
tacgcagtcaccggcgtgtgacgcccatgatacgta

SEQ ID NO: 14121 - DNA, 36 bp, Artificial Sequence
  Synthetic oligonucleotide
tactacgttggtaataaaattcgacgagatgcgtga

SEQ ID NO: 14122 - DNA, 37 bp, Artificial Sequence
  Synthetic oligonucleotide
tactgaagagaagcgggagtcttggcttcttctccga

SEQ ID NO: 14123 - DNA, 36 bp, Artificial Sequence
  Synthetic oligonucleotide
tatgggacggtttacgggctgacaagacaggtttaa

SEQ ID NO: 14124 - DNA, 37 bp, Artificial Sequence
  Synthetic oligonucleotide
tcaccacctcggtcacgatgtgttttaggcgttatga

SEQ ID NO: 14125 - DNA, 35 bp, Artificial Sequence
  Synthetic oligonucleotide
tcgccagagtgaaagttgaccgggggtgaacttga

SEQ ID NO: 14126 - DNA, 35 bp, Artificial Sequence
  Synthetic oligonucleotide
tcggatgctggcccagtctcatctgagggtacacc

SEQ ID NO: 14127 - DNA, 36 bp, Artificial Sequence
  Synthetic oligonucleotide
tgactgaccacggcaaagttactgtggggaggcaca

SEQ ID NO: 14128 - DNA, 35 bp, Artificial Sequence
  Synthetic oligonucleotide
tgagcgggtcctcaagtcatgctaagcgttgatga

SEQ ID NO: 14129 - DNA, 36 bp, Artificial Sequence
  Synthetic oligonucleotide
tgcaagtttggtggtaaatggttcgtgtaacaggaa

SEQ ID NO: 14130 - DNA, 36 bp, Artificial Sequence
  Synthetic oligonucleotide
tgggaagcgatttagggtatcgcatctactagagta

SEQ ID NO: 14131 - DNA, 36 bp, Artificial Sequence
  Synthetic oligonucleotide
tgtggttcacctcacgagggggtcgcggatcggaca

SEQ ID NO: 14132 - DNA, 36 bp, Artificial Sequence
  Synthetic oligonucleotide
ttcgtctcacaggcattcacttgcggagtcctttaa

SEQ ID NO: 14133 - DNA, 36 bp, Artificial Sequence
  Synthetic oligonucleotide
ttgcgtgccatcccggtgtcgggtgtgaacaccgaa

SEQ ID NO: 14134 - DNA, 35 bp, Artificial Sequence
  Synthetic oligonucleotide
ttgtcgctgttgcgttggaaaacctggactataag

SEQ ID NO: 14135 - DNA, 36 bp, Artificial Sequence
  Synthetic oligonucleotide
tttgtgtgcagaggtgctaagataccgacgtgggga

SEQ ID NO: 14136 - DNA, 36 bp, Artificial Sequence
  Synthetic oligonucleotide
ttttggcagttgttaacgctcgtttagcaggcttta

SEQ ID NO: 14137 - DNA, 35 bp, Artificial Sequence
  Synthetic oligonucleotide
ctgcccaactccttgacgctcatgtcagcttcctc

SEQ ID NO: 14138 - DNA, 36 bp, Artificial Sequence
  Synthetic oligonucleotide
aatcttacgctgcagatcgggaccgcaaggctcgaa

SEQ ID NO: 14139 - DNA, 36 bp, Artificial Sequence
  Synthetic oligonucleotide
acgaaggcttccgagggtttaacggcttataggaaa

SEQ ID NO: 14140 - DNA, 38 bp, Artificial Sequence
  Synthetic oligonucleotide
agcaccactgcgaaggttaaatttatagtgttttgtga

SEQ ID NO: 14141 - DNA, 36 bp, Artificial Sequence
  Synthetic oligonucleotide
agtcaatacacgatgggagtctcggagatacataca

SEQ ID NO: 14142 - DNA, 36 bp, Artificial Sequence
  Synthetic oligonucleotide
agttgctggttgccacagcggaccgtgttacacgaa

SEQ ID NO: 14143 - DNA, 37 bp, Artificial Sequence
  Synthetic oligonucleotide
atacttgctacatgaggggcctggtcgcctggaccga

SEQ ID NO: 14144 - DNA, 37 bp, Artificial Sequence
  Synthetic oligonucleotide
atccgagattggaatgacaattaataatcattggtga

SEQ ID NO: 14145 - DNA, 35 bp, Artificial Sequence
  Synthetic oligonucleotide
gtagacgaggtttgtcaataaagggatcgttgcga

SEQ ID NO: 14146 - DNA, 36 bp, Artificial Sequence
  Synthetic oligonucleotide
gtgacctggactgacacgcatgaaatggtcatcgaa

SEQ ID NO: 14147 - DNA, 36 bp, Artificial Sequence
  Synthetic oligonucleotide
gtttgcacagagctatgggccgacataatctgtaga

SEQ ID NO: 14148 - DNA, 37 bp, Artificial Sequence
  Synthetic oligonucleotide
tgatgcatgtccaagcgcaacgctgctacaggaaaga

SEQ ID NO: 14149 - DNA, 37 bp, Artificial Sequence
  Synthetic oligonucleotide
gcggtcttaaggataagatctggggatccgcgtacga

SEQ ID NO: 14150 - DNA, 37 bp, Artificial Sequence
  Synthetic oligonucleotide
gcctgcgaacatgccgaaacacttcagtcagacagga

SEQ ID NO: 14151 - DNA, 36 bp, Artificial Sequence
  Synthetic oligonucleotide
gtcgttggcgacttagcccaaggaattaggagcaga

SEQ ID NO: 14152 - DNA, 37 bp, Artificial Sequence
  Synthetic oligonucleotide
gtggaatcgggagggagtcaattacgtgcgtctaaga

SEQ ID NO: 14153 - DNA, 37 bp, Artificial Sequence
  Synthetic oligonucleotide
tagggtactacagcgctgccgctcccccctcgctgga

SEQ ID NO: 14154 - DNA, 38 bp, Artificial Sequence
  Synthetic oligonucleotide
ggaacgtgcattgatgcccggagacgtgactattctga

SEQ ID NO: 14155 - DNA, 36 bp, Artificial Sequence
  Synthetic oligonucleotide
aactcgcccgactgcatgtatgaaatgaacggtgga

SEQ ID NO: 14156 - DNA, 36 bp, Artificial Sequence
  Synthetic oligonucleotide
acgcatggtcatggggccgatgtgccgagtacggta

SEQ ID NO: 14157 - DNA, 37 bp, Artificial Sequence
  Synthetic oligonucleotide
gctcaatgggtgagatccctaggtatgtacagtggga

SEQ ID NO: 14158 - DNA, 36 bp, Artificial Sequence
  Synthetic oligonucleotide
aacgatgatcattgcctgtgtcggattaaggattca

SEQ ID NO: 14159 - DNA, 37 bp, Artificial Sequence
  Synthetic oligonucleotide
aaggcccgtgggtgctttcattatttagagtacgaga

SEQ ID NO: 14160 - DNA, 35 bp, Artificial Sequence
  Synthetic oligonucleotide
aagtctctactactacagggttagggacagttcta

SEQ ID NO: 14161 - DNA, 38 bp, Artificial Sequence
  Synthetic oligonucleotide
acaacgattaatggtgagcaggcgacggtattggctga

SEQ ID NO: 14162 - DNA, 38 bp, Artificial Sequence
  Synthetic oligonucleotide
accctgttgtctgacggcttagtgcaatatttttgtga

SEQ ID NO: 14163 - DNA, 34 bp, Artificial Sequence
  Synthetic oligonucleotide
accgtactcacggtagttcaaggtgggaactgta

SEQ ID NO: 14164 - DNA, 36 bp, Artificial Sequence
  Synthetic oligonucleotide
acgccgcacctatgacggacgcctcgaactgacgga

SEQ ID NO: 14165 - DNA, 36 bp, Artificial Sequence
  Synthetic oligonucleotide
acgggatgatgcatgtaaggcttggaaaacccctca

SEQ ID NO: 14166 - DNA, 37 bp, Artificial Sequence
  Synthetic oligonucleotide
acgtctgaggtagggagggtgctatgccgccataaga

SEQ ID NO: 14167 - DNA, 36 bp, Artificial Sequence
  Synthetic oligonucleotide
acgtgtaccaccggtatcctatatcgcttttgaata

SEQ ID NO: 14168 - DNA, 36 bp, Artificial Sequence
  Synthetic oligonucleotide
actgcggtacagcgggggctctagaaatcaatgtta

SEQ ID NO: 14169 - DNA, 38 bp, Artificial Sequence
  Synthetic oligonucleotide
agacctagacgtagggttgtgagcgtacacatggctga

SEQ ID NO: 14170 - DNA, 38 bp, Artificial Sequence
  Synthetic oligonucleotide
agccctgcatttaagacacggcaagctaaaccgcgtga

SEQ ID NO: 14171 - DNA, 37 bp, Artificial Sequence
  Synthetic oligonucleotide
agcctccggtggtttgtgcccgggtacaggtgttcga

SEQ ID NO: 14172 - DNA, 38 bp, Artificial Sequence
  Synthetic oligonucleotide
agggaccagctggttcccaagaaactaggtaccattga

SEQ ID NO: 14173 - DNA, 37 bp, Artificial Sequence
  Synthetic oligonucleotide
aggggttatactgccttcgcgctgtccggggacgaga

SEQ ID NO: 14174 - DNA, 37 bp, Artificial Sequence
  Synthetic oligonucleotide
aggtggacgagtgcacttccagcttacgaggccacga

SEQ ID NO: 14175 - DNA, 36 bp, Artificial Sequence
  Synthetic oligonucleotide
agtaccatggacaggttggctaatacgacactcgca

SEQ ID NO: 14176 - DNA, 35 bp, Artificial Sequence
  Synthetic oligonucleotide
agttagcagtactggaaaggactaccgttaaatct

SEQ ID NO: 14177 - DNA, 37 bp, Artificial Sequence
  Synthetic oligonucleotide
agttgaaccggtggtggactatctacgcgattgtcga

SEQ ID NO: 14178 - DNA, 38 bp, Artificial Sequence
  Synthetic oligonucleotide
atacgtgcgcgggataacagttgtatggtacgctttga

SEQ ID NO: 14179 - DNA, 35 bp, Artificial Sequence
  Synthetic oligonucleotide
ataggcgtctgctcacattcattaaacagcgactg

SEQ ID NO: 14180 - DNA, 37 bp, Artificial Sequence
  Synthetic oligonucleotide
atcatggtacttcaggacgtctagggactacgtaaga

SEQ ID NO: 14181 - DNA, 38 bp, Artificial Sequence
  Synthetic oligonucleotide
atgcacgcaagaaagtctatactgttacgggcatctga

SEQ ID NO: 14182 - DNA, 33 bp, Artificial Sequence
  Synthetic oligonucleotide
atggagaaatggcacgataatcggaggaaggcg

SEQ ID NO: 14183 - DNA, 36 bp, Artificial Sequence
  Synthetic oligonucleotide
atgtatcatgcaggtagaagactgaaaggaggtaga

SEQ ID NO: 14184 - DNA, 28 bp, Artificial Sequence
  Synthetic oligonucleotide
atgtcgccacctggccggttgtatcgga

SEQ ID NO: 14185 - DNA, 35 bp, Artificial Sequence
  Synthetic oligonucleotide
attgacgcgcggccattgactagcctcataccgaa

SEQ ID NO: 14186 - DNA, 38 bp, Artificial Sequence
  Synthetic oligonucleotide
attgtccaccggccaggctttgggattgtcccgtttga

SEQ ID NO: 14187 - DNA, 35 bp, Artificial Sequence
  Synthetic oligonucleotide
caatcacggacgattcacggatgaaattcgggtgc

SEQ ID NO: 14188 - DNA, 35 bp, Artificial Sequence
  Synthetic oligonucleotide
cacctgattgtctggcgtacatatcgcctctgatg

SEQ ID NO: 14189 - DNA, 38 bp, Artificial Sequence
  Synthetic oligonucleotide
cagtcagtgccccttagggcatggacgcggtatgctga

SEQ ID NO: 14190 - DNA, 37 bp, Artificial Sequence
  Synthetic oligonucleotide
ccaaggggggccgcccgagtattgcaggtgtaatgga

SEQ ID NO: 14191 - DNA, 37 bp, Artificial Sequence
  Synthetic oligonucleotide
cccctgtatcaaaaatactcgaggagggactgcagga

SEQ ID NO: 14192 - DNA, 35 bp, Artificial Sequence
  Synthetic oligonucleotide
ccgagacgtacgcgctcaaaaaagttgacgtccat

SEQ ID NO: 14193 - DNA, 36 bp, Artificial Sequence
  Synthetic oligonucleotide
ccggaggggtaccctttagtgaacagccttggtaca

SEQ ID NO: 14194 - DNA, 35 bp, Artificial Sequence
  Synthetic oligonucleotide
cgctactacacgtaatgctgggtgttactgccctc

SEQ ID NO: 14195 - DNA, 36 bp, Artificial Sequence
  Synthetic oligonucleotide
ctcccccgtcgctcggaaggcccggttcgtaggtta

SEQ ID NO: 14196 - DNA, 36 bp, Artificial Sequence
  Synthetic oligonucleotide
gaaaactcgatccctatagaagggatttacttcgga

SEQ ID NO: 14197 - DNA, 35 bp, Artificial Sequence
  Synthetic oligonucleotide
gaaacgatcgtccccagtaattgagtgggcgaatc

SEQ ID NO: 14198 - DNA, 38 bp, Artificial Sequence
  Synthetic oligonucleotide
gaaatactaccgaacaggtggagctggtttacgactga

SEQ ID NO: 14199 - DNA, 35 bp, Artificial Sequence
  Synthetic oligonucleotide
gaaggattcccgaccgttatttcggggcgcgggcc

SEQ ID NO: 14200 - DNA, 35 bp, Artificial Sequence
  Synthetic oligonucleotide
gaagtcagttttaatgcgtaaaagccacggccaat

SEQ ID NO: 14201 - DNA, 33 bp, Artificial Sequence
  Synthetic oligonucleotide
gacacgtgctgagcaggaatcagaggtgtatga

SEQ ID NO: 14202 - DNA, 37 bp, Artificial Sequence
  Synthetic oligonucleotide
gaccccccctccgacgctgctttgaacgttagttcga

SEQ ID NO: 14203 - DNA, 37 bp, Artificial Sequence
  Synthetic oligonucleotide
gactacattgaagtgcacgttttggttgtaaagtgga

SEQ ID NO: 14204 - DNA, 38 bp, Artificial Sequence
  Synthetic oligonucleotide
gacttggcccatgtattgcgagctttgggggtttctga

SEQ ID NO: 14205 - DNA, 36 bp, Artificial Sequence
  Synthetic oligonucleotide
gagatcttcaatctggagcatgatcggaagaaagga

SEQ ID NO: 14206 - DNA, 27 bp, Artificial Sequence
  Synthetic oligonucleotide
gaggtttaatcatgcggggatgtgctg

SEQ ID NO: 14207 - DNA, 36 bp, Artificial Sequence
  Synthetic oligonucleotide
gattctgggagtgctgaggtcccgttgcatacggaa

SEQ ID NO: 14208 - DNA, 37 bp, Artificial Sequence
  Synthetic oligonucleotide
gattgcgtagaaccaagcacatggcgacgtttcctga

SEQ ID NO: 14209 - DNA, 37 bp, Artificial Sequence
  Synthetic oligonucleotide
gcaatcactacatgtactgacgcgaggtcaactggga

SEQ ID NO: 14210 - DNA, 35 bp, Artificial Sequence
  Synthetic oligonucleotide
gcaattgggcaactacgattgtccgaccggcctgg

SEQ ID NO: 14211 - DNA, 37 bp, Artificial Sequence
  Synthetic oligonucleotide
gcataatcgtgctgtatacttgaccgatcccaagtga

SEQ ID NO: 14212 - DNA, 36 bp, Artificial Sequence
  Synthetic oligonucleotide
gccacccggacacgagttgatgcgggaaccgaaata

SEQ ID NO: 14213 - DNA, 36 bp, Artificial Sequence
  Synthetic oligonucleotide
gccatgcggatcgggtttagatggaggtggcttgaa

SEQ ID NO: 14214 - DNA, 37 bp, Artificial Sequence
  Synthetic oligonucleotide
gccgaggcatggtagatataggggtcagcatattgga

SEQ ID NO: 14215 - DNA, 36 bp, Artificial Sequence
  Synthetic oligonucleotide
gccgcctcccacgactgcacagatatcctatttgta

SEQ ID NO: 14216 - DNA, 36 bp, Artificial Sequence
  Synthetic oligonucleotide
gcctttaacaacaatctgccggagatgcatatacga

SEQ ID NO: 14217 - DNA, 36 bp, Artificial Sequence
  Synthetic oligonucleotide
gcgcaggatccctcccagtacggcatggacccgcga

SEQ ID NO: 14218 - DNA, 37 bp, Artificial Sequence
  Synthetic oligonucleotide
gcgcgataccctgcaattccgatgcacagtcgcccga

SEQ ID NO: 14219 - DNA, 35 bp, Artificial Sequence
  Synthetic oligonucleotide
gcggtcctgctccatgaggtagtttagtgtcgcct

SEQ ID NO: 14220 - DNA, 36 bp, Artificial Sequence
  Synthetic oligonucleotide
gcgtgaagtcctggtattatgaaggcgcgatgggta

SEQ ID NO: 14221 - DNA, 37 bp, Artificial Sequence
  Synthetic oligonucleotide
gctcacaaagacagcggtgagcattttatatgactga

SEQ ID NO: 14222 - DNA, 36 bp, Artificial Sequence
  Synthetic oligonucleotide
ggacgccagtctggaatgagataattaggctggtca

SEQ ID NO: 14223 - DNA, 36 bp, Artificial Sequence
  Synthetic oligonucleotide
ggagacctgaagctctggcgttatagtcaatacaaa

SEQ ID NO: 14224 - DNA, 35 bp, Artificial Sequence
  Synthetic oligonucleotide
ggagcgaggggtgctagattcattaatgggccatg

SEQ ID NO: 14225 - DNA, 38 bp, Artificial Sequence
  Synthetic oligonucleotide
ggctcatgcattgcatgtacaggtcgccccctccttga

SEQ ID NO: 14226 - DNA, 37 bp, Artificial Sequence
  Synthetic oligonucleotide
gggtaacggtgcgctgggctctgcttccattggatga

SEQ ID NO: 14227 - DNA, 36 bp, Artificial Sequence
  Synthetic oligonucleotide
gggttacgtgtattgcacgaggcattgtagctctta

SEQ ID NO: 14228 - DNA, 35 bp, Artificial Sequence
  Synthetic oligonucleotide
ggtagacgccagtgcttacaagtagtagcagtgtg

SEQ ID NO: 14229 - DNA, 37 bp, Artificial Sequence
  Synthetic oligonucleotide
ggtgtgcacctatccatcgcctgaagttggtccacga

SEQ ID NO: 14230 - DNA, 35 bp, Artificial Sequence
  Synthetic oligonucleotide
ggttgttccaccttgcccatacttaggagtctgga

SEQ ID NO: 14231 - DNA, 38 bp, Artificial Sequence
  Synthetic oligonucleotide
gtacatttcagatgaagtacatagcgagtgagagttga

SEQ ID NO: 14232 - DNA, 36 bp, Artificial Sequence
  Synthetic oligonucleotide
gtaggggggcgagtcttcggattttcgccgatggga

SEQ ID NO: 14233 - DNA, 35 bp, Artificial Sequence
  Synthetic oligonucleotide
gtcatgcgtagtcgggcttatgtggagaacgtcat

SEQ ID NO: 14234 - DNA, 36 bp, Artificial Sequence
  Synthetic oligonucleotide
gtgatatagttggggtgctccgctctcgccctacaa

SEQ ID NO: 14235 - DNA, 37 bp, Artificial Sequence
  Synthetic oligonucleotide
gtgatggttgatcaacgggccaattcattctacgtga

SEQ ID NO: 14236 - DNA, 37 bp, Artificial Sequence
  Synthetic oligonucleotide
gtgcttcataagccgacgttgtaggagtgtgagttga

SEQ ID NO: 14237 - DNA, 37 bp, Artificial Sequence
  Synthetic oligonucleotide
gttcagacctcctggtagaaccagtcaaccacttcga

SEQ ID NO: 14238 - DNA, 35 bp, Artificial Sequence
  Synthetic oligonucleotide
gttctggacgtaatgcgcacggaccttagtgagta

SEQ ID NO: 14239 - DNA, 37 bp, Artificial Sequence
  Synthetic oligonucleotide
gttgttccggattcagtccaattcaactacgttggga

SEQ ID NO: 14240 - DNA, 37 bp, Artificial Sequence
  Synthetic oligonucleotide
taagtcgtatatcaccagttctgcactgggtgttgga

SEQ ID NO: 14241 - DNA, 37 bp, Artificial Sequence
  Synthetic oligonucleotide
tacaagtacgacgcaattcggggtgggtcaaggtgga

SEQ ID NO: 14242 - DNA, 35 bp, Artificial Sequence
  Synthetic oligonucleotide
tacacggcctctgtgagaattttcctgtgcgagta

SEQ ID NO: 14243 - DNA, 36 bp, Artificial Sequence
  Synthetic oligonucleotide
tacccttggggatgggccccaacgataccacgtata

SEQ ID NO: 14244 - DNA, 36 bp, Artificial Sequence
  Synthetic oligonucleotide
tagccatatatgtagtagctggtactgcgtgcgcca

SEQ ID NO: 14245 - DNA, 36 bp, Artificial Sequence
  Synthetic oligonucleotide
tagccgcgaacaagccgcacaacgcgaacttaggaa

SEQ ID NO: 14246 - DNA, 36 bp, Artificial Sequence
  Synthetic oligonucleotide
tagctatcagcgcgcttgaggcttttttatttggca

SEQ ID NO: 14247 - DNA, 38 bp, Artificial Sequence
  Synthetic oligonucleotide
tagctgagccgcttaactatagaacgggacccccttga

SEQ ID NO: 14248 - DNA, 36 bp, Artificial Sequence
  Synthetic oligonucleotide
taggagggcatgtttaggcttaccgccgttgggtaa

SEQ ID NO: 14249 - DNA, 37 bp, Artificial Sequence
  Synthetic oligonucleotide
taggtctgtagcacgcccgattatgggagatggggga

SEQ ID NO: 14250 - DNA, 37 bp, Artificial Sequence
  Synthetic oligonucleotide
tataacgcgtgtgaggtgctggacgacagtcggttga

SEQ ID NO: 14251 - DNA, 35 bp, Artificial Sequence
  Synthetic oligonucleotide
tcaatcacggaactagatatgtagttaataggtgg

SEQ ID NO: 14252 - DNA, 37 bp, Artificial Sequence
  Synthetic oligonucleotide
tcacgcaatcgcgggaacctcaaatcaggcccattga

SEQ ID NO: 14253 - DNA, 38 bp, Artificial Sequence
  Synthetic oligonucleotide
tcacgtaagatttacaaagccttttccgagacgggtga

SEQ ID NO: 14254 - DNA, 37 bp, Artificial Sequence
  Synthetic oligonucleotide
tcatgcagggcgtacacttggcgttggtgccacggga

SEQ ID NO: 14255 - DNA, 36 bp, Artificial Sequence
  Synthetic oligonucleotide
tcatggaaatgatgccgtccggacaacttaagtgta

SEQ ID NO: 14256 - DNA, 37 bp, Artificial Sequence
  Synthetic oligonucleotide
tccaaaacgcgaagctatcgagttgttggaaatgaga

SEQ ID NO: 14257 - DNA, 38 bp, Artificial Sequence
  Synthetic oligonucleotide
tcctgaggaggcctccgtggtggagtgagctcttgtga

SEQ ID NO: 14258 - DNA, 38 bp, Artificial Sequence
  Synthetic oligonucleotide
tctagggtgcaatcgggatagcacgttaaactgcatga

SEQ ID NO: 14259 - DNA, 36 bp, Artificial Sequence
  Synthetic oligonucleotide
tctccgtggctacgacatacatgggatgggcgaaca

SEQ ID NO: 14260 - DNA, 35 bp, Artificial Sequence
  Synthetic oligonucleotide
tcttgccctgctgggactacgcgtattgatagagc

SEQ ID NO: 14261 - DNA, 36 bp, Artificial Sequence
  Synthetic oligonucleotide
tgagcgtcttctttacgttcaagggttgctatgcta

SEQ ID NO: 14262 - DNA, 36 bp, Artificial Sequence
  Synthetic oligonucleotide
tgctgactgcttcggtagaatgtatttgcgcatcca

SEQ ID NO: 14263 - DNA, 37 bp, Artificial Sequence
  Synthetic oligonucleotide
tggtcgatataacctaaaacggcaatgcctagtggga

SEQ ID NO: 14264 - DNA, 37 bp, Artificial Sequence
  Synthetic oligonucleotide
tgtacgtcccagctcgagtcgagggcgagggattaga

SEQ ID NO: 14265 - DNA, 37 bp, Artificial Sequence
  Synthetic oligonucleotide
tgtagcttaactgcatgcgaccaccacgttgagccga

SEQ ID NO: 14266 - DNA, 35 bp, Artificial Sequence
  Synthetic oligonucleotide
tgtcaatccctagcgatgtagcccctttacaagag

SEQ ID NO: 14267 - DNA, 38 bp, Artificial Sequence
  Synthetic oligonucleotide
tgtcaccgagttgcctaaggtggacgtaacggagctga

SEQ ID NO: 14268 - DNA, 38 bp, Artificial Sequence
  Synthetic oligonucleotide
tgtgaagctgactgatatcttagaaatcgggggactga

SEQ ID NO: 14269 - DNA, 37 bp, Artificial Sequence
  Synthetic oligonucleotide
ttcgtgataggtagtacgggtaggaacgtggagtaga

SEQ ID NO: 14270 - DNA, 37 bp, Artificial Sequence
  Synthetic oligonucleotide
ttgctggcacagacgaggaataggagggactcagtga

SEQ ID NO: 14271 - DNA, 37 bp, Artificial Sequence
  Synthetic oligonucleotide
ttgggagactcgaaatttatagtgaccaaatatcaga

SEQ ID NO: 14272 - DNA, 35 bp, Artificial Sequence
  Synthetic oligonucleotide
ttgtcagcttttgaccaggctaactatgtgcacga

SEQ ID NO: 14273 - DNA, 35 bp, Artificial Sequence
  Synthetic oligonucleotide
ttgtcagtcgtggtaatgtaaagcaagcgcccaac

SEQ ID NO: 14274 - DNA, 38 bp, Artificial Sequence
  Synthetic oligonucleotide
ttgtcgcgggtccgttgacatcgccacagccattgtga

SEQ ID NO: 14275 - DNA, 36 bp, Artificial Sequence
  Synthetic oligonucleotide
tttgaatccgagtgcttgtcattgagtaaaaaggaa

SEQ ID NO: 14276 - DNA, 38 bp, Artificial Sequence
  Synthetic oligonucleotide
gatgtcggttgggttattctcaagggaatatgtactga

SEQ ID NO: 14277 - DNA, 38 bp, Artificial Sequence
  Synthetic oligonucleotide
gttgagttgcgcccgactcggtctagcactgtccatga

SEQ ID NO: 14278 - DNA, 35 bp, Artificial Sequence
  Synthetic oligonucleotide
ttcgtaagtgaccgatgtccggcgtatccgagcga

SEQ ID NO: 14279 - DNA, 37 bp, Artificial Sequence
  Synthetic oligonucleotide
tcattgggttaacagctggtcgtggtggtttctccga

SEQ ID NO: 14280 - DNA, 36 bp, Artificial Sequence
  Synthetic oligonucleotide
acccagcaaggagttaagcgatgtatggataactaa

SEQ ID NO: 14281 - DNA, 35 bp, Artificial Sequence
  Synthetic oligonucleotide
acgtgatcgtcagtaacgcgagacaattgaatgag

SEQ ID NO: 14282 - DNA, 37 bp, Artificial Sequence
  Synthetic oligonucleotide
acttccgcattacatatgcacgttgtagtgcagtcga

SEQ ID NO: 14283 - DNA, 36 bp, Artificial Sequence
  Synthetic oligonucleotide
ccctcgtttgagtaaaggagtgactttgtctgcatg

SEQ ID NO: 14284 - DNA, 35 bp, Artificial Sequence
  Synthetic oligonucleotide
cctgggtcgaatcccggctagtatcgagctagctg

SEQ ID NO: 14285 - DNA, 35 bp, Artificial Sequence
  Synthetic oligonucleotide
gagtttccgacggttaaccaacgtcctattggtgc

SEQ ID NO: 14286 - DNA, 35 bp, Artificial Sequence
  Synthetic oligonucleotide
gcccggggatttagttagggtaagggcttacaccg

SEQ ID NO: 14287 - DNA, 36 bp, Artificial Sequence
  Synthetic oligonucleotide
gtgacttcgtcatttcggttctgattgtagtacgga

SEQ ID NO: 14288 - DNA, 35 bp, Artificial Sequence
  Synthetic oligonucleotide
tccggtttatcctcggactctggctgaaggtaggg

SEQ ID NO: 14289 - DNA, 35 bp, Artificial Sequence
  Synthetic oligonucleotide
tgtttgggcgtcaaacacgcgactggctgcaaatg

SEQ ID NO: 14290 - DNA, 38 bp, Artificial Sequence
  Synthetic oligonucleotide
tgcccgcgtcgtttagtactagtcttcgatgcagttga

SEQ ID NO: 14291 - DNA, 37 bp, Artificial Sequence
  Synthetic oligonucleotide
aatgacatttggcaaacaatgagcggcccattggtga

SEQ ID NO: 14292 - DNA, 38 bp, Artificial Sequence
  Synthetic oligonucleotide
acccaaaagtagctgatgcagcatagtagctccggtga

SEQ ID NO: 14293 - DNA, 38 bp, Artificial Sequence
  Synthetic oligonucleotide
acgtgcacatcgacgcatccgatgcgcattccctttga

SEQ ID NO: 14294 - DNA, 35 bp, Artificial Sequence
  Synthetic oligonucleotide
actcaagggagcattgattttaggcggtgggctta

SEQ ID NO: 14295 - DNA, 38 bp, Artificial Sequence
  Synthetic oligonucleotide
actgacagggagccagttgcaaacttgcctattcttga

SEQ ID NO: 14296 - DNA, 35 bp, Artificial Sequence
  Synthetic oligonucleotide
agcggtggacaccatgggccattactttgggtact

SEQ ID NO: 14297 - DNA, 36 bp, Artificial Sequence
  Synthetic oligonucleotide
agggtgaccgtctgacctcttttaaaatgtgggcga

SEQ ID NO: 14298 - DNA, 35 bp, Artificial Sequence
  Synthetic oligonucleotide
atctgtctatcgccggaaccacgtcgcatccttga

SEQ ID NO: 14299 - DNA, 37 bp, Artificial Sequence
  Synthetic oligonucleotide
catcatacgtcagtgcgatcctggtcgctttgctaga

SEQ ID NO: 14300 - DNA, 36 bp, Artificial Sequence
  Synthetic oligonucleotide
ccgacggtatctgatttcagagtggacatgcgatta

SEQ ID NO: 14301 - DNA, 35 bp, Artificial Sequence
  Synthetic oligonucleotide
ccggccctcttcgggctaagcctctacgtagtatg

SEQ ID NO: 14302 - DNA, 36 bp, Artificial Sequence
  Synthetic oligonucleotide
gaacttagtcgcccggagaaatagagaaaaacgtga

SEQ ID NO: 14303 - DNA, 35 bp, Artificial Sequence
  Synthetic oligonucleotide
gaagggggtgacgtggtgcaggacgagctctggtt

SEQ ID NO: 14304 - DNA, 37 bp, Artificial Sequence
  Synthetic oligonucleotide
gccacacgagtcgtactggacttgatttgagtcagga

SEQ ID NO: 14305 - DNA, 38 bp, Artificial Sequence
  Synthetic oligonucleotide
gccttgagcttggcatcattggattgcactggccgtga

SEQ ID NO: 14306 - DNA, 35 bp, Artificial Sequence
  Synthetic oligonucleotide
gctcaggtcagcaaggtaacgagtgagttgaggta

SEQ ID NO: 14307 - DNA, 37 bp, Artificial Sequence
  Synthetic oligonucleotide
gctgggatacggcgtgaatgttactttaagcaacaga

SEQ ID NO: 14308 - DNA, 35 bp, Artificial Sequence
  Synthetic oligonucleotide
ggaacgctgcgggcctggaactatggctatagact

SEQ ID NO: 14309 - DNA, 37 bp, Artificial Sequence
  Synthetic oligonucleotide
gggtcaagccttttaagacattgcagtccacttaaga

SEQ ID NO: 14310 - DNA, 37 bp, Artificial Sequence
  Synthetic oligonucleotide
gtactcattcggttacataaagttgttgcctcctgga

SEQ ID NO: 14311 - DNA, 36 bp, Artificial Sequence
  Synthetic oligonucleotide
gtcggttggattgtgaggggtgaccatttgggggta

SEQ ID NO: 14312 - DNA, 36 bp, Artificial Sequence
  Synthetic oligonucleotide
gtggccaacacgataagttgcgtcctaggggggcga

SEQ ID NO: 14313 - DNA, 37 bp, Artificial Sequence
  Synthetic oligonucleotide
tacaccgaagagaggaaccgagcctttgccgtcgaga

SEQ ID NO: 14314 - DNA, 35 bp, Artificial Sequence
  Synthetic oligonucleotide
tcacaccactgatggacaagtcccgcggtcaggag

SEQ ID NO: 14315 - DNA, 37 bp, Artificial Sequence
  Synthetic oligonucleotide
tcatgtgaggacaaaatggcataatgactagaggcga

SEQ ID NO: 14316 - DNA, 37 bp, Artificial Sequence
  Synthetic oligonucleotide
tcgtatcgcggttgtttcaaagcatataccgtggtga

SEQ ID NO: 14317 - DNA, 37 bp, Artificial Sequence
  Synthetic oligonucleotide
tctgtacatacggaggtgctcgggttccttacggtga

SEQ ID NO: 14318 - DNA, 35 bp, Artificial Sequence
  Synthetic oligonucleotide
ttcccgacaaggtgggaaatttgactttccgcggt

SEQ ID NO: 14319 - DNA, 38 bp, Artificial Sequence
  Synthetic oligonucleotide
ttcgcactttcaggtttagcagttcgaacagtctctga

SEQ ID NO: 14320 - DNA, 38 bp, Artificial Sequence
  Synthetic oligonucleotide
ttggctaggcgaattccccattccctcgaaacgtttga

SEQ ID NO: 14321 - DNA, 38 bp, Artificial Sequence
  Synthetic oligonucleotide
tttcagcacgtaaagcgttatggtgaacaaattagtga

SEQ ID NO: 14322 - DNA, 37 bp, Artificial Sequence
  Synthetic oligonucleotide
ttttgccatcttagaaaggcttaagaactgaccatga

SEQ ID NO: 14323 - DNA, 36 bp, Artificial Sequence
  Synthetic oligonucleotide
gcagtctgagctcccgcatggttataaagaatggga

SEQ ID NO: 14324 - DNA, 37 bp, Artificial Sequence
  Synthetic oligonucleotide
gccctgaggtggaatacagcgatcccattgggcaaga

SEQ ID NO: 14325 - DNA, 37 bp, Artificial Sequence
  Synthetic oligonucleotide
gtaatcggaacaaggttggactggatagaggcgtaga

SEQ ID NO: 14326 - DNA, 35 bp, Artificial Sequence
  Synthetic oligonucleotide
agtggagaacctccacgctcagggagcggaacgcc

SEQ ID NO: 14327 - DNA, 35 bp, Artificial Sequence
  Synthetic oligonucleotide
agttgttctagtctgattacgaactctgcgttccg

SEQ ID NO: 14328 - DNA, 37 bp, Artificial Sequence
  Synthetic oligonucleotide
gtcgagacgtagtttaacaccagacacattctggaga

SEQ ID NO: 14329 - DNA, 38 bp, Artificial Sequence
  Synthetic oligonucleotide
gttatctggcgactgtagggagttcacggacaaactga

SEQ ID NO: 14330 - DNA, 35 bp, Artificial Sequence
  Synthetic oligonucleotide
ttcataggctggtctaactagcccggaaagaaagt

SEQ ID NO: 14331 - DNA, 36 bp, Artificial Sequence
  Synthetic oligonucleotide
ttggacactcgcatacatggggaggtcacatgccca

SEQ ID NO: 14332 - DNA, 38 bp, Artificial Sequence
  Synthetic oligonucleotide
taatccgcccggatgggccggacaggtgctgggcttga

SEQ ID NO: 14333 - DNA, 35 bp, Artificial Sequence
  Synthetic oligonucleotide
tggaaatgcaggagtttcttgcacccccgtggcac

SEQ ID NO: 14334 - DNA, 35 bp, Artificial Sequence
  Synthetic oligonucleotide
aatcgcacggggttctggtatcccaccgaggtatg

SEQ ID NO: 14335 - DNA, 37 bp, Artificial Sequence
  Synthetic oligonucleotide
acgtatcttcgcgtggtaggtatatagatagcatttg

SEQ ID NO: 14336 - DNA, 35 bp, Artificial Sequence
  Synthetic oligonucleotide
agatagtgttgggtaacaacactcgttgagcgggg

SEQ ID NO: 14337 - DNA, 38 bp, Artificial Sequence
  Synthetic oligonucleotide
atgcggtatccctacctgagacacctgctgtagcatga

SEQ ID NO: 14338 - DNA, 35 bp, Artificial Sequence
  Synthetic oligonucleotide
gaagaagccgtgagacgattctgggattgtattac

SEQ ID NO: 14339 - DNA, 35 bp, Artificial Sequence
  Synthetic oligonucleotide
gaagctgacttcacatatgcgaatcggttggcatt

SEQ ID NO: 14340 - DNA, 36 bp, Artificial Sequence
  Synthetic oligonucleotide
gaggaaggtacatactagtggtgctgtttcttgaca

SEQ ID NO: 14341 - DNA, 38 bp, Artificial Sequence
  Synthetic oligonucleotide
gatatgtacatctgcaagtctgaaggtttctgggggga

SEQ ID NO: 14342 - DNA, 35 bp, Artificial Sequence
  Synthetic oligonucleotide
gcctggtatagcgcgagggtatatcctgattttgt

SEQ ID NO: 14343 - DNA, 37 bp, Artificial Sequence
  Synthetic oligonucleotide
gctaaggttgatatcgaccactgttagcagtggggga

SEQ ID NO: 14344 - DNA, 35 bp, Artificial Sequence
  Synthetic oligonucleotide
ggacgtaagtccccttaactaggtatgcgatccgc

SEQ ID NO: 14345 - DNA, 35 bp, Artificial Sequence
  Synthetic oligonucleotide
ggattaacgcgagattgaccgagtcccgcggtatc

SEQ ID NO: 14346 - DNA, 35 bp, Artificial Sequence
  Synthetic oligonucleotide
ggtgaacactgcatacgaacgatgtgtgcgtaagc

SEQ ID NO: 14347 - DNA, 38 bp, Artificial Sequence
  Synthetic oligonucleotide
gtacgtacagtaatgcgattctttgctacgtgatatga

SEQ ID NO: 14348 - DNA, 37 bp, Artificial Sequence
  Synthetic oligonucleotide
gtacttgccgcattttgaagactgtgacggtcatgga

SEQ ID NO: 14349 - DNA, 37 bp, Artificial Sequence
  Synthetic oligonucleotide
gtcattttcgtaccgctgtctctggtacactgggcga

SEQ ID NO: 14350 - DNA, 37 bp, Artificial Sequence
  Synthetic oligonucleotide
gtcgtcatattgtaaaatacgatatgcacaaacggga

SEQ ID NO: 14351 - DNA, 37 bp, Artificial Sequence
  Synthetic oligonucleotide
tatcatgccccggagtatagtcgaatacagtggccga

SEQ ID NO: 14352 - DNA, 36 bp, Artificial Sequence
  Synthetic oligonucleotide
tgacatcaagaaggaactccatgatcgttgcgtgta

SEQ ID NO: 14353 - DNA, 38 bp, Artificial Sequence
  Synthetic oligonucleotide
tggttcggaaccaacgagaggttatgttgtctgtttga

SEQ ID NO: 14354 - DNA, 38 bp, Artificial Sequence
  Synthetic oligonucleotide
ttctatcacgatagactagacgtatgagttggtcatga

SEQ ID NO: 14355 - DNA, 38 bp, Artificial Sequence
  Synthetic oligonucleotide
atcatgcgttaactgcgataccgtttttgtcgtactga

SEQ ID NO: 14356 - DNA, 35 bp, Artificial Sequence
  Synthetic oligonucleotide
agtcgatacgattatcggcgactgagtagcactgg

SEQ ID NO: 14357 - DNA, 35 bp, Artificial Sequence
  Synthetic oligonucleotide
atccgagaagtcgtaggacgtgggtggggatacgt

SEQ ID NO: 14358 - DNA, 35 bp, Artificial Sequence
  Synthetic oligonucleotide
ggtcgcgcaggcatgtgcgataatgaccaagaggc

SEQ ID NO: 14359 - DNA, 38 bp, Artificial Sequence
  Synthetic oligonucleotide
gtcaggcatactggttgattgaagaagtgcggtgctga

SEQ ID NO: 14360 - DNA, 37 bp, Artificial Sequence
  Synthetic oligonucleotide
aaaatccggtggtcacgttattgataattcctatgga

SEQ ID NO: 14361 - DNA, 38 bp, Artificial Sequence
  Synthetic oligonucleotide
aaacgtcgtgacgggggaccagtgctcttctttagtga

SEQ ID NO: 14362 - DNA, 36 bp, Artificial Sequence
  Synthetic oligonucleotide
aaagttcttgcgccagaatcattagagcctgtaaga

SEQ ID NO: 14363 - DNA, 36 bp, Artificial Sequence
  Synthetic oligonucleotide
aacactcagtgattaaaaggtagcctggttgcagta

SEQ ID NO: 14364 - DNA, 38 bp, Artificial Sequence
  Synthetic oligonucleotide
aaccaagaaacgactgctgaatttgtgcgcgacagtga

SEQ ID NO: 14365 - DNA, 37 bp, Artificial Sequence
  Synthetic oligonucleotide
aaggtgccgaattctatgtactgcagaccaagtagga

SEQ ID NO: 14366 - DNA, 35 bp, Artificial Sequence
  Synthetic oligonucleotide
aatattcaccagggctatcactggagtttatacgt

SEQ ID NO: 14367 - DNA, 38 bp, Artificial Sequence
  Synthetic oligonucleotide
aatgcctagcactactacattgcacgagacttggatga

SEQ ID NO: 14368 - DNA, 36 bp, Artificial Sequence
  Synthetic oligonucleotide
acaagagcaagccgtagcgcgtactagaaaaatgga

SEQ ID NO: 14369 - DNA, 37 bp, Artificial Sequence
  Synthetic oligonucleotide
acacatccccggtggtggcctttgtagaaaatgcaga

SEQ ID NO: 14370 - DNA, 37 bp, Artificial Sequence
  Synthetic oligonucleotide
accataggtctatcttgtggggagccgcatggggcga

SEQ ID NO: 14371 - DNA, 35 bp, Artificial Sequence
  Synthetic oligonucleotide
accattcgcatctcgcagtccaacgcgtatccccg

SEQ ID NO: 14372 - DNA, 36 bp, Artificial Sequence
  Synthetic oligonucleotide
accccgggtggtcggtttctatcagaagatagagga

SEQ ID NO: 14373 - DNA, 36 bp, Artificial Sequence
  Synthetic oligonucleotide
accgctttgtggagttgcacctcatttggacataga

SEQ ID NO: 14374 - DNA, 37 bp, Artificial Sequence
  Synthetic oligonucleotide
acgagcagatggactggttaccgtggcttgctttgga

SEQ ID NO: 14375 - DNA, 37 bp, Artificial Sequence
  Synthetic oligonucleotide
acgcaggagcacaattgcgtgactgcttagacgctga

SEQ ID NO: 14376 - DNA, 35 bp, Artificial Sequence
  Synthetic oligonucleotide
acgcggtcgggcaatattccccgaatccttgagcg

SEQ ID NO: 14377 - DNA, 36 bp, Artificial Sequence
  Synthetic oligonucleotide
acggacaaacggcgttttgtagactgctcatctgta

SEQ ID NO: 14378 - DNA, 38 bp, Artificial Sequence
  Synthetic oligonucleotide
acggtggaagacattttaccataccagagccgtactga

SEQ ID NO: 14379 - DNA, 37 bp, Artificial Sequence
  Synthetic oligonucleotide
agctgggcatgtcctacgaagcatcagtaatatggga

SEQ ID NO: 14380 - DNA, 35 bp, Artificial Sequence
  Synthetic oligonucleotide
agtgcctgccgcagtgcgaaccattttggtctaga

SEQ ID NO: 14381 - DNA, 38 bp, Artificial Sequence
  Synthetic oligonucleotide
atacccgtcgtataagacgtagtgtagggagttactga

SEQ ID NO: 14382 - DNA, 37 bp, Artificial Sequence
  Synthetic oligonucleotide
ataggagacggacgcttttgttctggaagagaaatga

SEQ ID NO: 14383 - DNA, 36 bp, Artificial Sequence
  Synthetic oligonucleotide
atcctgcaggtgcgggccgttaccttaagcatgtga

SEQ ID NO: 14384 - DNA, 37 bp, Artificial Sequence
  Synthetic oligonucleotide
atcgagcgctcctttgtcgaaaacagccgaaacggga

SEQ ID NO: 14385 - DNA, 35 bp, Artificial Sequence
  Synthetic oligonucleotide
atgagaccctgcaaggtttaagttggcattaattt

SEQ ID NO: 14386 - DNA, 36 bp, Artificial Sequence
  Synthetic oligonucleotide
atgtagtatctccggacctagtgtaagccggttcca

SEQ ID NO: 14387 - DNA, 38 bp, Artificial Sequence
  Synthetic oligonucleotide
attcgtaccatgtgagtcaatacttacttccctactga

SEQ ID NO: 14388 - DNA, 36 bp, Artificial Sequence
  Synthetic oligonucleotide
catagcggatcctaggtggaatggacggagcactaa

SEQ ID NO: 14389 - DNA, 37 bp, Artificial Sequence
  Synthetic oligonucleotide
ccggaggggattgcgaaaccttctgacgagatcggga

SEQ ID NO: 14390 - DNA, 37 bp, Artificial Sequence
  Synthetic oligonucleotide
gaacgtactatggattacaatagtaacttgtcgagga

SEQ ID NO: 14391 - DNA, 37 bp, Artificial Sequence
  Synthetic oligonucleotide
gacaaacagagtctgcggatatgggctaggtcgccga

SEQ ID NO: 14392 - DNA, 35 bp, Artificial Sequence
  Synthetic oligonucleotide
gacaacgggcctgatctgttgaacgacgctataat

SEQ ID NO: 14393 - DNA, 36 bp, Artificial Sequence
  Synthetic oligonucleotide
gacgttatgaaggatcgttctatggcgccattggta

SEQ ID NO: 14394 - DNA, 38 bp, Artificial Sequence
  Synthetic oligonucleotide
gattaagccagttttgcgcgccagtcttgtttcactga

SEQ ID NO: 14395 - DNA, 37 bp, Artificial Sequence
  Synthetic oligonucleotide
gcaccacaggcggagtgatttgaaattgctctcgtga

SEQ ID NO: 14396 - DNA, 38 bp, Artificial Sequence
  Synthetic oligonucleotide
gctgaagtacgtctgggttacaatttatcgttctttga

SEQ ID NO: 14397 - DNA, 38 bp, Artificial Sequence
  Synthetic oligonucleotide
ggaggactgcctgattggtgggtcggggtttaaggtga

SEQ ID NO: 14398 - DNA, 35 bp, Artificial Sequence
  Synthetic oligonucleotide
ggtaccaatcggtgtcatgtagagtcctgacgggg

SEQ ID NO: 14399 - DNA, 38 bp, Artificial Sequence
  Synthetic oligonucleotide
ggtcatgttaccttgtggaacgtcatcggtcccgatga

SEQ ID NO: 14400 - DNA, 38 bp, Artificial Sequence
  Synthetic oligonucleotide
ggtcgattgaggccggtcctctatgcgtgaattgctga

SEQ ID NO: 14401 - DNA, 38 bp, Artificial Sequence
  Synthetic oligonucleotide
ggtgacgtatgtggcctcaccgaggcatatgcgtatga

SEQ ID NO: 14402 - DNA, 37 bp, Artificial Sequence
  Synthetic oligonucleotide
ggtgtagattgcttcagaaaagcttggaacttagaga

SEQ ID NO: 14403 - DNA, 35 bp, Artificial Sequence
  Synthetic oligonucleotide
ggttagaagcactctgcgggcatgagttttcaaac

SEQ ID NO: 14404 - DNA, 37 bp, Artificial Sequence
  Synthetic oligonucleotide
ggttagtactagtgacgagatgggtctataatggcga

SEQ ID NO: 14405 - DNA, 35 bp, Artificial Sequence
  Synthetic oligonucleotide
gtagagtccccgagctacatgcggacttggctctc

SEQ ID NO: 14406 - DNA, 36 bp, Artificial Sequence
  Synthetic oligonucleotide
gtgagtcaaatagctacgaaatataccttcgccaga

SEQ ID NO: 14407 - DNA, 35 bp, Artificial Sequence
  Synthetic oligonucleotide
gtgcaaggactggacttacttttgctcgaactgcg

SEQ ID NO: 14408 - DNA, 36 bp, Artificial Sequence
  Synthetic oligonucleotide
gtttcgaattggcgaggccatacagggccgtaacga

SEQ ID NO: 14409 - DNA, 38 bp, Artificial Sequence
  Synthetic oligonucleotide
tacgtcgatggacttgccgattgagcatcaaggcatga

SEQ ID NO: 14410 - DNA, 35 bp, Artificial Sequence
  Synthetic oligonucleotide
tatgatctgcagggggcccgtgctagggcatgcac

SEQ ID NO: 14411 - DNA, 36 bp, Artificial Sequence
  Synthetic oligonucleotide
tcaacgtgggtttgtctgctgtactgccggactata

SEQ ID NO: 14412 - DNA, 36 bp, Artificial Sequence
  Synthetic oligonucleotide
tccttccatattgctgcgggctattgctactggtca

SEQ ID NO: 14413 - DNA, 35 bp, Artificial Sequence
  Synthetic oligonucleotide
tcgagagaatgtgacaacgcattaggctgggcata

SEQ ID NO: 14414 - DNA, 38 bp, Artificial Sequence
  Synthetic oligonucleotide
tcttacgcactgaagcgatgaaggtccgtgaggattga

SEQ ID NO: 14415 - DNA, 35 bp, Artificial Sequence
  Synthetic oligonucleotide
tgaacgacggtgggagagtttgattccggggccat

SEQ ID NO: 14416 - DNA, 38 bp, Artificial Sequence
  Synthetic oligonucleotide
tgaccccgatcagttatctgctatggtcccgtgggtga

SEQ ID NO: 14417 - DNA, 38 bp, Artificial Sequence
  Synthetic oligonucleotide
tgagttcaaggcaacttgggattagtcgtgggacgtga

SEQ ID NO: 14418 - DNA, 35 bp, Artificial Sequence
  Synthetic oligonucleotide
tgcaaagcatgcaagcgtgttaggtgggaaattat

SEQ ID NO: 14419 - DNA, 38 bp, Artificial Sequence
  Synthetic oligonucleotide
tgcttaggtcaggaaccaaaagtgcctgagcaccttga

SEQ ID NO: 14420 - DNA, 36 bp, Artificial Sequence
  Synthetic oligonucleotide
tggaaagttgctgcgttagacgactggacaagcgta

SEQ ID NO: 14421 - DNA, 34 bp, Artificial Sequence
  Synthetic oligonucleotide
tgtgacggtcgctacatctttggtctagatgtaa

SEQ ID NO: 14422 - DNA, 35 bp, Artificial Sequence
  Synthetic oligonucleotide
ttaaggtcctaggccaagaggccttctccgccgtc

SEQ ID NO: 14423 - DNA, 35 bp, Artificial Sequence
  Synthetic oligonucleotide
ttacaaacgaagctagcactggggaagatattcgg

SEQ ID NO: 14424 - DNA, 35 bp, Artificial Sequence
  Synthetic oligonucleotide
ttcacctatcgtaccggtctgtactgccgtccgtc

SEQ ID NO: 14425 - DNA, 37 bp, Artificial Sequence
  Synthetic oligonucleotide
ttccgggtaagtactccgggcgaaagtattgcgcgga

SEQ ID NO: 14426 - DNA, 37 bp, Artificial Sequence
  Synthetic oligonucleotide
ttgagttcagccatgcaggtttccggaatagtaatga

SEQ ID NO: 14427 - DNA, 35 bp, Artificial Sequence
  Synthetic oligonucleotide
ttgcagtcggggatattggggaggtacttaatagg

SEQ ID NO: 14428 - DNA, 38 bp, Artificial Sequence
  Synthetic oligonucleotide
ttgcctcgtctcagattcgaagatggggtcaagcatga

SEQ ID NO: 14429 - DNA, 37 bp, Artificial Sequence
  Synthetic oligonucleotide
ttggacgggtcacccagttgcgggtcatattaggcga

SEQ ID NO: 14430 - DNA, 35 bp, Artificial Sequence
  Synthetic oligonucleotide
tttccggggtattaggaacacatgcacatccgtgg

SEQ ID NO: 14431 - DNA, 36 bp, Artificial Sequence
  Synthetic oligonucleotide
tttcggcccacagccgtggaagggaaggtcatggta

SEQ ID NO: 14432 - DNA, 36 bp, Artificial Sequence
  Synthetic oligonucleotide
ggtggacggagtcgacgtactatggaatgttaaaca

SEQ ID NO: 14433 - DNA, 37 bp, Artificial Sequence
  Synthetic oligonucleotide
ttcagagtcctatgaaaccaaggaaacgtttgggaga

SEQ ID NO: 14434 - DNA, 37 bp, Artificial Sequence
  Synthetic oligonucleotide
actaaatacaccgaatgcgcggatcacatgaatggga

SEQ ID NO: 14435 - DNA, 35 bp, Artificial Sequence
  Synthetic oligonucleotide
agcccacgtattatcgcgatagcgggccgatcatg

SEQ ID NO: 14436 - DNA, 36 bp, Artificial Sequence
  Synthetic oligonucleotide
agggagatttgccgcgtactgggcgcaatgcggtta

SEQ ID NO: 14437 - DNA, 37 bp, Artificial Sequence
  Synthetic oligonucleotide
atacgtgcacgcccaaacgtattgcactgtcgcacga

SEQ ID NO: 14438 - DNA, 38 bp, Artificial Sequence
  Synthetic oligonucleotide
atggtccaactttcaggggtgatcggtgaagtcgctga

SEQ ID NO: 14439 - DNA, 37 bp, Artificial Sequence
  Synthetic oligonucleotide
ccggggaacctcctcgtacattagatagggtcttaga

SEQ ID NO: 14440 - DNA, 38 bp, Artificial Sequence
  Synthetic oligonucleotide
gcatacgctggataatggtaacctctaacgcaccctga

SEQ ID NO: 14441 - DNA, 37 bp, Artificial Sequence
  Synthetic oligonucleotide
gtggacagtaggatggaacgaatgctaaatagaatga

SEQ ID NO: 14442 - DNA, 36 bp, Artificial Sequence
  Synthetic oligonucleotide
tccgcgggagaacggaagtcgtgcaaataacggcta

SEQ ID NO: 14443 - DNA, 38 bp, Artificial Sequence
  Synthetic oligonucleotide
actgagccattgtcgattcacgtgtcctgcaatgatga

SEQ ID NO: 14444 - DNA, 38 bp, Artificial Sequence
  Synthetic oligonucleotide
gcaaccatgaacttccggaggtctggcatttgttctga

SEQ ID NO: 14445 - DNA, 38 bp, Artificial Sequence
  Synthetic oligonucleotide
gcactgtgagacagtggtctataagcacgttactgtga

SEQ ID NO: 14446 - DNA, 36 bp, Artificial Sequence
  Synthetic oligonucleotide
tgattttgtccgcacgggttgagtcatgaaagggta

SEQ ID NO: 14447 - DNA, 38 bp, Artificial Sequence
  Synthetic oligonucleotide
aaaggtaggttttaagtacgccaggtcattgcgcttga

SEQ ID NO: 14448 - DNA, 38 bp, Artificial Sequence
  Synthetic oligonucleotide
aacagtgattcaggcgtcccgtacgtaatggaaagtga

SEQ ID NO: 14449 - DNA, 36 bp, Artificial Sequence
  Synthetic oligonucleotide
aacctgcaaagcaggtcgactgcagggccatgggta

SEQ ID NO: 14450 - DNA, 35 bp, Artificial Sequence
  Synthetic oligonucleotide
acgaaacgccttggagttctccaaagtttctgctc

SEQ ID NO: 14451 - DNA, 38 bp, Artificial Sequence
  Synthetic oligonucleotide
actgttgttaaacgaactaggattgttattttatatga

SEQ ID NO: 14452 - DNA, 35 bp, Artificial Sequence
  Synthetic oligonucleotide
attgacacctccattctatgggttaatcgggtctg

SEQ ID NO: 14453 - DNA, 35 bp, Artificial Sequence
  Synthetic oligonucleotide
gaagccctcaaaagatacggtctagtctcggaggt

SEQ ID NO: 14454 - DNA, 35 bp, Artificial Sequence
  Synthetic oligonucleotide
gactcaacccttcaggtcaccccccgacttccgcc

SEQ ID NO: 14455 - DNA, 38 bp, Artificial Sequence
  Synthetic oligonucleotide
gagtcatagggggggtaatagacctgatgcatgagtga

SEQ ID NO: 14456 - DNA, 35 bp, Artificial Sequence
  Synthetic oligonucleotide
gagttacgccactatgtgataaatcctttcggaga

SEQ ID NO: 14457 - DNA, 37 bp, Artificial Sequence
  Synthetic oligonucleotide
gataggtcgcaggtaatggagggctgaaattatagga

SEQ ID NO: 14458 - DNA, 35 bp, Artificial Sequence
  Synthetic oligonucleotide
gcgatccaagtggcgacgaggttaaattccttagg

SEQ ID NO: 14459 - DNA, 37 bp, Artificial Sequence
  Synthetic oligonucleotide
gcgcccagggacatataaagcgacaccgctctataga

SEQ ID NO: 14460 - DNA, 36 bp, Artificial Sequence
  Synthetic oligonucleotide
gctatggacatgcgaggaactggcatgtgaaggcga

SEQ ID NO: 14461 - DNA, 35 bp, Artificial Sequence
  Synthetic oligonucleotide
ggagaaacaggtgtgacattagtcggtgacgacgt

SEQ ID NO: 14462 - DNA, 37 bp, Artificial Sequence
  Synthetic oligonucleotide
ggtgaacggaacggtagggatacggctacgactgaga

SEQ ID NO: 14463 - DNA, 36 bp, Artificial Sequence
  Synthetic oligonucleotide
gtgcggatactgggtcgcttgcagtaccaatttgaa

SEQ ID NO: 14464 - DNA, 36 bp, Artificial Sequence
  Synthetic oligonucleotide
gtttgtgcgtttacggggtaattagtacagcaggta

SEQ ID NO: 14465 - DNA, 35 bp, Artificial Sequence
  Synthetic oligonucleotide
taggcgacgaacactctgtaaaagtgaggtctgcg

SEQ ID NO: 14466 - DNA, 38 bp, Artificial Sequence
  Synthetic oligonucleotide
tccgttggaagtatggtggataaacagacttgtgttga

SEQ ID NO: 14467 - DNA, 35 bp, Artificial Sequence
  Synthetic oligonucleotide
tgtacgaggctgcaaggctctgatgctcagatatt

SEQ ID NO: 14468 - DNA, 35 bp, Artificial Sequence
  Synthetic oligonucleotide
ttgggggtgtttgaaagcgtgtgataggcttaagt

SEQ ID NO: 14469 - DNA, 35 bp, Artificial Sequence
  Synthetic oligonucleotide
tttcgtctcgcgtaacggatagtagctcatcagtc

SEQ ID NO: 14470 - DNA, 35 bp, Artificial Sequence
  Synthetic oligonucleotide
gctgtgatcgctgcaatcaattcgcgacatgatac

SEQ ID NO: 14471 - DNA, 37 bp, Artificial Sequence
  Synthetic oligonucleotide
gtacctacgagattgcggtgagggggaatttcgcaga

SEQ ID NO: 14472 - DNA, 37 bp, Artificial Sequence
  Synthetic oligonucleotide
tgtacaatcggtcgtagtgaacagttaggtggtcgga

SEQ ID NO: 14473 - DNA, 35 bp, Artificial Sequence
  Synthetic oligonucleotide
gcggtacaagtttatctaacgtagctcacgtggga

SEQ ID NO: 14474 - DNA, 37 bp, Artificial Sequence
  Synthetic oligonucleotide
ggatgcgtaagtcgcgagtctgtgcattccgttacga

SEQ ID NO: 14475 - DNA, 36 bp, Artificial Sequence
  Synthetic oligonucleotide
aaaagagcctgacgcagacctcgcttaagcgattta

SEQ ID NO: 14476 - DNA, 38 bp, Artificial Sequence
  Synthetic oligonucleotide
acagctgcaagagcacatcgtacgtggtgcatgggtga

SEQ ID NO: 14477 - DNA, 36 bp, Artificial Sequence
  Synthetic oligonucleotide
accgtcgcgcagacgaatggaagtgcggcctcttga

SEQ ID NO: 14478 - DNA, 38 bp, Artificial Sequence
  Synthetic oligonucleotide
aggaacgtacggactttgggcggtgggtaccaaggtga

SEQ ID NO: 14479 - DNA, 36 bp, Artificial Sequence
  Synthetic oligonucleotide
atacagtgtccagtggggccattatgtagtattgta

SEQ ID NO: 14480 - DNA, 35 bp, Artificial Sequence
  Synthetic oligonucleotide
atcgacttgcgcaatctagacacactttacaattg

SEQ ID NO: 14481 - DNA, 38 bp, Artificial Sequence
  Synthetic oligonucleotide
attcgaagcgtacttgcagggttaagagtttttgttga

SEQ ID NO: 14482 - DNA, 38 bp, Artificial Sequence
  Synthetic oligonucleotide
ccgggacagaacggatctaaattggaaatcggacgtga

SEQ ID NO: 14483 - DNA, 34 bp, Artificial Sequence
  Synthetic oligonucleotide
gaatgccccccccggctcggtggcatttgtctgt

SEQ ID NO: 14484 - DNA, 35 bp, Artificial Sequence
  Synthetic oligonucleotide
gatttatcacacgttacccaggccaccccgttgcc

SEQ ID NO: 14485 - DNA, 36 bp, Artificial Sequence
  Synthetic oligonucleotide
ggcacttgcagtgcacttataaaagtggtcatagta

SEQ ID NO: 14486 - DNA, 38 bp, Artificial Sequence
  Synthetic oligonucleotide
ggggtggtggggtttagtacctcgatttgaataattga

SEQ ID NO: 14487 - DNA, 37 bp, Artificial Sequence
  Synthetic oligonucleotide
gtatcaagcattaatgggaacacgacggttagcatga

SEQ ID NO: 14488 - DNA, 35 bp, Artificial Sequence
  Synthetic oligonucleotide
gtcgagccacgtggaagtttacgatacaagtggag

SEQ ID NO: 14489 - DNA, 36 bp, Artificial Sequence
  Synthetic oligonucleotide
gtctggaaggtccaaccttgactgcggatcaactca

SEQ ID NO: 14490 - DNA, 36 bp, Artificial Sequence
  Synthetic oligonucleotide
gtctgttagctctgaccgcgaaccaacagtggcgta

SEQ ID NO: 14491 - DNA, 36 bp, Artificial Sequence
  Synthetic oligonucleotide
gtgaacgtgagggaatagcttacatatactgcggaa

SEQ ID NO: 14492 - DNA, 37 bp, Artificial Sequence
  Synthetic oligonucleotide
tccctcagggtggagcggggagtacgtcttgagctga

SEQ ID NO: 14493 - DNA, 37 bp, Artificial Sequence
  Synthetic oligonucleotide
tgaagctggagagagtatggttacaaaaaggttacga

SEQ ID NO: 14494 - DNA, 37 bp, Artificial Sequence
  Synthetic oligonucleotide
tgacgtagaatcattactgtgctacagacgtagggga

SEQ ID NO: 14495 - DNA, 36 bp, Artificial Sequence
  Synthetic oligonucleotide
aagtacgggctcaaaggagttgcatagggttgggca

SEQ ID NO: 14496 - DNA, 37 bp, Artificial Sequence
  Synthetic oligonucleotide
aacagcgactcattcgccaagctttataccgtggtga

SEQ ID NO: 14497 - DNA, 35 bp, Artificial Sequence
  Synthetic oligonucleotide
aacattctggtagtaccaatgtctaaaggacgctt

SEQ ID NO: 14498 - DNA, 35 bp, Artificial Sequence
  Synthetic oligonucleotide
aacgaggcatgcttgaccgcagagtgccatgccaa

SEQ ID NO: 14499 - DNA, 37 bp, Artificial Sequence
  Synthetic oligonucleotide
aacgcgtggtcgccacagcgaggtgcgaccactgaga

SEQ ID NO: 14500 - DNA, 35 bp, Artificial Sequence
  Synthetic oligonucleotide
aactgcacttaccacgtaacggttagagagatggt

SEQ ID NO: 14501 - DNA, 37 bp, Artificial Sequence
  Synthetic oligonucleotide
acactgtgcgtaatgcggttaaagccagtgtcccaga

SEQ ID NO: 14502 - DNA, 37 bp, Artificial Sequence
  Synthetic oligonucleotide
acccgccaattttgggaagtccgtgcgaagagaccga

SEQ ID NO: 14503 - DNA, 35 bp, Artificial Sequence
  Synthetic oligonucleotide
accgatcgacgacgattccaacattatctgttagg

SEQ ID NO: 14504 - DNA, 36 bp, Artificial Sequence
  Synthetic oligonucleotide
acgactgacgtgcatcctccccgcacctgggtttaa

SEQ ID NO: 14505 - DNA, 37 bp, Artificial Sequence
  Synthetic oligonucleotide
acgtttaaacacgctaaagcttgcccctgagttgtga

SEQ ID NO: 14506 - DNA, 37 bp, Artificial Sequence
  Synthetic oligonucleotide
actaccgtgcgctggttcacggctacgctgtatttga

SEQ ID NO: 14507 - DNA, 35 bp, Artificial Sequence
  Synthetic oligonucleotide
actataagtgaccggcctataggtgatagaaactt

SEQ ID NO: 14508 - DNA, 37 bp, Artificial Sequence
  Synthetic oligonucleotide
agaactggcgatggtgaacgccctacggtattgtaga

SEQ ID NO: 14509 - DNA, 38 bp, Artificial Sequence
  Synthetic oligonucleotide
agagcacaggaagcgggcgaccgtggagctgcttctga

SEQ ID NO: 14510 - DNA, 36 bp, Artificial Sequence
  Synthetic oligonucleotide
agatatgaagctactgtttgtgccaggcttaaagca

SEQ ID NO: 14511 - DNA, 37 bp, Artificial Sequence
  Synthetic oligonucleotide
agccgtggtaagttcctggcaaataactggcatttga

SEQ ID NO: 14512 - DNA, 37 bp, Artificial Sequence
  Synthetic oligonucleotide
agtcgcctgcctccacgtctaccactggactaacgga

SEQ ID NO: 14513 - DNA, 38 bp, Artificial Sequence
  Synthetic oligonucleotide
agtgtcactacagccaaccctacgcttaccgtgtatga

SEQ ID NO: 14514 - DNA, 38 bp, Artificial Sequence
  Synthetic oligonucleotide
atacgaaggtggacagggaacaactcgactaaggatga

SEQ ID NO: 14515 - DNA, 36 bp, Artificial Sequence
  Synthetic oligonucleotide
ataggtcgcggtagggtactcgtgttcgttgtcaaa

SEQ ID NO: 14516 - DNA, 35 bp, Artificial Sequence
  Synthetic oligonucleotide
atagtcgggtgcctacggtagggtatcacatatgc

SEQ ID NO: 14517 - DNA, 38 bp, Artificial Sequence
  Synthetic oligonucleotide
atgagggttcgacagtaagctactattcgttcggatga

SEQ ID NO: 14518 - DNA, 37 bp, Artificial Sequence
  Synthetic oligonucleotide
atgcagtctacgcactccctgatcacagttttacgga

SEQ ID NO: 14519 - DNA, 37 bp, Artificial Sequence
  Synthetic oligonucleotide
atgcgcgagcagcacacctatgatttctgttgcacga

SEQ ID NO: 14520 - DNA, 35 bp, Artificial Sequence
  Synthetic oligonucleotide
atgtacggtcgagactcgtgaatattgcgggcccg

SEQ ID NO: 14521 - DNA, 36 bp, Artificial Sequence
  Synthetic oligonucleotide
attgggcatcccgtataatgggcggggaataatgga

SEQ ID NO: 14522 - DNA, 35 bp, Artificial Sequence
  Synthetic oligonucleotide
catgacgatgcagttcacgtactccggtgtaaggg

SEQ ID NO: 14523 - DNA, 36 bp, Artificial Sequence
  Synthetic oligonucleotide
ccaaggggcttgctttagagatgcaacccctgcgca

SEQ ID NO: 14524 - DNA, 38 bp, Artificial Sequence
  Synthetic oligonucleotide
ccagagcagtgcgtaagcgggttttgattcgctgctga

SEQ ID NO: 14525 - DNA, 36 bp, Artificial Sequence
  Synthetic oligonucleotide
ccatcaggacgtgcataccgttctgaggtatttaaa

SEQ ID NO: 14526 - DNA, 35 bp, Artificial Sequence
  Synthetic oligonucleotide
ccgtcatatggcccagtatatcgggtaacgtacgg

SEQ ID NO: 14527 - DNA, 35 bp, Artificial Sequence
  Synthetic oligonucleotide
cctttcgtgggaaagatgagactaaagctcgtact

SEQ ID NO: 14528 - DNA, 35 bp, Artificial Sequence
  Synthetic oligonucleotide
cgaagcacatgcggctcaacgccttaagagggacc

SEQ ID NO: 14529 - DNA, 36 bp, Artificial Sequence
  Synthetic oligonucleotide
cgacgactggacgcgatactacctcggtgtccgtca

SEQ ID NO: 14530 - DNA, 38 bp, Artificial Sequence
  Synthetic oligonucleotide
ctagacacgcgggtgtcagcacatttgcagttcaatga

SEQ ID NO: 14531 - DNA, 37 bp, Artificial Sequence
  Synthetic oligonucleotide
ctagctccgttctaggaccacaggccgtaggctgaga

SEQ ID NO: 14532 - DNA, 38 bp, Artificial Sequence
  Synthetic oligonucleotide
gaagcgtagcgagcacgagctctatgctgatacgctga

SEQ ID NO: 14533 - DNA, 35 bp, Artificial Sequence
  Synthetic oligonucleotide
gacaaaacctttatacaggcacatattttacatgc

SEQ ID NO: 14534 - DNA, 36 bp, Artificial Sequence
  Synthetic oligonucleotide
gacaatgtcatcccgcctatggtggctttcacgtaa

SEQ ID NO: 14535 - DNA, 35 bp, Artificial Sequence
  Synthetic oligonucleotide
gacttcacgaaacagttcccttggtaataggactg

SEQ ID NO: 14536 - DNA, 37 bp, Artificial Sequence
  Synthetic oligonucleotide
gagtcctgaataagttatggacgtagtgagtacgaaa

SEQ ID NO: 14537 - DNA, 36 bp, Artificial Sequence
  Synthetic oligonucleotide
gagtgcgggaaatactgcaacaattattatgtcaga

SEQ ID NO: 14538 - DNA, 37 bp, Artificial Sequence
  Synthetic oligonucleotide
gatacaaatcgccatgggactaggtataggtactcga

SEQ ID NO: 14539 - DNA, 36 bp, Artificial Sequence
  Synthetic oligonucleotide
gatacgaacgtacggtgtgtgaccggtggagtaata

SEQ ID NO: 14540 - DNA, 35 bp, Artificial Sequence
  Synthetic oligonucleotide
gatggttggatcacgttttacgttttatggattgc

SEQ ID NO: 14541 - DNA, 38 bp, Artificial Sequence
  Synthetic oligonucleotide
gcaagtcggggtttgcatcttacctccaccggggttga

SEQ ID NO: 14542 - DNA, 35 bp, Artificial Sequence
  Synthetic oligonucleotide
gcacccggcccccgacgtacatgttcttgtgtgtc

SEQ ID NO: 14543 - DNA, 36 bp, Artificial Sequence
  Synthetic oligonucleotide
gcagagctgtacagcggaaaaggctagaaagggtca

SEQ ID NO: 14544 - DNA, 37 bp, Artificial Sequence
  Synthetic oligonucleotide
gcggttgcggagcaatggcactgtggactccagtgga

SEQ ID NO: 14545 - DNA, 36 bp, Artificial Sequence
  Synthetic oligonucleotide
gcgttagggggaagggcgccatgaaaccagtctata

SEQ ID NO: 14546 - DNA, 35 bp, Artificial Sequence
  Synthetic oligonucleotide
gctattcgggcataggacagtaactgggagtgctg

SEQ ID NO: 14547 - DNA, 36 bp, Artificial Sequence
  Synthetic oligonucleotide
gctccattaggacatcttcgtctcatggacccgaga

SEQ ID NO: 14548 - DNA, 37 bp, Artificial Sequence
  Synthetic oligonucleotide
ggacctccacgactttggttagaaagagccgaaagga

SEQ ID NO: 14549 - DNA, 36 bp, Artificial Sequence
  Synthetic oligonucleotide
ggacgggctatctgatagaggattgtctcacgttta

SEQ ID NO: 14550 - DNA, 36 bp, Artificial Sequence
  Synthetic oligonucleotide
gggcaaagttgaggctcgctaagaaaatccactata

SEQ ID NO: 14551 - DNA, 36 bp, Artificial Sequence
  Synthetic oligonucleotide
ggtacgatttgagtctggggtagaggtatctgacca

SEQ ID NO: 14552 - DNA, 35 bp, Artificial Sequence
  Synthetic oligonucleotide
ggttcggagtgtacggtactggtagggagggcgca

SEQ ID NO: 14553 - DNA, 35 bp, Artificial Sequence
  Synthetic oligonucleotide
gtagtgcgcggcccgagtgttcgcccataggagag

SEQ ID NO: 14554 - DNA, 35 bp, Artificial Sequence
  Synthetic oligonucleotide
gtatagcggattgcgtatttcgtgtgcatcacagg

SEQ ID NO: 14555 - DNA, 35 bp, Artificial Sequence
  Synthetic oligonucleotide
gtatgttggtcgtgaattgccagtagggtggttat

SEQ ID NO: 14556 - DNA, 38 bp, Artificial Sequence
  Synthetic oligonucleotide
gtcaacagcctatataaagagaaggccatctgaggtga

SEQ ID NO: 14557 - DNA, 38 bp, Artificial Sequence
  Synthetic oligonucleotide
gtcgatgagagcctggtcaagctaccagtcgctgttga

SEQ ID NO: 14558 - DNA, 35 bp, Artificial Sequence
  Synthetic oligonucleotide
gtcgtcgagagtgaccgcgcaaaataagcattcgt

SEQ ID NO: 14559 - DNA, 38 bp, Artificial Sequence
  Synthetic oligonucleotide
gtgacgtaacctttgagataagtacgaggcgaaggtga

SEQ ID NO: 14560 - DNA, 36 bp, Artificial Sequence
  Synthetic oligonucleotide
gtgactttaagagttcaatcacttacgttacggtga

SEQ ID NO: 14561 - DNA, 38 bp, Artificial Sequence
  Synthetic oligonucleotide
gtgatctttggtccatgtggcaaacaggacacaggtga

SEQ ID NO: 14562 - DNA, 37 bp, Artificial Sequence
  Synthetic oligonucleotide
gtggtccgcggcccaatggccatatacacaagtgcga

SEQ ID NO: 14563 - DNA, 35 bp, Artificial Sequence
  Synthetic oligonucleotide
gtggttgaagtttcccggttgactggtcaaggcaa

SEQ ID NO: 14564 - DNA, 37 bp, Artificial Sequence
  Synthetic oligonucleotide
gttctacgttactgccggagtccgttaacaactccga

SEQ ID NO: 14565 - DNA, 36 bp, Artificial Sequence
  Synthetic oligonucleotide
gttggagcatatgtcagctgcgcgaggagcgttata

SEQ ID NO: 14566 - DNA, 35 bp, Artificial Sequence
  Synthetic oligonucleotide
taacgaaaggttgctcagacctgcatgtttggaaa

SEQ ID NO: 14567 - DNA, 25 bp, Artificial Sequence
  Synthetic oligonucleotide
taccaactaaggctatggaccggta

SEQ ID NO: 14568 - DNA, 38 bp, Artificial Sequence
  Synthetic oligonucleotide
taccgtggctcccagccaaacgacgacgttcctaatga

SEQ ID NO: 14569 - DNA, 37 bp, Artificial Sequence
  Synthetic oligonucleotide
tagaagttaatgtacgcgtcacgatactcctagggga

SEQ ID NO: 14570 - DNA, 36 bp, Artificial Sequence
  Synthetic oligonucleotide
taggttgggcaaagatgggcctccacgacagctaga

SEQ ID NO: 14571 - DNA, 38 bp, Artificial Sequence
  Synthetic oligonucleotide
tagtcgcgaaagatagcttctttatcgcccgttattga

SEQ ID NO: 14572 - DNA, 37 bp, Artificial Sequence
  Synthetic oligonucleotide
tatcacgtccggagtatgggggcaattttgtaaagga

SEQ ID NO: 14573 - DNA, 37 bp, Artificial Sequence
  Synthetic oligonucleotide
tatccgaagcgaagctctgccgagtcgggatgggtga

SEQ ID NO: 14574 - DNA, 36 bp, Artificial Sequence
  Synthetic oligonucleotide
tcactacgcatgcatgtacaatgatatggcatgaca

SEQ ID NO: 14575 - DNA, 38 bp, Artificial Sequence
  Synthetic oligonucleotide
tcatgctgttaggggctcagacgccaccttgcatatga

SEQ ID NO: 14576 - DNA, 37 bp, Artificial Sequence
  Synthetic oligonucleotide
tccaagtctcgtgtctcgtgcgcgagggtgttttgga

SEQ ID NO: 14577 - DNA, 35 bp, Artificial Sequence
  Synthetic oligonucleotide
tccatcaaatgtttaggggggtgagtcactcaagt

SEQ ID NO: 14578 - DNA, 35 bp, Artificial Sequence
  Synthetic oligonucleotide
tcgtgaccggtttaaaaggggggaagatatagtaa

SEQ ID NO: 14579 - DNA, 35 bp, Artificial Sequence
  Synthetic oligonucleotide
tctgatcagtggacagggttagccgaagtggtctg

SEQ ID NO: 14580 - DNA, 38 bp, Artificial Sequence
  Synthetic oligonucleotide
tgaacggaacagtgaatgtccgcaggaaacgcctttga

SEQ ID NO: 14581 - DNA, 37 bp, Artificial Sequence
  Synthetic oligonucleotide
tgcaagatgagccactaggggcaaaaaaaacccggga

SEQ ID NO: 14582 - DNA, 36 bp, Artificial Sequence
  Synthetic oligonucleotide
tgcagaaagcgcagagcctttgaagtacaatccgta

SEQ ID NO: 14583 - DNA, 35 bp, Artificial Sequence
  Synthetic oligonucleotide
tgcctatggcattccgtagggatacttcagtgggc

SEQ ID NO: 14584 - DNA, 37 bp, Artificial Sequence
  Synthetic oligonucleotide
tgtaccacagagcgagagctccatgataaggcaagga

SEQ ID NO: 14585 - DNA, 38 bp, Artificial Sequence
  Synthetic oligonucleotide
tgtagggggaggacccaactgactccccgtacgaatga

SEQ ID NO: 14586 - DNA, 36 bp, Artificial Sequence
  Synthetic oligonucleotide
tgtctagtagagtccttttattacgttgcataggga

SEQ ID NO: 14587 - DNA, 37 bp, Artificial Sequence
  Synthetic oligonucleotide
tgtgcccccttgcctcctagatcgtagctataaggga

SEQ ID NO: 14588 - DNA, 38 bp, Artificial Sequence
  Synthetic oligonucleotide
tgtggccaattcttgtgccactgcattgcggggcatga

SEQ ID NO: 14589 - DNA, 38 bp, Artificial Sequence
  Synthetic oligonucleotide
tgttgggactttacgccgcatgcttagtggtagaatga

SEQ ID NO: 14590 - DNA, 35 bp, Artificial Sequence
  Synthetic oligonucleotide
ttcccactcctcgctccccgtccgcaggcttggat

SEQ ID NO: 14591 - DNA, 38 bp, Artificial Sequence
  Synthetic oligonucleotide
ttctcgtgtgaacggacttcgcgggcaagaccctttga

SEQ ID NO: 14592 - DNA, 36 bp, Artificial Sequence
  Synthetic oligonucleotide
ttcttacagaggtcattgggtatggccacactctaa

SEQ ID NO: 14593 - DNA, 35 bp, Artificial Sequence
  Synthetic oligonucleotide
ttgctttttcgtcttcatgcgtaacggagtagagc

SEQ ID NO: 14594 - DNA, 38 bp, Artificial Sequence
  Synthetic oligonucleotide
ttggtcacgagatgtaagatgcggtttctctattatga

SEQ ID NO: 14595 - DNA, 36 bp, Artificial Sequence
  Synthetic oligonucleotide
ttgttcatggctttcaagaatgggctacgcgtacta

SEQ ID NO: 14596 - DNA, 37 bp, Artificial Sequence
  Synthetic oligonucleotide
tttgcgttactgtttggtatgggttgccttgcgcaga

SEQ ID NO: 14597 - DNA, 36 bp, Artificial Sequence
  Synthetic oligonucleotide
tttgctatttaactggctgtgagtttgcgtctacca

SEQ ID NO: 14598 - DNA, 38 bp, Artificial Sequence
  Synthetic oligonucleotide
tttgctggcactggtggatgttttattcatgcaactga

SEQ ID NO: 14599 - DNA, 36 bp, Artificial Sequence
  Synthetic oligonucleotide
gaagactgcatgggcacaggcattatactcggtata

SEQ ID NO: 14600 - DNA, 35 bp, Artificial Sequence
  Synthetic oligonucleotide
aactggctgggttacttgctagtatgtcatgggta

SEQ ID NO: 14601 - DNA, 36 bp, Artificial Sequence
  Synthetic oligonucleotide
attgtacaacgtgcgttttgtaattgtctgcactga

SEQ ID NO: 14602 - DNA, 36 bp, Artificial Sequence
  Synthetic oligonucleotide
ggggtccgggattggataaggtggacccgaagcgta

SEQ ID NO: 14603 - DNA, 38 bp, Artificial Sequence
  Synthetic oligonucleotide
gtctggtcatgactgcatacatgtaggttgataggtga

SEQ ID NO: 14604 - DNA, 36 bp, Artificial Sequence
  Synthetic oligonucleotide
ttcggtcgggctccaatcaagaggcaatctatcgga

SEQ ID NO: 14605 - DNA, 38 bp, Artificial Sequence
  Synthetic oligonucleotide
ttagtcggtccacgcccggcgaacgtactaaggagtga

SEQ ID NO: 14606 - DNA, 36 bp, Artificial Sequence
  Synthetic oligonucleotide
atgctctggagtgtaaccaggcatgcatcactttta

SEQ ID NO: 14607 - DNA, 37 bp, Artificial Sequence
  Synthetic oligonucleotide
gatatcataatcatgtgccgcggggcaaccctacgga

SEQ ID NO: 14608 - DNA, 37 bp, Artificial Sequence
  Synthetic oligonucleotide
aaccagcttaaggtagttgttaagtcgatctggggga

SEQ ID NO: 14609 - DNA, 36 bp, Artificial Sequence
  Synthetic oligonucleotide
aaccatattacaggtcctgatggagtgaaatgagga

SEQ ID NO: 14610 - DNA, 37 bp, Artificial Sequence
  Synthetic oligonucleotide
aagcgtgccgcgttttcttcagtacagtcgctggcga

SEQ ID NO: 14611 - DNA, 35 bp, Artificial Sequence
  Synthetic oligonucleotide
aatacaaacttatgatttccctgagcaccgcctag

SEQ ID NO: 14612 - DNA, 38 bp, Artificial Sequence
  Synthetic oligonucleotide
aattcgtgacgattgagacaatctgaaacaagtgttga

SEQ ID NO: 14613 - DNA, 38 bp, Artificial Sequence
  Synthetic oligonucleotide
acagtaagtcgacgacgtgaagtgtggcacaaaagtga

SEQ ID NO: 14614 - DNA, 37 bp, Artificial Sequence
  Synthetic oligonucleotide
accaccacgcgcgttcgctttggtgagaaagtggtga

SEQ ID NO: 14615 - DNA, 38 bp, Artificial Sequence
  Synthetic oligonucleotide
acccatctgggcatggtaaacgaaagtaaattgggtga

SEQ ID NO: 14616 - DNA, 36 bp, Artificial Sequence
  Synthetic oligonucleotide
acccgtctacgtaccagcacttgtaactacaatcta

SEQ ID NO: 14617 - DNA, 38 bp, Artificial Sequence
  Synthetic oligonucleotide
acgccaactgacaatgctggagatatggcgtataatga

SEQ ID NO: 14618 - DNA, 38 bp, Artificial Sequence
  Synthetic oligonucleotide
actggttatccgtagggacatctccgaggtcgctgtga

SEQ ID NO: 14619 - DNA, 38 bp, Artificial Sequence
  Synthetic oligonucleotide
aggatatagcttgattatgcgcggtgggcctacagtga

SEQ ID NO: 14620 - DNA, 35 bp, Artificial Sequence
  Synthetic oligonucleotide
agtgatatggcaataataaactgaatgaaggtggg

SEQ ID NO: 14621 - DNA, 35 bp, Artificial Sequence
  Synthetic oligonucleotide
atacacttctaagaaaggtaaacgggcgagacatg

SEQ ID NO: 14622 - DNA, 38 bp, Artificial Sequence
  Synthetic oligonucleotide
atcgtcaatgttggtgacatgtttgcttgttgctctga

SEQ ID NO: 14623 - DNA, 37 bp, Artificial Sequence
  Synthetic oligonucleotide
atcgtcgtaccatcattacgagctgaatgatttgaga

SEQ ID NO: 14624 - DNA, 35 bp, Artificial Sequence
  Synthetic oligonucleotide
atctagtccatacggagtacgctacggataggttg

SEQ ID NO: 14625 - DNA, 36 bp, Artificial Sequence
  Synthetic oligonucleotide
atgcggtacaaacaaagtgttggccaggactcctaa

SEQ ID NO: 14626 - DNA, 37 bp, Artificial Sequence
  Synthetic oligonucleotide
atggactaacggttggtatttcgggtttgttcatgga

SEQ ID NO: 14627 - DNA, 37 bp, Artificial Sequence
  Synthetic oligonucleotide
atggagccaaagagaagcgctccatacgtgtaagtga

SEQ ID NO: 14628 - DNA, 36 bp, Artificial Sequence
  Synthetic oligonucleotide
attaccacagcctgtgtcggattatagcgtatcgga

SEQ ID NO: 14629 - DNA, 35 bp, Artificial Sequence
  Synthetic oligonucleotide
caaagtctggatttcttatcgcgccccccgccacg

SEQ ID NO: 14630 - DNA, 36 bp, Artificial Sequence
  Synthetic oligonucleotide
gacatcacacgaattcgcaagatatgctaattgaaa

SEQ ID NO: 14631 - DNA, 35 bp, Artificial Sequence
  Synthetic oligonucleotide
gacccacgaacggtgcgatttcacgactgcgtgcc

SEQ ID NO: 14632 - DNA, 37 bp, Artificial Sequence
  Synthetic oligonucleotide
gagacctatggtgtgaagcctcgcggcgatctaagga

SEQ ID NO: 14633 - DNA, 35 bp, Artificial Sequence
  Synthetic oligonucleotide
gagtcttgtttgcacaaagtaagtctcatggctgg

SEQ ID NO: 14634 - DNA, 36 bp, Artificial Sequence
  Synthetic oligonucleotide
gatcccatgctctatagattggcgcgtgccacggga

SEQ ID NO: 14635 - DNA, 37 bp, Artificial Sequence
  Synthetic oligonucleotide
gcagtcatttctcgttcaggcaccacgtgccaattga

SEQ ID NO: 14636 - DNA, 36 bp, Artificial Sequence
  Synthetic oligonucleotide
gcataacaccgcactggtctgttcttgatcaacgga

SEQ ID NO: 14637 - DNA, 35 bp, Artificial Sequence
  Synthetic oligonucleotide
gccgtccgttcaatgtgacgaaactgggcaatccg

SEQ ID NO: 14638 - DNA, 36 bp, Artificial Sequence
  Synthetic oligonucleotide
gcgctacgggccataacgagagatagactcgagtta

SEQ ID NO: 14639 - DNA, 36 bp, Artificial Sequence
  Synthetic oligonucleotide
gcgtccccggcttaggatattgagttgggatactaa

SEQ ID NO: 14640 - DNA, 37 bp, Artificial Sequence
  Synthetic oligonucleotide
gctgtcccggatgtttatttttacaacgcgcttgcga

SEQ ID NO: 14641 - DNA, 35 bp, Artificial Sequence
  Synthetic oligonucleotide
ggacttgcactgagagtagctggttcagcaccaac

SEQ ID NO: 14642 - DNA, 36 bp, Artificial Sequence
  Synthetic oligonucleotide
ggctctgtcacagcatagcacatcatgcaatttcaa

SEQ ID NO: 14643 - DNA, 35 bp, Artificial Sequence
  Synthetic oligonucleotide
ggtagatccttgctttataagggtgagctacgatt

SEQ ID NO: 14644 - DNA, 38 bp, Artificial Sequence
  Synthetic oligonucleotide
ggtgcagttaggagtcgtgggatatgaagtggtcgtga

SEQ ID NO: 14645 - DNA, 36 bp, Artificial Sequence
  Synthetic oligonucleotide
gtctatacgccatctcttcgcgggtgaaagggatga

SEQ ID NO: 14646 - DNA, 37 bp, Artificial Sequence
  Synthetic oligonucleotide
gtctgtggctagctctgaatagataggcgaaatgaga

SEQ ID NO: 14647 - DNA, 37 bp, Artificial Sequence
  Synthetic oligonucleotide
gtgctcagcacagcgtgttaaagtactgggtatggga

SEQ ID NO: 14648 - DNA, 36 bp, Artificial Sequence
  Synthetic oligonucleotide
gtgttgggctttgggtataatgggaagtgtggggga

SEQ ID NO: 14649 - DNA, 37 bp, Artificial Sequence
  Synthetic oligonucleotide
gttagcgtatgcagtcttgacgttttgtagtccttga

SEQ ID NO: 14650 - DNA, 37 bp, Artificial Sequence
  Synthetic oligonucleotide
taaggggcgggatagtgctcagtaacacctcacatga

SEQ ID NO: 14651 - DNA, 38 bp, Artificial Sequence
  Synthetic oligonucleotide
taagtaccgtggtacagaagcgcgagggaccacaatga

SEQ ID NO: 14652 - DNA, 37 bp, Artificial Sequence
  Synthetic oligonucleotide
tacaaagccgcagaaaaagtttggccgcgaggcatga

SEQ ID NO: 14653 - DNA, 35 bp, Artificial Sequence
  Synthetic oligonucleotide
tacgagggggtgtaacctgggtctatggggctaac

SEQ ID NO: 14654 - DNA, 38 bp, Artificial Sequence
  Synthetic oligonucleotide
tatcgggatcatatgtgtgatttacccctactcactga

SEQ ID NO: 14655 - DNA, 37 bp, Artificial Sequence
  Synthetic oligonucleotide
tccggaagggggggtaagtacgtacttcaaagagcga

SEQ ID NO: 14656 - DNA, 35 bp, Artificial Sequence
  Synthetic oligonucleotide
tcgagacacgttgaagagcgttttgatgtagggag

SEQ ID NO: 14657 - DNA, 36 bp, Artificial Sequence
  Synthetic oligonucleotide
tcgccatgtcaatcgccttaacgggaggccttggta

SEQ ID NO: 14658 - DNA, 36 bp, Artificial Sequence
  Synthetic oligonucleotide
tcgtcatgacgttggatcacgacgaggtccatctta

SEQ ID NO: 14659 - DNA, 35 bp, Artificial Sequence
  Synthetic oligonucleotide
tgtggtgaaactttccaacgtatagtgacatagtc

SEQ ID NO: 14660 - DNA, 38 bp, Artificial Sequence
  Synthetic oligonucleotide
tttcttcgcatttggtatggggggctatacgaacatga

SEQ ID NO: 14661 - DNA, 35 bp, Artificial Sequence
  Synthetic oligonucleotide
agatagtgttggcagttatgattcttcagtatcag

SEQ ID NO: 14662 - DNA, 35 bp, Artificial Sequence
  Synthetic oligonucleotide
agtagaactgccaaagtgtctcttttaagactttc

SEQ ID NO: 14663 - DNA, 35 bp, Artificial Sequence
  Synthetic oligonucleotide
ggggggggctttttatggtttctgggggacctgct

SEQ ID NO: 14664 - DNA, 35 bp, Artificial Sequence
  Synthetic oligonucleotide
aaacattgacggccatatttccagtagtcgtcaaa

SEQ ID NO: 14665 - DNA, 38 bp, Artificial Sequence
  Synthetic oligonucleotide
aacaatggcaatgtgtccatttagagtatttttagtga

SEQ ID NO: 14666 - DNA, 38 bp, Artificial Sequence
  Synthetic oligonucleotide
agccgaccgagacacgggcgccacgtacaatagtttga

SEQ ID NO: 14667 - DNA, 36 bp, Artificial Sequence
  Synthetic oligonucleotide
gagtctacagctggatcattcacagacagcacctaa

SEQ ID NO: 14668 - DNA, 38 bp, Artificial Sequence
  Synthetic oligonucleotide
ggaacaacgaggtcgtgtttcccacatatacccgctga

SEQ ID NO: 14669 - DNA, 36 bp, Artificial Sequence
  Synthetic oligonucleotide
tactgtacgtttcgcatgttcgtatcgacaaccgaa

SEQ ID NO: 14670 - DNA, 36 bp, Artificial Sequence
  Synthetic oligonucleotide
aaaagcgatatggctggtcatttattcaacttgcga

SEQ ID NO: 14671 - DNA, 37 bp, Artificial Sequence
  Synthetic oligonucleotide
acacacgtaacttgactttcactacagcatttggtga

SEQ ID NO: 14672 - DNA, 35 bp, Artificial Sequence
  Synthetic oligonucleotide
acatgtgacctgcagaggtgattgctgtggacatt

SEQ ID NO: 14673 - DNA, 38 bp, Artificial Sequence
  Synthetic oligonucleotide
accggaatggcggacggtcctgcctttaaagttactga

SEQ ID NO: 14674 - DNA, 35 bp, Artificial Sequence
  Synthetic oligonucleotide
acgagacatccagcacagtcccgggtctagggatg

SEQ ID NO: 14675 - DNA, 36 bp, Artificial Sequence
  Synthetic oligonucleotide
acttagggcaatcatgcgcgcgtcattactgggtaa

SEQ ID NO: 14676 - DNA, 35 bp, Artificial Sequence
  Synthetic oligonucleotide
agacgtctctggatccaggttggaattagtacaga

SEQ ID NO: 14677 - DNA, 36 bp, Artificial Sequence
  Synthetic oligonucleotide
agctgcatccctttcaaaaatagaatgattaggtga

SEQ ID NO: 14678 - DNA, 36 bp, Artificial Sequence
  Synthetic oligonucleotide
agttacctgggcgcccgctgaatactatgggattta

SEQ ID NO: 14679 - DNA, 36 bp, Artificial Sequence
  Synthetic oligonucleotide
atgtcaggtacttagttcacgaggcccagttaacga

SEQ ID NO: 14680 - DNA, 38 bp, Artificial Sequence
  Synthetic oligonucleotide
catgaattacggacccgtagggtaataagtcgacgtga

SEQ ID NO: 14681 - DNA, 36 bp, Artificial Sequence
  Synthetic oligonucleotide
catgggacctgattgatgttgactgtttagtctcaa

SEQ ID NO: 14682 - DNA, 35 bp, Artificial Sequence
  Synthetic oligonucleotide
ccagttccgtacgatatagaggctaattgagaacg

SEQ ID NO: 14683 - DNA, 36 bp, Artificial Sequence
  Synthetic oligonucleotide
gaaacgtgctaagctgaacggaacttggtatgttaa

SEQ ID NO: 14684 - DNA, 35 bp, Artificial Sequence
  Synthetic oligonucleotide
gacaagcttagcctgcatgcatgcgtacgggcatc

SEQ ID NO: 14685 - DNA, 37 bp, Artificial Sequence
  Synthetic oligonucleotide
gccacaggcacgtaacggtatgttctggtaggactga

SEQ ID NO: 14686 - DNA, 38 bp, Artificial Sequence
  Synthetic oligonucleotide
gcgcttacgcatgtactatcacgaacgttacgtactga

SEQ ID NO: 14687 - DNA, 34 bp, Artificial Sequence
  Synthetic oligonucleotide
gctcgcgggatgcgctacttcacgcggaacttca

SEQ ID NO: 14688 - DNA, 35 bp, Artificial Sequence
  Synthetic oligonucleotide
gcttgaccgagtcaagctgtgcgggagtcaagata

SEQ ID NO: 14689 - DNA, 36 bp, Artificial Sequence
  Synthetic oligonucleotide
ggaaacacgctctcagcggttgaggtcatgcctaaa

SEQ ID NO: 14690 - DNA, 38 bp, Artificial Sequence
  Synthetic oligonucleotide
ggcgagacccgccatgttgacagtaacctgtccggtga

SEQ ID NO: 14691 - DNA, 35 bp, Artificial Sequence
  Synthetic oligonucleotide
ggtctagccggatgcaatcatgaatgccagagacc

SEQ ID NO: 14692 - DNA, 38 bp, Artificial Sequence
  Synthetic oligonucleotide
gtcagcaagagagggctgacacacttagcatgagttga

SEQ ID NO: 14693 - DNA, 36 bp, Artificial Sequence
  Synthetic oligonucleotide
gttgttgcccgggatgagcctagggtcgaaaaagta

SEQ ID NO: 14694 - DNA, 37 bp, Artificial Sequence
  Synthetic oligonucleotide
tacagaaaatgcgggcaaaagtgtgggacctgggaga

SEQ ID NO: 14695 - DNA, 37 bp, Artificial Sequence
  Synthetic oligonucleotide
tatgctcggttatttaccgaagcttggcatactgaga

SEQ ID NO: 14696 - DNA, 35 bp, Artificial Sequence
  Synthetic oligonucleotide
tgcggggtgtcaaggaggctagattagttcattga

SEQ ID NO: 14697 - DNA, 35 bp, Artificial Sequence
  Synthetic oligonucleotide
tgctgcgggccctagattggacagttgaagccgcg

SEQ ID NO: 14698 - DNA, 37 bp, Artificial Sequence
  Synthetic oligonucleotide
tgttgtgtacgccaatgtggatccacggtggacatga

SEQ ID NO: 14699 - DNA, 35 bp, Artificial Sequence
  Synthetic oligonucleotide
ttatgccggtgcagtaggccaatagcatgtcagtc

SEQ ID NO: 14700 - DNA, 35 bp, Artificial Sequence
  Synthetic oligonucleotide
ttcaggctgtcactataatacagttgggactattg

SEQ ID NO: 14701 - DNA, 36 bp, Artificial Sequence
  Synthetic oligonucleotide
tttggtgcacgtctgttgaaggcaccgggtttaaaa

SEQ ID NO: 14702 - DNA, 35 bp, Artificial Sequence
  Synthetic oligonucleotide
gctccccctgtgacgtgctatggagatccggcaac

SEQ ID NO: 14703 - DNA, 35 bp, Artificial Sequence
  Synthetic oligonucleotide
agtatcatacgtcacgggacgcatccgacatcttg

SEQ ID NO: 14704 - DNA, 35 bp, Artificial Sequence
  Synthetic oligonucleotide
aacatactgcatgatgagaaggggtaggacgcggt

SEQ ID NO: 14705 - DNA, 38 bp, Artificial Sequence
  Synthetic oligonucleotide
acccattgctagaataattctaatcccgtcgtaaatga

SEQ ID NO: 14706 - DNA, 37 bp, Artificial Sequence
  Synthetic oligonucleotide
atgatccgcggtcgtagacggcctgggcgatgccaga

SEQ ID NO: 14707 - DNA, 35 bp, Artificial Sequence
  Synthetic oligonucleotide
gaggtgttgtcctgcaccggggatatattgcgtta

SEQ ID NO: 14708 - DNA, 35 bp, Artificial Sequence
  Synthetic oligonucleotide
gtaaacgaaggttatgtacggatagagtccaattg

SEQ ID NO: 14709 - DNA, 35 bp, Artificial Sequence
  Synthetic oligonucleotide
gtcgcacagtacaggagactggcaagaggtttgga

SEQ ID NO: 14710 - DNA, 37 bp, Artificial Sequence
  Synthetic oligonucleotide
gtcggaggtcggtctcctttatgacgggtcggtgaga

SEQ ID NO: 14711 - DNA, 38 bp, Artificial Sequence
  Synthetic oligonucleotide
tacagtgacccggttaagttagagttacgggtgtatga

SEQ ID NO: 14712 - DNA, 36 bp, Artificial Sequence
  Synthetic oligonucleotide
tatggggttggccccgtcaggaggagagaaacgtca

SEQ ID NO: 14713 - DNA, 35 bp, Artificial Sequence
  Synthetic oligonucleotide
tcaattcagttggacgtcgagatgttgaggtcatt

SEQ ID NO: 14714 - DNA, 36 bp, Artificial Sequence
  Synthetic oligonucleotide
tcactattgcagtgtatgcaatacaaatgcgtgcaa

SEQ ID NO: 14715 - DNA, 38 bp, Artificial Sequence
  Synthetic oligonucleotide
tcatcttacgagtttggactcagcaagcttcgaattga

SEQ ID NO: 14716 - DNA, 38 bp, Artificial Sequence
  Synthetic oligonucleotide
tgcatatcagtgtttcatggattgtccagttactgtga

SEQ ID NO: 14717 - DNA, 37 bp, Artificial Sequence
  Synthetic oligonucleotide
gatacgtacgtcatgcaggataccgtgcgaatcagga

SEQ ID NO: 14718 - DNA, 38 bp, Artificial Sequence
  Synthetic oligonucleotide
ttgattcggtcggaacgttggtagttagaaggtcttga

SEQ ID NO: 14719 - DNA, 38 bp, Artificial Sequence
  Synthetic oligonucleotide
aaaccgctggctaacgaagccaggagagctcacactga

SEQ ID NO: 14720 - DNA, 35 bp, Artificial Sequence
  Synthetic oligonucleotide
aacggtgcgaccggtataacgctgctccgcttaag

SEQ ID NO: 14721 - DNA, 37 bp, Artificial Sequence
  Synthetic oligonucleotide
agtctgctcacatgtagggacgggtacactattttga

SEQ ID NO: 14722 - DNA, 36 bp, Artificial Sequence
  Synthetic oligonucleotide
catactcgcaatcatgaacgtgaggttattgctgca

SEQ ID NO: 14723 - DNA, 35 bp, Artificial Sequence
  Synthetic oligonucleotide
ctatgcagggccatgctgcatactaacttccacga

SEQ ID NO: 14724 - DNA, 36 bp, Artificial Sequence
  Synthetic oligonucleotide
gcgaatcccagctgtgcgaggctcgtgcgccgtgta

SEQ ID NO: 14725 - DNA, 36 bp, Artificial Sequence
  Synthetic oligonucleotide
ttgtcacactcgggattgcgccaaaaacctttagga

SEQ ID NO: 14726 - DNA, 36 bp, Artificial Sequence
  Synthetic oligonucleotide
tagctgcacccatgggtccgtactaatgtctggcca

SEQ ID NO: 14727 - DNA, 37 bp, Artificial Sequence
  Synthetic oligonucleotide
taggctacctccgggggtgcaaagacttacggaacga

SEQ ID NO: 14728 - DNA, 38 bp, Artificial Sequence
  Synthetic oligonucleotide
tataaatgcccgttcacatggtgagtaaggccaactga

SEQ ID NO: 14729 - DNA, 36 bp, Artificial Sequence
  Synthetic oligonucleotide
gacctgcatatagctacatgttactgggagacaata

SEQ ID NO: 14730 - DNA, 36 bp, Artificial Sequence
  Synthetic oligonucleotide
gcatcagcctagggtctatggcgaggaaagcctaga

SEQ ID NO: 14731 - DNA, 37 bp, Artificial Sequence
  Synthetic oligonucleotide
gggggcattggtaaaggactcccgtatagtcagcaga

SEQ ID NO: 14732 - DNA, 37 bp, Artificial Sequence
  Synthetic oligonucleotide
tagtccttgaaagtgtaagacgttatgggaacgccga

SEQ ID NO: 14733 - DNA, 38 bp, Artificial Sequence
  Synthetic oligonucleotide
ttccctgcgtgatagtacgctgcgacgcaaggatttga

SEQ ID NO: 14734 - DNA, 37 bp, Artificial Sequence
  Synthetic oligonucleotide
cagaaactgctgtcatttacaccccggtcgatgacga

SEQ ID NO: 14735 - DNA, 36 bp, Artificial Sequence
  Synthetic oligonucleotide
aaaaatccgcaacggaacggtctggaactatgtgca

SEQ ID NO: 14736 - DNA, 36 bp, Artificial Sequence
  Synthetic oligonucleotide
aaaaggtaccgcacgtagcatgcgccagttgctgaa

SEQ ID NO: 14737 - DNA, 37 bp, Artificial Sequence
  Synthetic oligonucleotide
aaacagggcacactcggggtcgtaagtgagttgtgga

SEQ ID NO: 14738 - DNA, 35 bp, Artificial Sequence
  Synthetic oligonucleotide
aacaaggcgcctgtggagcttgttttcattgtaca

SEQ ID NO: 14739 - DNA, 36 bp, Artificial Sequence
  Synthetic oligonucleotide
aacgcgcgttgtttatgacgatagcgcattccctta

SEQ ID NO: 14740 - DNA, 37 bp, Artificial Sequence
  Synthetic oligonucleotide
aacgtttgttacatgaaagtgcaagctccggcgaaga

SEQ ID NO: 14741 - DNA, 35 bp, Artificial Sequence
  Synthetic oligonucleotide
aacttatgacaaaagcttacggtgcaagttatagg

SEQ ID NO: 14742 - DNA, 37 bp, Artificial Sequence
  Synthetic oligonucleotide
aagagccaggaagtatttttacggagaacaggttgga

SEQ ID NO: 14743 - DNA, 37 bp, Artificial Sequence
  Synthetic oligonucleotide
aatagcgtgtttgctatgtcattttttgttcaggtga

SEQ ID NO: 14744 - DNA, 35 bp, Artificial Sequence
  Synthetic oligonucleotide
acaaagtggactgctttcatgtgcaaatagggaac

SEQ ID NO: 14745 - DNA, 35 bp, Artificial Sequence
  Synthetic oligonucleotide
acacgccgatctcacgtctgccgtataactttaaa

SEQ ID NO: 14746 - DNA, 38 bp, Artificial Sequence
  Synthetic oligonucleotide
acagaatggacgtaactctctctagacagaattggtga

SEQ ID NO: 14747 - DNA, 38 bp, Artificial Sequence
  Synthetic oligonucleotide
acagggcgcgctagggtagtgtagattgcacctgttga

SEQ ID NO: 14748 - DNA, 36 bp, Artificial Sequence
  Synthetic oligonucleotide
accggaggagtaatgcagattatgggactcctctaa

SEQ ID NO: 14749 - DNA, 38 bp, Artificial Sequence
  Synthetic oligonucleotide
accgtaactaggtttcagaataatggcgctggctttga

SEQ ID NO: 14750 - DNA, 38 bp, Artificial Sequence
  Synthetic oligonucleotide
acgcacacgagcatctgaagataaagacaggcacgtga

SEQ ID NO: 14751 - DNA, 36 bp, Artificial Sequence
  Synthetic oligonucleotide
acggctaaattacagcgatctccttactgtttgtca

SEQ ID NO: 14752 - DNA, 36 bp, Artificial Sequence
  Synthetic oligonucleotide
actcattggtccggtaagggggcgccacggctccta

SEQ ID NO: 14753 - DNA, 37 bp, Artificial Sequence
  Synthetic oligonucleotide
agcgctggactctgacgaccatttgcggaaagttgga

SEQ ID NO: 14754 - DNA, 37 bp, Artificial Sequence
  Synthetic oligonucleotide
aggggtcgcctgccacgggtctgcccgcgcgcatgga

SEQ ID NO: 14755 - DNA, 35 bp, Artificial Sequence
  Synthetic oligonucleotide
agtgttcggactggtccggtcttacgcgaggttgt

SEQ ID NO: 14756 - DNA, 36 bp, Artificial Sequence
  Synthetic oligonucleotide
atagcagtctatgtaggccatgtactgttaccggaa

SEQ ID NO: 14757 - DNA, 33 bp, Artificial Sequence
  Synthetic oligonucleotide
atagccaaaggaggcgattaggttctctgtcga

SEQ ID NO: 14758 - DNA, 35 bp, Artificial Sequence
  Synthetic oligonucleotide
atcgcagttctcaatgacatggacctcgaatactg

SEQ ID NO: 14759 - DNA, 37 bp, Artificial Sequence
  Synthetic oligonucleotide
atctatttataatgtggccacatgccgcggtccttga

SEQ ID NO: 14760 - DNA, 37 bp, Artificial Sequence
  Synthetic oligonucleotide
atgaggcgttccgacgtgtacagacatcgttgatcga

SEQ ID NO: 14761 - DNA, 35 bp, Artificial Sequence
  Synthetic oligonucleotide
atggatagcaacgccatgggtatatacataagcta

SEQ ID NO: 14762 - DNA, 38 bp, Artificial Sequence
  Synthetic oligonucleotide
atggcatccagtcctcactagcaaaccagattgcgtga

SEQ ID NO: 14763 - DNA, 38 bp, Artificial Sequence
  Synthetic oligonucleotide
atgtcagaataacctagctgagtgtgaccgccaagtga

SEQ ID NO: 14764 - DNA, 36 bp, Artificial Sequence
  Synthetic oligonucleotide
attaggagggcgtcgcgctacgggtatttgtgaaga

SEQ ID NO: 14765 - DNA, 36 bp, Artificial Sequence
  Synthetic oligonucleotide
attatagagcgaaagtagtaggaatactcaagtcga

SEQ ID NO: 14766 - DNA, 35 bp, Artificial Sequence
  Synthetic oligonucleotide
cactggatacgacatagttaggacgaatctcagta

SEQ ID NO: 14767 - DNA, 36 bp, Artificial Sequence
  Synthetic oligonucleotide
cgctgattggggccggctacgtgcgacggtcatgga

SEQ ID NO: 14768 - DNA, 36 bp, Artificial Sequence
  Synthetic oligonucleotide
cgtgggccaaggtaaatgcgtgctaggttcactcca

SEQ ID NO: 14769 - DNA, 35 bp, Artificial Sequence
  Synthetic oligonucleotide
cgttcccgatccggtcttaggcattgatgccatgt

SEQ ID NO: 14770 - DNA, 37 bp, Artificial Sequence
  Synthetic oligonucleotide
ctcacccagccaagggcggttggaggtttggacaaga

SEQ ID NO: 14771 - DNA, 37 bp, Artificial Sequence
  Synthetic oligonucleotide
ctccgggaaacaccaataagccagtactgtagcatga

SEQ ID NO: 14772 - DNA, 37 bp, Artificial Sequence
  Synthetic oligonucleotide
gaaatcgtaatgttagacacagacgcccaggtgggga

SEQ ID NO: 14773 - DNA, 38 bp, Artificial Sequence
  Synthetic oligonucleotide
gaataaccacccccagaagttttccacggataggttga

SEQ ID NO: 14774 - DNA, 37 bp, Artificial Sequence
  Synthetic oligonucleotide
gacaaatgttgtgcacagttatagttgttgagtgcga

SEQ ID NO: 14775 - DNA, 38 bp, Artificial Sequence
  Synthetic oligonucleotide
gacacgctgtgaaccgggaatgcggctatcgcatttga

SEQ ID NO: 14776 - DNA, 38 bp, Artificial Sequence
  Synthetic oligonucleotide
gactaggttagtaagactgtctcggcctgacggaatga

SEQ ID NO: 14777 - DNA, 34 bp, Artificial Sequence
  Synthetic oligonucleotide
gaggtaggattaggtaaatcgccaggcccgggac

SEQ ID NO: 14778 - DNA, 38 bp, Artificial Sequence
  Synthetic oligonucleotide
gagtgacactctcgggcaagcatcgagtagtccgttga

SEQ ID NO: 14779 - DNA, 37 bp, Artificial Sequence
  Synthetic oligonucleotide
gagttcgttcactgcaggggagctgtgtcgggtaaga

SEQ ID NO: 14780 - DNA, 37 bp, Artificial Sequence
  Synthetic oligonucleotide
gatacttccgtggaaaggaccgtgatgtagtccctga

SEQ ID NO: 14781 - DNA, 35 bp, Artificial Sequence
  Synthetic oligonucleotide
gatggctgggaagttattcagttgtggatggcatc

SEQ ID NO: 14782 - DNA, 35 bp, Artificial Sequence
  Synthetic oligonucleotide
gcaatagaaggtctggaccagcaagacgccgtcgc

SEQ ID NO: 14783 - DNA, 38 bp, Artificial Sequence
  Synthetic oligonucleotide
gcaccctagtagtgaaactgtaacgcgaatagtcgtga

SEQ ID NO: 14784 - DNA, 36 bp, Artificial Sequence
  Synthetic oligonucleotide
gcatgaaatactttgcagtctcgctgatcgcaaaga

SEQ ID NO: 14785 - DNA, 38 bp, Artificial Sequence
  Synthetic oligonucleotide
gccgaagtaatttgaaccgcgcagaccctcaagcttga

SEQ ID NO: 14786 - DNA, 35 bp, Artificial Sequence
  Synthetic oligonucleotide
gccgttaaatcagaagcgagcagaatttagcgttt

SEQ ID NO: 14787 - DNA, 37 bp, Artificial Sequence
  Synthetic oligonucleotide
gcgaccaagcacgtctagtcagggtgaagcgaaatga

SEQ ID NO: 14788 - DNA, 36 bp, Artificial Sequence
  Synthetic oligonucleotide
gcgacgaccgcacccaaactattgaggatgacatta

SEQ ID NO: 14789 - DNA, 38 bp, Artificial Sequence
  Synthetic oligonucleotide
gcgattgtcaagagtgatgacatcctggtgcatcttga

SEQ ID NO: 14790 - DNA, 35 bp, Artificial Sequence
  Synthetic oligonucleotide
gcggacgtgccgctccatggttactgctgtggcta

SEQ ID NO: 14791 - DNA, 38 bp, Artificial Sequence
  Synthetic oligonucleotide
gctacctggacggaatcctttgcaaggatcggtattga

SEQ ID NO: 14792 - DNA, 36 bp, Artificial Sequence
  Synthetic oligonucleotide
gctgattacgggctcgataatcgaaatattcgtaga

SEQ ID NO: 14793 - DNA, 36 bp, Artificial Sequence
  Synthetic oligonucleotide
gcttgatccgtctgttcattcggtgcgtctctcgga

SEQ ID NO: 14794 - DNA, 36 bp, Artificial Sequence
  Synthetic oligonucleotide
gcttgcgtactttggaaatttaggtttttagaataa

SEQ ID NO: 14795 - DNA, 37 bp, Artificial Sequence
  Synthetic oligonucleotide
ggacgtaagttgatggtataaggatataagtaagaga

SEQ ID NO: 14796 - DNA, 35 bp, Artificial Sequence
  Synthetic oligonucleotide
ggagtgttcacggattagttagtaggcgaaggggg

SEQ ID NO: 14797 - DNA, 38 bp, Artificial Sequence
  Synthetic oligonucleotide
ggggcaaccgactatgagtccaccgtcccgctacgtga

SEQ ID NO: 14798 - DNA, 35 bp, Artificial Sequence
  Synthetic oligonucleotide
gggtgcacggtgtatttatggcctcttggatgtcg

SEQ ID NO: 14799 - DNA, 36 bp, Artificial Sequence
  Synthetic oligonucleotide
ggtcctcagtcgacatccatttgatgtgaagcttga

SEQ ID NO: 14800 - DNA, 38 bp, Artificial Sequence
  Synthetic oligonucleotide
ggtgggcatattggtctgatccacgtaatgtgaactga

SEQ ID NO: 14801 - DNA, 36 bp, Artificial Sequence
  Synthetic oligonucleotide
ggttaagagcatatgcaagacgtctgttctcataaa

SEQ ID NO: 14802 - DNA, 35 bp, Artificial Sequence
  Synthetic oligonucleotide
ggttccctttcgactcgaagttgtaggaatatgct

SEQ ID NO: 14803 - DNA, 35 bp, Artificial Sequence
  Synthetic oligonucleotide
gtaccatgaggtcattacggtaactttggctttgc

SEQ ID NO: 14804 - DNA, 35 bp, Artificial Sequence
  Synthetic oligonucleotide
gtcaccgacggaaggatcctgacttgggagaccgc

SEQ ID NO: 14805 - DNA, 38 bp, Artificial Sequence
  Synthetic oligonucleotide
gtctagcctacgttagattgtattgcactggaatttga

SEQ ID NO: 14806 - DNA, 35 bp, Artificial Sequence
  Synthetic oligonucleotide
gtctgcatgtcactacggacacactgtccacgcaa

SEQ ID NO: 14807 - DNA, 36 bp, Artificial Sequence
  Synthetic oligonucleotide
gtggagcccgcaaggaaaaggtagctagtgagcgca

SEQ ID NO: 14808 - DNA, 37 bp, Artificial Sequence
  Synthetic oligonucleotide
gtggcctaagagataggtaacgtcaacgcagtcacga

SEQ ID NO: 14809 - DNA, 35 bp, Artificial Sequence
  Synthetic oligonucleotide
gtgtacacgcaagtctgagagggagttagtgcgaa

SEQ ID NO: 14810 - DNA, 37 bp, Artificial Sequence
  Synthetic oligonucleotide
gtgtgatgaactgttgcccttggtttcgggatcgtga

SEQ ID NO: 14811 - DNA, 36 bp, Artificial Sequence
  Synthetic oligonucleotide
taacccctaagttgctagagtgtcggctactcacta

SEQ ID NO: 14812 - DNA, 35 bp, Artificial Sequence
  Synthetic oligonucleotide
taacggagcatgggggacacgacgtactttacggg

SEQ ID NO: 14813 - DNA, 36 bp, Artificial Sequence
  Synthetic oligonucleotide
taacgtgtgagggcaaatgtaaatagcacggggata

SEQ ID NO: 14814 - DNA, 35 bp, Artificial Sequence
  Synthetic oligonucleotide
taactgattcgaccagttagcttgcgaggtttggg

SEQ ID NO: 14815 - DNA, 35 bp, Artificial Sequence
  Synthetic oligonucleotide
taagtcgtcgcaaaacaggtaggagaccgctaggg

SEQ ID NO: 14816 - DNA, 38 bp, Artificial Sequence
  Synthetic oligonucleotide
taatgtcatcgggacgtagtcccggtttaacgttctga

SEQ ID NO: 14817 - DNA, 38 bp, Artificial Sequence
  Synthetic oligonucleotide
tacagatttcaataacggtgtataaatgccacgcctga

SEQ ID NO: 14818 - DNA, 37 bp, Artificial Sequence
  Synthetic oligonucleotide
tagtccacctagagtgccgatgctgtgcttacatcga

SEQ ID NO: 14819 - DNA, 35 bp, Artificial Sequence
  Synthetic oligonucleotide
tagttgaggtacttgtatgcttggaaactctccag

SEQ ID NO: 14820 - DNA, 37 bp, Artificial Sequence
  Synthetic oligonucleotide
tatcacgcgctcgagggcactgtggttggactaccga

SEQ ID NO: 14821 - DNA, 33 bp, Artificial Sequence
  Synthetic oligonucleotide
tcaacgttctcgccggtaaagtggggcggattt

SEQ ID NO: 14822 - DNA, 36 bp, Artificial Sequence
  Synthetic oligonucleotide
tcacggtgatgtcgtagtgttgacggggttaactta

SEQ ID NO: 14823 - DNA, 38 bp, Artificial Sequence
  Synthetic oligonucleotide
tcaggtacaaaatttcgtggtactgctgtcctacttga

SEQ ID NO: 14824 - DNA, 35 bp, Artificial Sequence
  Synthetic oligonucleotide
tccaacgggactagactccgtcgctcagtatttta

SEQ ID NO: 14825 - DNA, 38 bp, Artificial Sequence
  Synthetic oligonucleotide
tccccaatggacccacgcggcgaccggcgttcttttga

SEQ ID NO: 14826 - DNA, 37 bp, Artificial Sequence
  Synthetic oligonucleotide
tccctacttcctgtcatataggagttcaaagttttga

SEQ ID NO: 14827 - DNA, 38 bp, Artificial Sequence
  Synthetic oligonucleotide
tcccttgggaggtgtgcggcgttgacgcgcgtttttga

SEQ ID NO: 14828 - DNA, 38 bp, Artificial Sequence
  Synthetic oligonucleotide
tcgagggttacgtcagtcgttcctgcgtgcttctctga

SEQ ID NO: 14829 - DNA, 38 bp, Artificial Sequence
  Synthetic oligonucleotide
tcgcaggaccgccagttgatgtaactaacttacattga

SEQ ID NO: 14830 - DNA, 38 bp, Artificial Sequence
  Synthetic oligonucleotide
tctgttttcggctgattgcgcaaagcatatgctgttga

SEQ ID NO: 14831 - DNA, 36 bp, Artificial Sequence
  Synthetic oligonucleotide
tcttcatgaggtcggcctaagtccacgtcgacagaa

SEQ ID NO: 14832 - DNA, 35 bp, Artificial Sequence
  Synthetic oligonucleotide
tgaacggagtttgtagaacgcatgtcttaattgtc

SEQ ID NO: 14833 - DNA, 36 bp, Artificial Sequence
  Synthetic oligonucleotide
tgacctatatcgaataactgatggacaagtggtgca

SEQ ID NO: 14834 - DNA, 37 bp, Artificial Sequence
  Synthetic oligonucleotide
tgcacgctgtcgtacgcatctgcgaccttttaggtga

SEQ ID NO: 14835 - DNA, 35 bp, Artificial Sequence
  Synthetic oligonucleotide
tgccaagttgtcaccgtgaaatgggaggagacttt

SEQ ID NO: 14836 - DNA, 38 bp, Artificial Sequence
  Synthetic oligonucleotide
tggggaggtccggtatgaatcttcggtcctaggcttga

SEQ ID NO: 14837 - DNA, 35 bp, Artificial Sequence
  Synthetic oligonucleotide
tgtctgcgatctaagactaattaagtctattaact

SEQ ID NO: 14838 - DNA, 36 bp, Artificial Sequence
  Synthetic oligonucleotide
tgtgtggtagtatgatacttcgccatcatatctcga

SEQ ID NO: 14839 - DNA, 38 bp, Artificial Sequence
  Synthetic oligonucleotide
ttacagcagacagcgaatgaaattgcacaagcgagtga

SEQ ID NO: 14840 - DNA, 36 bp, Artificial Sequence
  Synthetic oligonucleotide
ttattcccgtttcttcagtcgacctcaccgaaacta

SEQ ID NO: 14841 - DNA, 36 bp, Artificial Sequence
  Synthetic oligonucleotide
ttcccctcgcataaaggttgagtattacgcgcaaca

SEQ ID NO: 14842 - DNA, 34 bp, Artificial Sequence
  Synthetic oligonucleotide
ttccgtaaggtccgttgtttatccataggccgac

SEQ ID NO: 14843 - DNA, 36 bp, Artificial Sequence
  Synthetic oligonucleotide
ttcgacgagacgcaggaatctagggcgatactgtaa

SEQ ID NO: 14844 - DNA, 36 bp, Artificial Sequence
  Synthetic oligonucleotide
ttgctatagacaatgaccttaattctaatagacgga

SEQ ID NO: 14845 - DNA, 38 bp, Artificial Sequence
  Synthetic oligonucleotide
aaagtcttgggcgagtacgcgtaatgataaagtactga

SEQ ID NO: 14846 - DNA, 38 bp, Artificial Sequence
  Synthetic oligonucleotide
aagggataggtaggccaccgctcgatttttggtgttga

SEQ ID NO: 14847 - DNA, 35 bp, Artificial Sequence
  Synthetic oligonucleotide
aatgcatcatttatatgtcaggcattgcacgcctt

SEQ ID NO: 14848 - DNA, 35 bp, Artificial Sequence
  Synthetic oligonucleotide
acaccacgagcgtggcggagggaagggctatatca

SEQ ID NO: 14849 - DNA, 36 bp, Artificial Sequence
  Synthetic oligonucleotide
accagacttcgggctcagtgtagctgtacatcttga

SEQ ID NO: 14850 - DNA, 37 bp, Artificial Sequence
  Synthetic oligonucleotide
agacccctttcgctagagacagtttgcggactgtgga

SEQ ID NO: 14851 - DNA, 37 bp, Artificial Sequence
  Synthetic oligonucleotide
agacctggaggtatgcgatctaaacgtagaagagaga

SEQ ID NO: 14852 - DNA, 35 bp, Artificial Sequence
  Synthetic oligonucleotide
atctattatcaggtcaatacatgtacaagggctgc

SEQ ID NO: 14853 - DNA, 37 bp, Artificial Sequence
  Synthetic oligonucleotide
atttgttggacaattcagaaggagtacaacctgagga

SEQ ID NO: 14854 - DNA, 38 bp, Artificial Sequence
  Synthetic oligonucleotide
ccctggatccccttggctaagggcttttcgtcaactga

SEQ ID NO: 14855 - DNA, 35 bp, Artificial Sequence
  Synthetic oligonucleotide
ctcgggaaggtaatcggacgaaccgcagggtgacg

SEQ ID NO: 14856 - DNA, 35 bp, Artificial Sequence
  Synthetic oligonucleotide
cttgcgccaggtggatacacaggaatgacgatggt

SEQ ID NO: 14857 - DNA, 36 bp, Artificial Sequence
  Synthetic oligonucleotide
gacacacctcaatgccattctgacatcagtcatcca

SEQ ID NO: 14858 - DNA, 38 bp, Artificial Sequence
  Synthetic oligonucleotide
gacacggaacagaaggttttgcatgttaccgggcgtga

SEQ ID NO: 14859 - DNA, 35 bp, Artificial Sequence
  Synthetic oligonucleotide
gagtcactactgagggacagatgcgcaattgcggg

SEQ ID NO: 14860 - DNA, 37 bp, Artificial Sequence
  Synthetic oligonucleotide
gcacgcaacagccgtctggggttccgataccaagtga

SEQ ID NO: 14861 - DNA, 37 bp, Artificial Sequence
  Synthetic oligonucleotide
gcctgtcttaaatccgcgtatgacaggcccagttgga

SEQ ID NO: 14862 - DNA, 38 bp, Artificial Sequence
  Synthetic oligonucleotide
gctaacggggctcgcccagcgcatatatctcattttga

SEQ ID NO: 14863 - DNA, 37 bp, Artificial Sequence
  Synthetic oligonucleotide
gctcatgcatgtttaaacgccactgcacagaagtgga

SEQ ID NO: 14864 - DNA, 35 bp, Artificial Sequence
  Synthetic oligonucleotide
gctccacaccgggtccatcaggctgtcctagcact

SEQ ID NO: 14865 - DNA, 37 bp, Artificial Sequence
  Synthetic oligonucleotide
ggacaccacagtgtatcctgaacatagccttccatga

SEQ ID NO: 14866 - DNA, 37 bp, Artificial Sequence
  Synthetic oligonucleotide
ggtgagcctgagtcctgggtatgtggggcattactga

SEQ ID NO: 14867 - DNA, 36 bp, Artificial Sequence
  Synthetic oligonucleotide
gtaacgatccagctcggttatatagtggttactgta

SEQ ID NO: 14868 - DNA, 36 bp, Artificial Sequence
  Synthetic oligonucleotide
gtcaccacactgagcgaacctcagaggtgggtggta

SEQ ID NO: 14869 - DNA, 38 bp, Artificial Sequence
  Synthetic oligonucleotide
gtcacggatgaagatctatcagcacagtgcggtattga

SEQ ID NO: 14870 - DNA, 37 bp, Artificial Sequence
  Synthetic oligonucleotide
gtctcaccgagaaggagatatgatggctttgatcgga

SEQ ID NO: 14871 - DNA, 37 bp, Artificial Sequence
  Synthetic oligonucleotide
gttcacgtaaaactgtcttaaggcgatgggtcatgga

SEQ ID NO: 14872 - DNA, 35 bp, Artificial Sequence
  Synthetic oligonucleotide
gttcatgtgatcgttcaccagtatgtattgaatac

SEQ ID NO: 14873 - DNA, 36 bp, Artificial Sequence
  Synthetic oligonucleotide
taagggaaaggtcagctttgagcgccgttgggttta

SEQ ID NO: 14874 - DNA, 37 bp, Artificial Sequence
  Synthetic oligonucleotide
tagacgttgaagtctttgtgatcagttgtgagagtga

SEQ ID NO: 14875 - DNA, 34 bp, Artificial Sequence
  Synthetic oligonucleotide
tagcgagctggctcgccggaggaaatatgctgag

SEQ ID NO: 14876 - DNA, 35 bp, Artificial Sequence
  Synthetic oligonucleotide
tatacggggcaaaaccgactcggaatccattattg

SEQ ID NO: 14877 - DNA, 37 bp, Artificial Sequence
  Synthetic oligonucleotide
tcatactgattccgggcttagtcacagccacaacgga

SEQ ID NO: 14878 - DNA, 37 bp, Artificial Sequence
  Synthetic oligonucleotide
tccgagctaggccttatgttttgagagctgtgtagga

SEQ ID NO: 14879 - DNA, 35 bp, Artificial Sequence
  Synthetic oligonucleotide
tcgcttagccgtttgagtcttggcccaagctcaac

SEQ ID NO: 14880 - DNA, 37 bp, Artificial Sequence
  Synthetic oligonucleotide
tctagacgttgtttataatgtatggctcagttcatga

SEQ ID NO: 14881 - DNA, 36 bp, Artificial Sequence
  Synthetic oligonucleotide
tctcaacgcgttgtggccgacgtactggaaatgtga

SEQ ID NO: 14882 - DNA, 36 bp, Artificial Sequence
  Synthetic oligonucleotide
tgacgaccaccggtggtgtgaaatacacagttttca

SEQ ID NO: 14883 - DNA, 36 bp, Artificial Sequence
  Synthetic oligonucleotide
tgataagctaactgttccattgttgccgcagttcaa

SEQ ID NO: 14884 - DNA, 36 bp, Artificial Sequence
  Synthetic oligonucleotide
tggtatggccactgctttggtgccgcttatatacta

SEQ ID NO: 14885 - DNA, 36 bp, Artificial Sequence
  Synthetic oligonucleotide
ttgcggttactgcgacaaaggattagacgtttggaa

SEQ ID NO: 14886 - DNA, 35 bp, Artificial Sequence
  Synthetic oligonucleotide
gtgcgtacaacagacggtggatacgggctaaccgc

SEQ ID NO: 14887 - DNA, 37 bp, Artificial Sequence
  Synthetic oligonucleotide
atgcgcggttggcgacgtactacaagactcacattga

SEQ ID NO: 14888 - DNA, 35 bp, Artificial Sequence
  Synthetic oligonucleotide
attggcggggagtagcgaattagcacagctgcatg

SEQ ID NO: 14889 - DNA, 37 bp, Artificial Sequence
  Synthetic oligonucleotide
ttccacctggaggccgacgttttgtgataggtcctga

SEQ ID NO: 14890 - DNA, 37 bp, Artificial Sequence
  Synthetic oligonucleotide
aagataaatgcacccggctgtggccactcgtgacgga

SEQ ID NO: 14891 - DNA, 36 bp, Artificial Sequence
  Synthetic oligonucleotide
aatagttggaaggtacgggtaagctatgtgatcgta

SEQ ID NO: 14892 - DNA, 36 bp, Artificial Sequence
  Synthetic oligonucleotide
acatcgacagtcttgactaacctcgtttttgccaga

SEQ ID NO: 14893 - DNA, 36 bp, Artificial Sequence
  Synthetic oligonucleotide
actacgatctctgaaaggtcagaaaaggggaagcca

SEQ ID NO: 14894 - DNA, 35 bp, Artificial Sequence
  Synthetic oligonucleotide
agctagacttcgcgaccagatagcgtgaccataaa

SEQ ID NO: 14895 - DNA, 36 bp, Artificial Sequence
  Synthetic oligonucleotide
atgggtacgttagacgggtcgacgttagactgtaca

SEQ ID NO: 14896 - DNA, 35 bp, Artificial Sequence
  Synthetic oligonucleotide
ctacgttgcactgcaccaaatgggctataaacggg

SEQ ID NO: 14897 - DNA, 38 bp, Artificial Sequence
  Synthetic oligonucleotide
gacctttggacctccttctacaagtcatcccgccatga

SEQ ID NO: 14898 - DNA, 36 bp, Artificial Sequence
  Synthetic oligonucleotide
gacgtcaaacacttgggtattgactagagctgacca

SEQ ID NO: 14899 - DNA, 38 bp, Artificial Sequence
  Synthetic oligonucleotide
gccacatgaagacgattcaaatggttcactatttgtga

SEQ ID NO: 14900 - DNA, 36 bp, Artificial Sequence
  Synthetic oligonucleotide
gcgaaattcagtttcaaccgagctctgctcaaaaga

SEQ ID NO: 14901 - DNA, 37 bp, Artificial Sequence
  Synthetic oligonucleotide
gcggacaactgtatcggacctgcagggtcgaaaagga

SEQ ID NO: 14902 - DNA, 37 bp, Artificial Sequence
  Synthetic oligonucleotide
gcgtactattccgtcgcaaagtacgaaggaagaaaga

SEQ ID NO: 14903 - DNA, 37 bp, Artificial Sequence
  Synthetic oligonucleotide
gggttctgcctgtaatagggatacaacgcaaggggga

SEQ ID NO: 14904 - DNA, 35 bp, Artificial Sequence
  Synthetic oligonucleotide
gtatcttcatctgtcggactgcgttatgccgcggt

SEQ ID NO: 14905 - DNA, 36 bp, Artificial Sequence
  Synthetic oligonucleotide
gtcaaagcctacatttaaggggcgtacagagtgcca

SEQ ID NO: 14906 - DNA, 35 bp, Artificial Sequence
  Synthetic oligonucleotide
gtcagttgacaccccacagatctaaatgttgcggt

SEQ ID NO: 14907 - DNA, 36 bp, Artificial Sequence
  Synthetic oligonucleotide
gttaatcaatgcaggtccacagtgcctcggtgcggg

SEQ ID NO: 14908 - DNA, 35 bp, Artificial Sequence
  Synthetic oligonucleotide
taggggttacgttgggtgatttgtctctgttacag

SEQ ID NO: 14909 - DNA, 36 bp, Artificial Sequence
  Synthetic oligonucleotide
tattcgttcggttcgtcgaaaaaggctatatcaaca

SEQ ID NO: 14910 - DNA, 37 bp, Artificial Sequence
  Synthetic oligonucleotide
tcatcaggtggaatgagaactgtcactatgggttgga

SEQ ID NO: 14911 - DNA, 37 bp, Artificial Sequence
  Synthetic oligonucleotide
tgtggtttggtgtacatgaagatgctgttgtactaga

SEQ ID NO: 14912 - DNA, 37 bp, Artificial Sequence
  Synthetic oligonucleotide
ttaactggcgaaacaagtgtcacgcctcagactcgga

SEQ ID NO: 14913 - DNA, 37 bp, Artificial Sequence
  Synthetic oligonucleotide
ttgagcctctccgatatcctgcttccgtgctgctgga

SEQ ID NO: 14914 - DNA, 35 bp, Artificial Sequence
  Synthetic oligonucleotide
tttacacagtgcaaccgtgatagcctaagacccgg

SEQ ID NO: 14915 - DNA, 36 bp, Artificial Sequence
  Synthetic oligonucleotide
agtgagcagacgaatgggcgacggattcaccacaga

SEQ ID NO: 14916 - DNA, 35 bp, Artificial Sequence
  Synthetic oligonucleotide
gctaaccaccattcatacgagccagtgtgacgagc

SEQ ID NO: 14917 - DNA, 37 bp, Artificial Sequence
  Synthetic oligonucleotide
gggtagcactgccgcgaccaactcggtcaagacatga

SEQ ID NO: 14918 - DNA, 35 bp, Artificial Sequence
  Synthetic oligonucleotide
ttgcattctgcccgtacgaaagtgaatgtaacttg

SEQ ID NO: 14919 - DNA, 36 bp, Artificial Sequence
  Synthetic oligonucleotide
gatgcaggttctttagcctatatgacggacctgcga

SEQ ID NO: 14920 - DNA, 38 bp, Artificial Sequence
  Synthetic oligonucleotide
gatggtggaaatcagggaatgacttaaatcgcgtgtga

SEQ ID NO: 14921 - DNA, 37 bp, Artificial Sequence
  Synthetic oligonucleotide
aaaacagctgctggcttcaccaacagattcacccgga

SEQ ID NO: 14922 - DNA, 35 bp, Artificial Sequence
  Synthetic oligonucleotide
agagccatggacgttttagagattcttcggctttg

SEQ ID NO: 14923 - DNA, 38 bp, Artificial Sequence
  Synthetic oligonucleotide
catcagcatcgtactgtttttggatagccctatcatga

SEQ ID NO: 14924 - DNA, 35 bp, Artificial Sequence
  Synthetic oligonucleotide
tgaagtaaccttgttgcgccctcgttctgtaggtt

SEQ ID NO: 14925 - DNA, 35 bp, Artificial Sequence
  Synthetic oligonucleotide
ttcagtcgagttcttgcgaagtgttgcgctgccag

SEQ ID NO: 14926 - DNA, 37 bp, Artificial Sequence
  Synthetic oligonucleotide
agtattgttcggccctgagttaggtgaccgattaaga

SEQ ID NO: 14927 - DNA, 38 bp, Artificial Sequence
  Synthetic oligonucleotide
atggactcacaatttgagaagtatagcaactgggttga

SEQ ID NO: 14928 - DNA, 38 bp, Artificial Sequence
  Synthetic oligonucleotide
atggtatcccgccgaccgttcgtgcaccgaagtaatga

SEQ ID NO: 14929 - DNA, 37 bp, Artificial Sequence
  Synthetic oligonucleotide
gacggaattccacagtgaatagactaggcttggtaga

SEQ ID NO: 14930 - DNA, 38 bp, Artificial Sequence
  Synthetic oligonucleotide
ttctaacgtctgataagcatccgttgtttagaggctga

SEQ ID NO: 14931 - DNA, 38 bp, Artificial Sequence
  Synthetic oligonucleotide
ttgtgtgaatgggtaagctatcacgacgtcactggtga

SEQ ID NO: 14932 - DNA, 36 bp, Artificial Sequence
  Synthetic oligonucleotide
tactgagctcacggtgattttggttactcggtggta

SEQ ID NO: 14933 - DNA, 37 bp, Artificial Sequence
  Synthetic oligonucleotide
tttaagggaaacgtttgtcccgtatcatttgcgtgga

SEQ ID NO: 14934 - DNA, 38 bp, Artificial Sequence
  Synthetic oligonucleotide
gtatactgaggaagtgtagttgctaggagatactttga

SEQ ID NO: 14935 - DNA, 37 bp, Artificial Sequence
  Synthetic oligonucleotide
tgtcctgtaggtgtagatgctttaagcaactgagcga

SEQ ID NO: 14936 - DNA, 37 bp, Artificial Sequence
  Synthetic oligonucleotide
tgggcgtattacgccaacactctaacgtatcggtgga

SEQ ID NO: 14937 - DNA, 35 bp, Artificial Sequence
  Synthetic oligonucleotide
accgagacaaccctgggaggcggataacatacgta

SEQ ID NO: 14938 - DNA, 37 bp, Artificial Sequence
  Synthetic oligonucleotide
tagcacgggatacaatgtctaattggatggattagga

SEQ ID NO: 14939 - DNA, 37 bp, Artificial Sequence
  Synthetic oligonucleotide
aacatgcacatcttcgaactcacctacctgtgacgga

SEQ ID NO: 14940 - DNA, 38 bp, Artificial Sequence
  Synthetic oligonucleotide
aaccgtgataatgttatgtattgatgtctaggcgttga

SEQ ID NO: 14941 - DNA, 36 bp, Artificial Sequence
  Synthetic oligonucleotide
aagttcgtcctgagggcgttcgacaggagcgggcaa

SEQ ID NO: 14942 - DNA, 36 bp, Artificial Sequence
  Synthetic oligonucleotide
acaatacgtattgatgtaatgcccttgggctatgga

SEQ ID NO: 14943 - DNA, 38 bp, Artificial Sequence
  Synthetic oligonucleotide
accttcgagtcatgtagatacgttgtcactagtgttga

SEQ ID NO: 14944 - DNA, 36 bp, Artificial Sequence
  Synthetic oligonucleotide
atgtcctatgctcgatggtacgcatctggaatgaga

SEQ ID NO: 14945 - DNA, 36 bp, Artificial Sequence
  Synthetic oligonucleotide
caaccccgttgagaacgggaggatgggcctgttgta

SEQ ID NO: 14946 - DNA, 38 bp, Artificial Sequence
  Synthetic oligonucleotide
gcctatgtcacttttatggtagtgtgatatggacatga

SEQ ID NO: 14947 - DNA, 33 bp, Artificial Sequence
  Synthetic oligonucleotide
gcgacttggatcgcacgacgtctagaccctacc

SEQ ID NO: 14948 - DNA, 36 bp, Artificial Sequence
  Synthetic oligonucleotide
ggtcctcgagtctgtctttctcgggaagcttaagta

SEQ ID NO: 14949 - DNA, 35 bp, Artificial Sequence
  Synthetic oligonucleotide
gtcatgaattaaggtggtgtgctagctgcacaacg

SEQ ID NO: 14950 - DNA, 35 bp, Artificial Sequence
  Synthetic oligonucleotide
gttactgtagatcaatcgactataacacggggcat

SEQ ID NO: 14951 - DNA, 36 bp, Artificial Sequence
  Synthetic oligonucleotide
taacccgggaccttgtcaaacggagggcggttgtta

SEQ ID NO: 14952 - DNA, 32 bp, Artificial Sequence
  Synthetic oligonucleotide
tgaaataagccctcacaggggtttttccaaca

SEQ ID NO: 14953 - DNA, 35 bp, Artificial Sequence
  Synthetic oligonucleotide
tgtagacgagatgaggctcgactgtccgcctggtt

SEQ ID NO: 14954 - DNA, 38 bp, Artificial Sequence
  Synthetic oligonucleotide
tgtcggtcacggtgacgctgtaggtccaggtagcttga

SEQ ID NO: 14955 - DNA, 35 bp, Artificial Sequence
  Synthetic oligonucleotide
aaaatgagcatattctcgcacgcagttcaaggtgc

SEQ ID NO: 14956 - DNA, 38 bp, Artificial Sequence
  Synthetic oligonucleotide
aaacaaactcacgcagtgcatgagattgagatgattga

SEQ ID NO: 14957 - DNA, 37 bp, Artificial Sequence
  Synthetic oligonucleotide
aacatggtcgagtgagagcaaatggcagtcatggaga

SEQ ID NO: 14958 - DNA, 37 bp, Artificial Sequence
  Synthetic oligonucleotide
aaccaaaccaccttgtgtattcgaggggggggaagga

SEQ ID NO: 14959 - DNA, 36 bp, Artificial Sequence
  Synthetic oligonucleotide
aaccagcgctagtagaagggtgctgtggtctttgta

SEQ ID NO: 14960 - DNA, 38 bp, Artificial Sequence
  Synthetic oligonucleotide
aactccccaggatgcaggtctttgcccggctacaatga

SEQ ID NO: 14961 - DNA, 35 bp, Artificial Sequence
  Synthetic oligonucleotide
aactgacgtaaatcttgtgccagtggtacacatgt

SEQ ID NO: 14962 - DNA, 35 bp, Artificial Sequence
  Synthetic oligonucleotide
aagcttagcggtggacgcaagtactgagccgaaac

SEQ ID NO: 14963 - DNA, 37 bp, Artificial Sequence
  Synthetic oligonucleotide
aagtgaagcttttgtcacacatgtaggataagattga

SEQ ID NO: 14964 - DNA, 36 bp, Artificial Sequence
  Synthetic oligonucleotide
acaataaaacgggacatggaactgcgttgctatgaa

SEQ ID NO: 14965 - DNA, 36 bp, Artificial Sequence
  Synthetic oligonucleotide
acataacagacgggcagtcatgtttgggtttgacga

SEQ ID NO: 14966 - DNA, 37 bp, Artificial Sequence
  Synthetic oligonucleotide
accaatagctgccattgttgcctaggcacggattgga

SEQ ID NO: 14967 - DNA, 35 bp, Artificial Sequence
  Synthetic oligonucleotide
accacactttgtgcaacgcgggcttcaggaatgca

SEQ ID NO: 14968 - DNA, 36 bp, Artificial Sequence
  Synthetic oligonucleotide
accacgggtgtatctgcgctgccctgacctgaaaga

SEQ ID NO: 14969 - DNA, 38 bp, Artificial Sequence
  Synthetic oligonucleotide
acccaagaggtaaggtgtgccttcctgtcacgttctga

SEQ ID NO: 14970 - DNA, 35 bp, Artificial Sequence
  Synthetic oligonucleotide
accccctccgacgtcgtacagtagaggctaattga

SEQ ID NO: 14971 - DNA, 37 bp, Artificial Sequence
  Synthetic oligonucleotide
acccctcactttgatgaatcctgacctgagtagaaga

SEQ ID NO: 14972 - DNA, 35 bp, Artificial Sequence
  Synthetic oligonucleotide
accgagatacctctattggaccaattgcatctgct

SEQ ID NO: 14973 - DNA, 38 bp, Artificial Sequence
  Synthetic oligonucleotide
acctcgccaacaggttagttgagctatctaggaagtga

SEQ ID NO: 14974 - DNA, 35 bp, Artificial Sequence
  Synthetic oligonucleotide
acgacgacagtcccaaaggtaaggtcatgctaagt

SEQ ID NO: 14975 - DNA, 38 bp, Artificial Sequence
  Synthetic oligonucleotide
acgggaagggacaagcctaactatgtgtcagttgttga

SEQ ID NO: 14976 - DNA, 38 bp, Artificial Sequence
  Synthetic oligonucleotide
actaggggtacagtcaagcgtgggggtggaaacgttga

SEQ ID NO: 14977 - DNA, 35 bp, Artificial Sequence
  Synthetic oligonucleotide
actgtcttgcagtggatactagaataacaaactgc

SEQ ID NO: 14978 - DNA, 38 bp, Artificial Sequence
  Synthetic oligonucleotide
agaattggaacagatggttggcccatgcgcaacactga

SEQ ID NO: 14979 - DNA, 38 bp, Artificial Sequence
  Synthetic oligonucleotide
agactgccggggggtttctccagggtcttagtaggtga

SEQ ID NO: 14980 - DNA, 37 bp, Artificial Sequence
  Synthetic oligonucleotide
agcgtgtccctttgtatggtcgatggtcacattgtga

SEQ ID NO: 14981 - DNA, 35 bp, Artificial Sequence
  Synthetic oligonucleotide
agtacacggcgcttactctaacggcttagggccgc

SEQ ID NO: 14982 - DNA, 36 bp, Artificial Sequence
  Synthetic oligonucleotide
agtactaagggatgacaccagtgtacgttgagccca

SEQ ID NO: 14983 - DNA, 35 bp, Artificial Sequence
  Synthetic oligonucleotide
agtagccgtaacactaaatgtgtacttactatcgt

SEQ ID NO: 14984 - DNA, 35 bp, Artificial Sequence
  Synthetic oligonucleotide
agtcatgcgggacagggacttgaaacgccggtgaa

SEQ ID NO: 14985 - DNA, 37 bp, Artificial Sequence
  Synthetic oligonucleotide
atcacgaggggtacgtgcatctagggcctaattttga

SEQ ID NO: 14986 - DNA, 37 bp, Artificial Sequence
  Synthetic oligonucleotide
atcgaacgtgacctcggtttaataggctgggctttga

SEQ ID NO: 14987 - DNA, 35 bp, Artificial Sequence
  Synthetic oligonucleotide
atcgtcccaggagatggggagtaatacgtagctgt

SEQ ID NO: 14988 - DNA, 37 bp, Artificial Sequence
  Synthetic oligonucleotide
atcgttgtccacattttgaggatttggacgggtatga

SEQ ID NO: 14989 - DNA, 36 bp, Artificial Sequence
  Synthetic oligonucleotide
atgacctgtcgcccaagtgcgaaaaggggcgttgta

SEQ ID NO: 14990 - DNA, 37 bp, Artificial Sequence
  Synthetic oligonucleotide
attctagggtgtctaactgccttacacggcgcttgga

SEQ ID NO: 14991 - DNA, 37 bp, Artificial Sequence
  Synthetic oligonucleotide
attgtgggagagagccgaccacggggaacaaactgga

SEQ ID NO: 14992 - DNA, 35 bp, Artificial Sequence
  Synthetic oligonucleotide
caacacttaggcgttcgagcctcagggtgctgcct

SEQ ID NO: 14993 - DNA, 35 bp, Artificial Sequence
  Synthetic oligonucleotide
catggattgatggggtggcgctgcgggaactggat

SEQ ID NO: 14994 - DNA, 35 bp, Artificial Sequence
  Synthetic oligonucleotide
ccagggccaaatcgatttatatgagtgcggattta

SEQ ID NO: 14995 - DNA, 37 bp, Artificial Sequence
  Synthetic oligonucleotide
ccgcattagcggcactctgtatgtacaggtgcttgga

SEQ ID NO: 14996 - DNA, 35 bp, Artificial Sequence
  Synthetic oligonucleotide
gaacaactcaggtcgttgcctgagttgatgcggct

SEQ ID NO: 14997 - DNA, 36 bp, Artificial Sequence
  Synthetic oligonucleotide
gaacagacagatggtgacttcatggtcaacgctcga

SEQ ID NO: 14998 - DNA, 35 bp, Artificial Sequence
  Synthetic oligonucleotide
gaagacatacagcagttatcaggattagacaacgt

SEQ ID NO: 14999 - DNA, 35 bp, Artificial Sequence
  Synthetic oligonucleotide
gaatagggtgttgtacaatcgagccggagcgtgtc

SEQ ID NO: 15000 - DNA, 37 bp, Artificial Sequence
  Synthetic oligonucleotide
gaccatggaatattgtgggtgagtgagatgctaggga

SEQ ID NO: 15001 - DNA, 37 bp, Artificial Sequence
  Synthetic oligonucleotide
gacgggtataacaggtgtgccgttaggatgatttaga

SEQ ID NO: 15002 - DNA, 36 bp, Artificial Sequence
  Synthetic oligonucleotide
gacggtcgccatggggttgggtactgccgcaaatga

SEQ ID NO: 15003 - DNA, 36 bp, Artificial Sequence
  Synthetic oligonucleotide
gagcagtcaagcggtcacattcaagttcgtactcga

SEQ ID NO: 15004 - DNA, 37 bp, Artificial Sequence
  Synthetic oligonucleotide
gaggttacgcagtctcctgccttaagtcagtcgctga

SEQ ID NO: 15005 - DNA, 35 bp, Artificial Sequence
  Synthetic oligonucleotide
gagtcactttacttggcaattacgcccccctgttc

SEQ ID NO: 15006 - DNA, 36 bp, Artificial Sequence
  Synthetic oligonucleotide
gataaaacactcgcatcagaacgtcggatagcctaa

SEQ ID NO: 15007 - DNA, 38 bp, Artificial Sequence
  Synthetic oligonucleotide
gatcggatccgcggtacgagttcgtcatagcagtttga

SEQ ID NO: 15008 - DNA, 36 bp, Artificial Sequence
  Synthetic oligonucleotide
gatcgttaagcattatttagttagggtttgcgatga

SEQ ID NO: 15009 - DNA, 37 bp, Artificial Sequence
  Synthetic oligonucleotide
gatgcatgatcgaggtaactagtcgtagtgggaggga

SEQ ID NO: 15010 - DNA, 38 bp, Artificial Sequence
  Synthetic oligonucleotide
gatttgttgtgctacagtgattgggtgacagccgttga

SEQ ID NO: 15011 - DNA, 35 bp, Artificial Sequence
  Synthetic oligonucleotide
gcaacgggatcattcgggtgtaatttcatataaaa

SEQ ID NO: 15012 - DNA, 36 bp, Artificial Sequence
  Synthetic oligonucleotide
gcaccagtaggactatgcaatacgtaagtgcaggga

SEQ ID NO: 15013 - DNA, 36 bp, Artificial Sequence
  Synthetic oligonucleotide
gcatgcgcgtgaacgaagaagcatagtaggcgccga

SEQ ID NO: 15014 - DNA, 35 bp, Artificial Sequence
  Synthetic oligonucleotide
gccccctacgattgttcccccgtatccgtaagtgg

SEQ ID NO: 15015 - DNA, 35 bp, Artificial Sequence
  Synthetic oligonucleotide
gccggagctcgaatattcagactgttgtatccaag

SEQ ID NO: 15016 - DNA, 36 bp, Artificial Sequence
  Synthetic oligonucleotide
gccggattttgctctacaggattcaggtgttaaata

SEQ ID NO: 15017 - DNA, 35 bp, Artificial Sequence
  Synthetic oligonucleotide
gcctgccctgtagaataattttagttgacgacgtt

SEQ ID NO: 15018 - DNA, 37 bp, Artificial Sequence
  Synthetic oligonucleotide
gctgtcgaatggtaggaattttcatgcaccttggaga

SEQ ID NO: 15019 - DNA, 35 bp, Artificial Sequence
  Synthetic oligonucleotide
gcttccccatctcttctgttcaggtcactggtcgt

SEQ ID NO: 15020 - DNA, 38 bp, Artificial Sequence
  Synthetic oligonucleotide
ggaatggggccgcggtaccgaggcttcctatgcggtga

SEQ ID NO: 15021 - DNA, 36 bp, Artificial Sequence
  Synthetic oligonucleotide
ggacaaagcaactcgacgtttgtacagtgctgcaga

SEQ ID NO: 15022 - DNA, 35 bp, Artificial Sequence
  Synthetic oligonucleotide
ggacgaagcagagagtactagccgggacaggcttt

SEQ ID NO: 15023 - DNA, 35 bp, Artificial Sequence
  Synthetic oligonucleotide
ggacgacgctgcacaggaatccagataaggtggat

SEQ ID NO: 15024 - DNA, 36 bp, Artificial Sequence
  Synthetic oligonucleotide
ggatcgtctcctccgtacacagagtgacaggcaata

SEQ ID NO: 15025 - DNA, 35 bp, Artificial Sequence
  Synthetic oligonucleotide
ggatctgacgtgcagattaaaacacaacgttgttc

SEQ ID NO: 15026 - DNA, 38 bp, Artificial Sequence
  Synthetic oligonucleotide
ggcgatgtactcgacaagcgccaggtacaagaacatga

SEQ ID NO: 15027 - DNA, 38 bp, Artificial Sequence
  Synthetic oligonucleotide
ggctaggtaccagataaccatgctgatgtaaggcgtga

SEQ ID NO: 15028 - DNA, 36 bp, Artificial Sequence
  Synthetic oligonucleotide
ggctattgatcaattagtgggaagtttttgcgtgaa

SEQ ID NO: 15029 - DNA, 38 bp, Artificial Sequence
  Synthetic oligonucleotide
gggagcagttctcatgggtttggccataggtaacttga

SEQ ID NO: 15030 - DNA, 34 bp, Artificial Sequence
  Synthetic oligonucleotide
ggggcactaggttagtacaagccgacccgtttgc

SEQ ID NO: 15031 - DNA, 37 bp, Artificial Sequence
  Synthetic oligonucleotide
gggttcagatacgtcagttgacgtgcggaggactgga

SEQ ID NO: 15032 - DNA, 38 bp, Artificial Sequence
  Synthetic oligonucleotide
ggtgcgacgatgctaagacgcctcatcaacgtacctga

SEQ ID NO: 15033 - DNA, 35 bp, Artificial Sequence
  Synthetic oligonucleotide
ggtggggtgtcgtggggtcaacgctacggccctat

SEQ ID NO: 15034 - DNA, 35 bp, Artificial Sequence
  Synthetic oligonucleotide
ggttacaactccaagcccgtaatacacgtagcaag

SEQ ID NO: 15035 - DNA, 37 bp, Artificial Sequence
  Synthetic oligonucleotide
ggtttcgacttgcaaggaacgctgatcatgatatgga

SEQ ID NO: 15036 - DNA, 37 bp, Artificial Sequence
  Synthetic oligonucleotide
gtaaaacaaagtgtatcattatgtacgcccaaaggga

SEQ ID NO: 15037 - DNA, 35 bp, Artificial Sequence
  Synthetic oligonucleotide
gtacgttgaggtgaaaactggatacgcgactgccg

SEQ ID NO: 15038 - DNA, 35 bp, Artificial Sequence
  Synthetic oligonucleotide
gtatgagtaacagcttgacaggagtaaagcatacg

SEQ ID NO: 15039 - DNA, 35 bp, Artificial Sequence
  Synthetic oligonucleotide
gtcccgtttatgcgctatatttgtcgcgtagccca

SEQ ID NO: 15040 - DNA, 37 bp, Artificial Sequence
  Synthetic oligonucleotide
gtcctcggaacgcgaagggcttcccttactcttgaga

SEQ ID NO: 15041 - DNA, 38 bp, Artificial Sequence
  Synthetic oligonucleotide
gtgccacgtgtgtgttctgaacgtactatcagccatga

SEQ ID NO: 15042 - DNA, 35 bp, Artificial Sequence
  Synthetic oligonucleotide
gtgccgaactaaatacatcgcatgctagtttagaa

SEQ ID NO: 15043 - DNA, 36 bp, Artificial Sequence
  Synthetic oligonucleotide
gtgctgctggtgagggatatattctgtaccccgata

SEQ ID NO: 15044 - DNA, 35 bp, Artificial Sequence
  Synthetic oligonucleotide
gtggagcgacggaggttctccgttgtctaaaacgt

SEQ ID NO: 15045 - DNA, 35 bp, Artificial Sequence
  Synthetic oligonucleotide
gtggtaactgatcgtatgtgttcggttgggaaaaa

SEQ ID NO: 15046 - DNA, 36 bp, Artificial Sequence
  Synthetic oligonucleotide
gtgtctttgtcaaaggtgggctagggacttcacaaa

SEQ ID NO: 15047 - DNA, 36 bp, Artificial Sequence
  Synthetic oligonucleotide
gttgcaacggcatcgggccacgtattcagggcggga

SEQ ID NO: 15048 - DNA, 38 bp, Artificial Sequence
  Synthetic oligonucleotide
gtttggtttaggagtggagccgccatggctacgcatga

SEQ ID NO: 15049 - DNA, 37 bp, Artificial Sequence
  Synthetic oligonucleotide
taaagcccatcaagtgagacgtttgaaaagtagcgga

SEQ ID NO: 15050 - DNA, 38 bp, Artificial Sequence
  Synthetic oligonucleotide
taagcaaaatgtgtttccaaggtgtcccgtgcatatga

SEQ ID NO: 15051 - DNA, 35 bp, Artificial Sequence
  Synthetic oligonucleotide
taagcaatacacagctacctcacgtgatttgcaag

SEQ ID NO: 15052 - DNA, 35 bp, Artificial Sequence
  Synthetic oligonucleotide
tacgttgctcacggctgtctagacaggtgctaacc

SEQ ID NO: 15053 - DNA, 35 bp, Artificial Sequence
  Synthetic oligonucleotide
tactctgcgtctcgagcacgaggcccgcctgcggg

SEQ ID NO: 15054 - DNA, 37 bp, Artificial Sequence
  Synthetic oligonucleotide
tagcacacgggactgccatgtgtgttaattaagggga

SEQ ID NO: 15055 - DNA, 36 bp, Artificial Sequence
  Synthetic oligonucleotide
tagcctaatacacgccgaatgtgtaggcccgtctta

SEQ ID NO: 15056 - DNA, 37 bp, Artificial Sequence
  Synthetic oligonucleotide
tagctgcctggtgcactgcgcaaagtcatacagtgga

SEQ ID NO: 15057 - DNA, 36 bp, Artificial Sequence
  Synthetic oligonucleotide
tagttcaacccgggaggctcggcgtttgattaacga

SEQ ID NO: 15058 - DNA, 38 bp, Artificial Sequence
  Synthetic oligonucleotide
tcaatattcacgtggatgcagatacgttttgggcatga

SEQ ID NO: 15059 - DNA, 37 bp, Artificial Sequence
  Synthetic oligonucleotide
tcacaatgcgctccgagcaagtctgcgaagtacttga

SEQ ID NO: 15060 - DNA, 35 bp, Artificial Sequence
  Synthetic oligonucleotide
tcacgaagtctatacgcacgagattaaccgtcgat

SEQ ID NO: 15061 - DNA, 36 bp, Artificial Sequence
  Synthetic oligonucleotide
tcattcacccctcttgctgaaggacagtccatctaa

SEQ ID NO: 15062 - DNA, 35 bp, Artificial Sequence
  Synthetic oligonucleotide
tccgagggtagaggtaggcatgttcttcccggtgt

SEQ ID NO: 15063 - DNA, 35 bp, Artificial Sequence
  Synthetic oligonucleotide
tccgatgtcaatcggtatatggtgcgtcttctagg

SEQ ID NO: 15064 - DNA, 35 bp, Artificial Sequence
  Synthetic oligonucleotide
tccgtctgaggggagatgaatagtcgtgaagcgag

SEQ ID NO: 15065 - DNA, 37 bp, Artificial Sequence
  Synthetic oligonucleotide
tcctccattccagtacttcttaagggtacgtggtcga

SEQ ID NO: 15066 - DNA, 37 bp, Artificial Sequence
  Synthetic oligonucleotide
tcgaacataataggggaacggacgcctgagtacgcga

SEQ ID NO: 15067 - DNA, 35 bp, Artificial Sequence
  Synthetic oligonucleotide
tcgagtaatggtcgaacgtgtatccagaatcactc

SEQ ID NO: 15068 - DNA, 37 bp, Artificial Sequence
  Synthetic oligonucleotide
tcgatgattgatcttgcgttttagatgttcgatcgga

SEQ ID NO: 15069 - DNA, 36 bp, Artificial Sequence
  Synthetic oligonucleotide
tcgctagggtgatagtgaacggtcgcatcaacggga

SEQ ID NO: 15070 - DNA, 36 bp, Artificial Sequence
  Synthetic oligonucleotide
tctgtacgaccgaatagaacatttagaatgaaggga

SEQ ID NO: 15071 - DNA, 36 bp, Artificial Sequence
  Synthetic oligonucleotide
tgacaaggcacattaaggctaagcggttggctaaga

SEQ ID NO: 15072 - DNA, 36 bp, Artificial Sequence
  Synthetic oligonucleotide
tgagctaagttgctaggcttaatgtgtcctatttga

SEQ ID NO: 15073 - DNA, 35 bp, Artificial Sequence
  Synthetic oligonucleotide
tgagtgggggcagttaaggttattacttcccagtg

SEQ ID NO: 15074 - DNA, 38 bp, Artificial Sequence
  Synthetic oligonucleotide
tgatcgtactcggggagaccagccgatgttctacttga

SEQ ID NO: 15075 - DNA, 36 bp, Artificial Sequence
  Synthetic oligonucleotide
tgcaatggcttgggcacatggcccatttatgccaaa

SEQ ID NO: 15076 - DNA, 35 bp, Artificial Sequence
  Synthetic oligonucleotide
tgcacgaaacgcgtgtcgtacatgcaagagagcgc

SEQ ID NO: 15077 - DNA, 35 bp, Artificial Sequence
  Synthetic oligonucleotide
tgcactacttcggcctgggagtaacgcaggtaggc

SEQ ID NO: 15078 - DNA, 37 bp, Artificial Sequence
  Synthetic oligonucleotide
tgcgtaggaaatgtacacaggtgattgcctaaacgga

SEQ ID NO: 15079 - DNA, 36 bp, Artificial Sequence
  Synthetic oligonucleotide
tgtaacctctccgatatacgttagctcgtgctacca

SEQ ID NO: 15080 - DNA, 36 bp, Artificial Sequence
  Synthetic oligonucleotide
tgtctaagaaaagctaaggaagcgcgtggcctgcga

SEQ ID NO: 15081 - DNA, 36 bp, Artificial Sequence
  Synthetic oligonucleotide
tgttaggtaccctatggaatcgaatcgggattgcaa

SEQ ID NO: 15082 - DNA, 35 bp, Artificial Sequence
  Synthetic oligonucleotide
ttcagtgcacgcaccggactgttcagactcactga

SEQ ID NO: 15083 - DNA, 36 bp, Artificial Sequence
  Synthetic oligonucleotide
ttccaaggtgcgccagtttgatcaacttgttgtgta

SEQ ID NO: 15084 - DNA, 35 bp, Artificial Sequence
  Synthetic oligonucleotide
ttcccccagccgatactcacagccaggtccccata

SEQ ID NO: 15085 - DNA, 37 bp, Artificial Sequence
  Synthetic oligonucleotide
ttccgtacaaggtaattggatcagtggctcatcctga

SEQ ID NO: 15086 - DNA, 36 bp, Artificial Sequence
  Synthetic oligonucleotide
ttctgtcgtacaacgctcatgatcaattaatctaaa

SEQ ID NO: 15087 - DNA, 35 bp, Artificial Sequence
  Synthetic oligonucleotide
ttcttagcggagaagagtcccctacgtcttcgcta

SEQ ID NO: 15088 - DNA, 37 bp, Artificial Sequence
  Synthetic oligonucleotide
ttgcgcaggcggtattctccgtgctaagattcaccaa

SEQ ID NO: 15089 - DNA, 35 bp, Artificial Sequence
  Synthetic oligonucleotide
ttgcgtaattgttctgaaacaatgtagacccgtat

SEQ ID NO: 15090 - DNA, 37 bp, Artificial Sequence
  Synthetic oligonucleotide
ttggaactgccagtttcaagaatagaggcaggcatga

SEQ ID NO: 15091 - DNA, 37 bp, Artificial Sequence
  Synthetic oligonucleotide
ttgggtgggtggtggccgtgatgagaggtcgtcttga

SEQ ID NO: 15092 - DNA, 36 bp, Artificial Sequence
  Synthetic oligonucleotide
ttgtcagttcgtagaggtgtcctggtaattctggta

SEQ ID NO: 15093 - DNA, 36 bp, Artificial Sequence
  Synthetic oligonucleotide
ttgtcataactggggttaagctggatacctggaata

SEQ ID NO: 15094 - DNA, 37 bp, Artificial Sequence
  Synthetic oligonucleotide
tttcaaagtacggttagtccgtccggatagcttttga

SEQ ID NO: 15095 - DNA, 36 bp, Artificial Sequence
  Synthetic oligonucleotide
tttggggatcgaccacatgggtgatatggtccctta

SEQ ID NO: 15096 - DNA, 35 bp, Artificial Sequence
  Synthetic oligonucleotide
agagcggtagtggtactgcaggggacaacgatgac

SEQ ID NO: 15097 - DNA, 38 bp, Artificial Sequence
  Synthetic oligonucleotide
ggaggcctcggcgatacgtgctctatcacgttcgctga

SEQ ID NO: 15098 - DNA, 36 bp, Artificial Sequence
  Synthetic oligonucleotide
gtgcagaccatagtaagagcttccgggccaaatcta

SEQ ID NO: 15099 - DNA, 35 bp, Artificial Sequence
  Synthetic oligonucleotide
taatcgtgcctaagtactggagggggacgtaaata

SEQ ID NO: 15100 - DNA, 38 bp, Artificial Sequence
  Synthetic oligonucleotide
aatgattcaaggtgtggctaagaagtatctaggtctga

SEQ ID NO: 15101 - DNA, 35 bp, Artificial Sequence
  Synthetic oligonucleotide
agacccatgctcccttagaagttagtacgttgcga

SEQ ID NO: 15102 - DNA, 35 bp, Artificial Sequence
  Synthetic oligonucleotide
gcgagtatcagcaccttcgtacaatggctgggtaa

SEQ ID NO: 15103 - DNA, 37 bp, Artificial Sequence
  Synthetic oligonucleotide
ggtcactggtctcatgcatagagacaagcatctacga

SEQ ID NO: 15104 - DNA, 38 bp, Artificial Sequence
  Synthetic oligonucleotide
aactaccgtggtactggttaaatcatgttgcacgctga

SEQ ID NO: 15105 - DNA, 36 bp, Artificial Sequence
  Synthetic oligonucleotide
aaaagtgtcggaagtttggtctctgccactgtaaaa

SEQ ID NO: 15106 - DNA, 36 bp, Artificial Sequence
  Synthetic oligonucleotide
gacaaacacggtgtccgagaagggcgcctcgcatca

SEQ ID NO: 15107 - DNA, 37 bp, Artificial Sequence
  Synthetic oligonucleotide
tacgtgcgaactgttgtactggcgaagagggcttaga

SEQ ID NO: 15108 - DNA, 37 bp, Artificial Sequence
  Synthetic oligonucleotide
agcggtcgattgaccgtttgaaacttgcaaaagacga

SEQ ID NO: 15109 - DNA, 33 bp, Artificial Sequence
  Synthetic oligonucleotide
aggatctagtgtcctttgctaatgggaaaaaca

SEQ ID NO: 15110 - DNA, 37 bp, Artificial Sequence
  Synthetic oligonucleotide
tacaccaaatgcgattaccgactcccgtgaagttaga

SEQ ID NO: 15111 - DNA, 37 bp, Artificial Sequence
  Synthetic oligonucleotide
aaagcactggtcgggacttattggatacgtctgttga

SEQ ID NO: 15112 - DNA, 38 bp, Artificial Sequence
  Synthetic oligonucleotide
aacggcttgtctacgcgttaggagccccgcccacgtga

SEQ ID NO: 15113 - DNA, 36 bp, Artificial Sequence
  Synthetic oligonucleotide
aagcttccagtcatgagctggtaggtgtttgcagaa

SEQ ID NO: 15114 - DNA, 38 bp, Artificial Sequence
  Synthetic oligonucleotide
accccagtcaagtgcggtaaagggacctccgagcgtga

SEQ ID NO: 15115 - DNA, 36 bp, Artificial Sequence
  Synthetic oligonucleotide
accgagacgttttacgatcctacgagacaaggataa

SEQ ID NO: 15116 - DNA, 35 bp, Artificial Sequence
  Synthetic oligonucleotide
agaacgtgcaatgcgtagtcgagcgataggtaact

SEQ ID NO: 15117 - DNA, 36 bp, Artificial Sequence
  Synthetic oligonucleotide
agccgaaagaaggaagtgttgtcacggctcgtttta

SEQ ID NO: 15118 - DNA, 37 bp, Artificial Sequence
  Synthetic oligonucleotide
agggataggaacacacttccctatttgggctgacaga

SEQ ID NO: 15119 - DNA, 35 bp, Artificial Sequence
  Synthetic oligonucleotide
agtgaacaaggtgatggttccgtgctcttatttct

SEQ ID NO: 15120 - DNA, 38 bp, Artificial Sequence
  Synthetic oligonucleotide
atgctaatcgcgtcacgtaatgcactggactttcctga

SEQ ID NO: 15121 - DNA, 35 bp, Artificial Sequence
  Synthetic oligonucleotide
gaagggatgcgagctcttattctcataaagttcaa

SEQ ID NO: 15122 - DNA, 36 bp, Artificial Sequence
  Synthetic oligonucleotide
gcgtgatatgttggagccattgtggacacgtgacta

SEQ ID NO: 15123 - DNA, 37 bp, Artificial Sequence
  Synthetic oligonucleotide
gggaaaggttctttcgaacgtaattcacacggtgtga

SEQ ID NO: 15124 - DNA, 38 bp, Artificial Sequence
  Synthetic oligonucleotide
gtcgaccgcaggacggtggaaaaccaagtaaacggtga

SEQ ID NO: 15125 - DNA, 37 bp, Artificial Sequence
  Synthetic oligonucleotide
gtcgggcactgcagttaggccgcaagttagcttgcga

SEQ ID NO: 15126 - DNA, 37 bp, Artificial Sequence
  Synthetic oligonucleotide
gtgatggactgaatgtagtcaaggtcatggagtacga

SEQ ID NO: 15127 - DNA, 38 bp, Artificial Sequence
  Synthetic oligonucleotide
tcacactgtgccatgcgggggatttatgcctgtgatga

SEQ ID NO: 15128 - DNA, 36 bp, Artificial Sequence
  Synthetic oligonucleotide
tcacggtaattaagcagtctcctccactggctcgca

SEQ ID NO: 15129 - DNA, 35 bp, Artificial Sequence
  Synthetic oligonucleotide
tggtactcaaattagtttgataggagttgctgcaa

SEQ ID NO: 15130 - DNA, 37 bp, Artificial Sequence
  Synthetic oligonucleotide
accccaacgtcgctgcctaaacatgtgttgtgtatga

SEQ ID NO: 15131 - DNA, 35 bp, Artificial Sequence
  Synthetic oligonucleotide
aaactacgatggcgccattatcatatggctggagc

SEQ ID NO: 15132 - DNA, 35 bp, Artificial Sequence
  Synthetic oligonucleotide
acatgagcctaccttctgtctgccgagtagctttc

SEQ ID NO: 15133 - DNA, 36 bp, Artificial Sequence
  Synthetic oligonucleotide
accagtcaaggagggtcgacccttggtatttatgca

SEQ ID NO: 15134 - DNA, 35 bp, Artificial Sequence
  Synthetic oligonucleotide
accttagtgctgctgtgtgcgttctgcaggatttt

SEQ ID NO: 15135 - DNA, 38 bp, Artificial Sequence
  Synthetic oligonucleotide
acgtggttcggtataaggagccaaagctgatttgctga

SEQ ID NO: 15136 - DNA, 37 bp, Artificial Sequence
  Synthetic oligonucleotide
agagcacacatgcttttctagaatcggctacaccgga

SEQ ID NO: 15137 - DNA, 35 bp, Artificial Sequence
  Synthetic oligonucleotide
ataggtcaagcactagtatcagaagacggacccgt

SEQ ID NO: 15138 - DNA, 35 bp, Artificial Sequence
  Synthetic oligonucleotide
atggaatacgttgtcataatcatggtctcacgagt

SEQ ID NO: 15139 - DNA, 37 bp, Artificial Sequence
  Synthetic oligonucleotide
atggggcacaggggtgccgtagggatgatcttgccga

SEQ ID NO: 15140 - DNA, 37 bp, Artificial Sequence
  Synthetic oligonucleotide
attcccatggagaggtgagctatggaattcagtaaga

SEQ ID NO: 15141 - DNA, 35 bp, Artificial Sequence
  Synthetic oligonucleotide
cctgtagggtgaaggtacgtctgctaatggggatg

SEQ ID NO: 15142 - DNA, 35 bp, Artificial Sequence
  Synthetic oligonucleotide
gacatatggctggtggtcttgtgctataacacttc

SEQ ID NO: 15143 - DNA, 38 bp, Artificial Sequence
  Synthetic oligonucleotide
gacttggagtatgtcacgatgaaagtaatatgtcttga

SEQ ID NO: 15144 - DNA, 37 bp, Artificial Sequence
  Synthetic oligonucleotide
gatactaagtcgaacgacgggtgggcaaactaaggga

SEQ ID NO: 15145 - DNA, 38 bp, Artificial Sequence
  Synthetic oligonucleotide
gcacagtgttctgaagcaggataacatcgcacgtatga

SEQ ID NO: 15146 - DNA, 38 bp, Artificial Sequence
  Synthetic oligonucleotide
gggagtatatatacgtctgtatgacggtgagtctatga

SEQ ID NO: 15147 - DNA, 35 bp, Artificial Sequence
  Synthetic oligonucleotide
ggtcgtacgcatgtcagagaaagcggaaattaagt

SEQ ID NO: 15148 - DNA, 35 bp, Artificial Sequence
  Synthetic oligonucleotide
gtaaaacatgcccacgttccaggaaacagctgggg

SEQ ID NO: 15149 - DNA, 37 bp, Artificial Sequence
  Synthetic oligonucleotide
gtagcacgagtaacctgggttccagtccttaatctga

SEQ ID NO: 15150 - DNA, 38 bp, Artificial Sequence
  Synthetic oligonucleotide
gtagtcgactccctgggctcgggttaatctgtgggtga

SEQ ID NO: 15151 - DNA, 38 bp, Artificial Sequence
  Synthetic oligonucleotide
gtcatgcccaccgttaggtcgagtatcaaaagaactga

SEQ ID NO: 15152 - DNA, 38 bp, Artificial Sequence
  Synthetic oligonucleotide
gttgccgagtgggtaaaaggattcgggggatttaatga

SEQ ID NO: 15153 - DNA, 36 bp, Artificial Sequence
  Synthetic oligonucleotide
tagtcgggtatgattccgcggtagcatgtatggcga

SEQ ID NO: 15154 - DNA, 36 bp, Artificial Sequence
  Synthetic oligonucleotide
tatgctaaagggagacggaatcagccgacggcctta

SEQ ID NO: 15155 - DNA, 38 bp, Artificial Sequence
  Synthetic oligonucleotide
tcctaccttacaggtgagctttgcggaaatagtgatga

SEQ ID NO: 15156 - DNA, 37 bp, Artificial Sequence
  Synthetic oligonucleotide
tgcgtgcaaattacgtcgacctgggctcttaattgga

SEQ ID NO: 15157 - DNA, 37 bp, Artificial Sequence
  Synthetic oligonucleotide
tggtcctgttttaaatagacattacagcactgcgaga

SEQ ID NO: 15158 - DNA, 38 bp, Artificial Sequence
  Synthetic oligonucleotide
tggtgggccgaatgaactgccagacccggttactgtga

SEQ ID NO: 15159 - DNA, 37 bp, Artificial Sequence
  Synthetic oligonucleotide
ttaaggagacgtcaggattgggctgcttgcatggaga

SEQ ID NO: 15160 - DNA, 37 bp, Artificial Sequence
  Synthetic oligonucleotide
ttcgggggtaacctgagagtagagtcgcgtacaacga

SEQ ID NO: 15161 - DNA, 37 bp, Artificial Sequence
  Synthetic oligonucleotide
ttgacactgtaaaaagttcgggcgcttccccaaggga

SEQ ID NO: 15162 - DNA, 36 bp, Artificial Sequence
  Synthetic oligonucleotide
ttgtggtgcgatcaacctgacggctatccgaaggaa

SEQ ID NO: 15163 - DNA, 37 bp, Artificial Sequence
  Synthetic oligonucleotide
tactccagtctaggggtattagtgtagatgtcgcgga

SEQ ID NO: 15164 - DNA, 35 bp, Artificial Sequence
  Synthetic oligonucleotide
aaaatagcgtaaagacgaatgggactcaggcccta

SEQ ID NO: 15165 - DNA, 35 bp, Artificial Sequence
  Synthetic oligonucleotide
aaactgctaccgccgggttaatgtgaagtgcgagt

SEQ ID NO: 15166 - DNA, 35 bp, Artificial Sequence
  Synthetic oligonucleotide
aaagcaggcttgttcaaatgttcaggattagcagg

SEQ ID NO: 15167 - DNA, 36 bp, Artificial Sequence
  Synthetic oligonucleotide
aaagttggtgacacatcgtactaaaggtggtagcta

SEQ ID NO: 15168 - DNA, 38 bp, Artificial Sequence
  Synthetic oligonucleotide
aaccaggcgcaatgttactgttaggaatcccggtctga

SEQ ID NO: 15169 - DNA, 38 bp, Artificial Sequence
  Synthetic oligonucleotide
aaccgaatgattacgtgtcaatatccttgagggtgtga

SEQ ID NO: 15170 - DNA, 35 bp, Artificial Sequence
  Synthetic oligonucleotide
aacgagacgtgttacgagcataacggtatctcaca

SEQ ID NO: 15171 - DNA, 35 bp, Artificial Sequence
  Synthetic oligonucleotide
aacgcgtcgtacattatcaacagagatagctcatc

SEQ ID NO: 15172 - DNA, 37 bp, Artificial Sequence
  Synthetic oligonucleotide
aagcacgagcaaaattatatacaagtacgccagttga

SEQ ID NO: 15173 - DNA, 35 bp, Artificial Sequence
  Synthetic oligonucleotide
aagctgctgaatgattagttttcgcctatgtacag

SEQ ID NO: 15174 - DNA, 38 bp, Artificial Sequence
  Synthetic oligonucleotide
aataacacgccgagtgatggtcatgttcgttacgctga

SEQ ID NO: 15175 - DNA, 35 bp, Artificial Sequence
  Synthetic oligonucleotide
acaacactccaggccggtgaattcgagttatcgtg

SEQ ID NO: 15176 - DNA, 38 bp, Artificial Sequence
  Synthetic oligonucleotide
acaccgtgtaacatgtaatggaccggtaccgtgcgtga

SEQ ID NO: 15177 - DNA, 37 bp, Artificial Sequence
  Synthetic oligonucleotide
acctagggaagtgcaccacagtacatcgggggaacga

SEQ ID NO: 15178 - DNA, 37 bp, Artificial Sequence
  Synthetic oligonucleotide
acgggctggtgggcgcaccattaccgttcacgcagga

SEQ ID NO: 15179 - DNA, 36 bp, Artificial Sequence
  Synthetic oligonucleotide
acgtacgtagtccgtacagggcaaggaggtggaaca

SEQ ID NO: 15180 - DNA, 38 bp, Artificial Sequence
  Synthetic oligonucleotide
agcctattacaaggtgccgggtctaggctacttggtga

SEQ ID NO: 15181 - DNA, 36 bp, Artificial Sequence
  Synthetic oligonucleotide
agttttcgctatctccccgcgaccgcgtacgcggta

SEQ ID NO: 15182 - DNA, 35 bp, Artificial Sequence
  Synthetic oligonucleotide
cacatcgtaaccgtgcccgggtcgtggcctcgagt

SEQ ID NO: 15183 - DNA, 37 bp, Artificial Sequence
  Synthetic oligonucleotide
catgcccgttgacgggttatttgcggagtatgtcgga

SEQ ID NO: 15184 - DNA, 35 bp, Artificial Sequence
  Synthetic oligonucleotide
cgagggaatagaacgactaaacgtattcgtcatcg

SEQ ID NO: 15185 - DNA, 35 bp, Artificial Sequence
  Synthetic oligonucleotide
cgtgacacctaaatcgtggtgggaactctatcgtt

SEQ ID NO: 15186 - DNA, 35 bp, Artificial Sequence
  Synthetic oligonucleotide
ctcgcgagtgtgagctctgccgaacgtgtatgtct

SEQ ID NO: 15187 - DNA, 35 bp, Artificial Sequence
  Synthetic oligonucleotide
ctggaactacactggattcagtgcggtgagcacgg

SEQ ID NO: 15188 - DNA, 37 bp, Artificial Sequence
  Synthetic oligonucleotide
gaaagcgtggccagcaggtaactgagcaactttccga

SEQ ID NO: 15189 - DNA, 37 bp, Artificial Sequence
  Synthetic oligonucleotide
gacttagtgacgacttcgtctaaacatacgcaggaga

SEQ ID NO: 15190 - DNA, 37 bp, Artificial Sequence
  Synthetic oligonucleotide
gagcgaaagcgacgattgggagaagcatcaaatctga

SEQ ID NO: 15191 - DNA, 37 bp, Artificial Sequence
  Synthetic oligonucleotide
gatatggcaacgaactgagtgcgtcgatacccttcga

SEQ ID NO: 15192 - DNA, 36 bp, Artificial Sequence
  Synthetic oligonucleotide
gcatggaaggcaataggtgttatacgattgaaccta

SEQ ID NO: 15193 - DNA, 37 bp, Artificial Sequence
  Synthetic oligonucleotide
gccgaataggattcgaacgttatggaagtctatgtga

SEQ ID NO: 15194 - DNA, 37 bp, Artificial Sequence
  Synthetic oligonucleotide
gcgcggtcattcgataggggagtttcacataactgga

SEQ ID NO: 15195 - DNA, 36 bp, Artificial Sequence
  Synthetic oligonucleotide
gcgtgcccttaataatcgccacctgtaacaactgca

SEQ ID NO: 15196 - DNA, 35 bp, Artificial Sequence
  Synthetic oligonucleotide
ggacgttggtcggatctctgtagtatgactaggtg

SEQ ID NO: 15197 - DNA, 36 bp, Artificial Sequence
  Synthetic oligonucleotide
gggactgccaattgttgggcgggaaatggcaaggga

SEQ ID NO: 15198 - DNA, 35 bp, Artificial Sequence
  Synthetic oligonucleotide
gggtaaccttcctagctcacagttatgctcttagt

SEQ ID NO: 15199 - DNA, 36 bp, Artificial Sequence
  Synthetic oligonucleotide
ggtactagggcatatcgaggagaaataatgtcctta

SEQ ID NO: 15200 - DNA, 38 bp, Artificial Sequence
  Synthetic oligonucleotide
ggtgtgttatcaaatgatagcgaaagaatccatcgtga

SEQ ID NO: 15201 - DNA, 35 bp, Artificial Sequence
  Synthetic oligonucleotide
gtaccgaggaaagtgcggacacgcgcgaagaaaga

SEQ ID NO: 15202 - DNA, 37 bp, Artificial Sequence
  Synthetic oligonucleotide
gtagcgcgtgaccaaagggttggtggcttgatgttga

SEQ ID NO: 15203 - DNA, 36 bp, Artificial Sequence
  Synthetic oligonucleotide
gtcccgatcttatgtaaatactgcgggaagttgtga

SEQ ID NO: 15204 - DNA, 36 bp, Artificial Sequence
  Synthetic oligonucleotide
gtcgacaagtattgccgaatgggcaataatagcgca

SEQ ID NO: 15205 - DNA, 37 bp, Artificial Sequence
  Synthetic oligonucleotide
gtcgcgaatcgttctaattggcccgacgcgattctga

SEQ ID NO: 15206 - DNA, 36 bp, Artificial Sequence
  Synthetic oligonucleotide
gtgactccggtcacgacttagagtcgctgtggaata

SEQ ID NO: 15207 - DNA, 37 bp, Artificial Sequence
  Synthetic oligonucleotide
gtgcggtcatgactgactcttcaggtggcccctccga

SEQ ID NO: 15208 - DNA, 38 bp, Artificial Sequence
  Synthetic oligonucleotide
gtgggctatagacacacgttgcgatctcagtgtgttga

SEQ ID NO: 15209 - DNA, 38 bp, Artificial Sequence
  Synthetic oligonucleotide
gtgtaggacgcaacctgtgtcagtcatgtggtgtgtga

SEQ ID NO: 15210 - DNA, 35 bp, Artificial Sequence
  Synthetic oligonucleotide
gttctgtgaagatttgtagtgctgagctcggtttg

SEQ ID NO: 15211 - DNA, 38 bp, Artificial Sequence
  Synthetic oligonucleotide
tacaatggcgagtgctgcaggtggtatctgcgaagtga

SEQ ID NO: 15212 - DNA, 37 bp, Artificial Sequence
  Synthetic oligonucleotide
tacagggctctggattaagatagttacgggaagcaga

SEQ ID NO: 15213 - DNA, 35 bp, Artificial Sequence
  Synthetic oligonucleotide
tactgggcaccatacgggggctcaggggattcaga

SEQ ID NO: 15214 - DNA, 36 bp, Artificial Sequence
  Synthetic oligonucleotide
tattctgtccactcttcttatcgacctgaactggta

SEQ ID NO: 15215 - DNA, 35 bp, Artificial Sequence
  Synthetic oligonucleotide
tcatgtgacctcgcagtgagggtccgtaccaccgc

SEQ ID NO: 15216 - DNA, 37 bp, Artificial Sequence
  Synthetic oligonucleotide
tcctaaagacacgttgtgcgattatacattgtcttga

SEQ ID NO: 15217 - DNA, 35 bp, Artificial Sequence
  Synthetic oligonucleotide
tctagtccgtacaggcgagggatcctggccgggct

SEQ ID NO: 15218 - DNA, 38 bp, Artificial Sequence
  Synthetic oligonucleotide
tgcctccggtgaagtcagtacttggcgggcattgttga

SEQ ID NO: 15219 - DNA, 36 bp, Artificial Sequence
  Synthetic oligonucleotide
tggggattgcgttctgtgaaccggtttgacgtgtta

SEQ ID NO: 15220 - DNA, 36 bp, Artificial Sequence
  Synthetic oligonucleotide
tgtactgagaggagtcaatatgtgcatccgagtcga

SEQ ID NO: 15221 - DNA, 36 bp, Artificial Sequence
  Synthetic oligonucleotide
ttaccgagtagatattcgggcgttgaaaaggtttta

SEQ ID NO: 15222 - DNA, 35 bp, Artificial Sequence
  Synthetic oligonucleotide
ttaggactacgagtcaaatcgaattggcggataga

SEQ ID NO: 15223 - DNA, 38 bp, Artificial Sequence
  Synthetic oligonucleotide
ttaggttgttacgatttcctgataaccgacgaacttga

SEQ ID NO: 15224 - DNA, 37 bp, Artificial Sequence
  Synthetic oligonucleotide
ttcacaaggggttatgggcttcgatatacaggtttga

SEQ ID NO: 15225 - DNA, 37 bp, Artificial Sequence
  Synthetic oligonucleotide
ttggcgtgcgctaacgatcgctagcttatgggtgaaa

SEQ ID NO: 15226 - DNA, 37 bp, Artificial Sequence
  Synthetic oligonucleotide
acccaagcgcggaggccgtacgggagcctgtgtcgga

SEQ ID NO: 15227 - DNA, 38 bp, Artificial Sequence
  Synthetic oligonucleotide
tgaggaagtactgcatggaacatgttactgtggaatga

SEQ ID NO: 15228 - DNA, 36 bp, Artificial Sequence
  Synthetic oligonucleotide
gcgaaccgcttgtctatctcacacacgtgatgcgca

SEQ ID NO: 15229 - DNA, 36 bp, Artificial Sequence
  Synthetic oligonucleotide
aaacctcgggactatcatgtacgaacggacagggta

SEQ ID NO: 15230 - DNA, 36 bp, Artificial Sequence
  Synthetic oligonucleotide
aaatacgtcgtcctgctgagccagtgcatggcttga

SEQ ID NO: 15231 - DNA, 35 bp, Artificial Sequence
  Synthetic oligonucleotide
aaatcgcacctgggggacctgcattgatatctgag

SEQ ID NO: 15232 - DNA, 37 bp, Artificial Sequence
  Synthetic oligonucleotide
aacatataccatgcctacacaagttacggactaacga

SEQ ID NO: 15233 - DNA, 37 bp, Artificial Sequence
  Synthetic oligonucleotide
aacatgatcaggatgtgggtttgcgtgaacaaaccga

SEQ ID NO: 15234 - DNA, 35 bp, Artificial Sequence
  Synthetic oligonucleotide
aaccaaactgggccctgaccaagagccagggggtt

SEQ ID NO: 15235 - DNA, 36 bp, Artificial Sequence
  Synthetic oligonucleotide
aaccggtgaagtaaccagtgcatttcctagtgacga

SEQ ID NO: 15236 - DNA, 35 bp, Artificial Sequence
  Synthetic oligonucleotide
aagctacgcgtaactatcgaatgaatgacgtgacg

SEQ ID NO: 15237 - DNA, 35 bp, Artificial Sequence
  Synthetic oligonucleotide
aaggggttgagatcgctaactccgccgactggtgt

SEQ ID NO: 15238 - DNA, 35 bp, Artificial Sequence
  Synthetic oligonucleotide
aagtctgagcccccgcgccatagaatgagtcctgg

SEQ ID NO: 15239 - DNA, 35 bp, Artificial Sequence
  Synthetic oligonucleotide
aatccaacggggctggccacggagtgaagatatcg

SEQ ID NO: 15240 - DNA, 35 bp, Artificial Sequence
  Synthetic oligonucleotide
aatcgggcgtaatacgtgagcgggtcatggccggc

SEQ ID NO: 15241 - DNA, 38 bp, Artificial Sequence
  Synthetic oligonucleotide
aatgagcgatactgaagtagccaggaataagtccatga

SEQ ID NO: 15242 - DNA, 37 bp, Artificial Sequence
  Synthetic oligonucleotide
aatgcgatacggaggaggattagtacactggagcaga

SEQ ID NO: 15243 - DNA, 34 bp, Artificial Sequence
  Synthetic oligonucleotide
aatgctgcttagcattcgtctgcttatgtactgt

SEQ ID NO: 15244 - DNA, 37 bp, Artificial Sequence
  Synthetic oligonucleotide
aattggcgtcacctcgccaaggttttaattaagagga

SEQ ID NO: 15245 - DNA, 36 bp, Artificial Sequence
  Synthetic oligonucleotide
acaaggttactcgtcaaagctctatgagcccttcca

SEQ ID NO: 15246 - DNA, 36 bp, Artificial Sequence
  Synthetic oligonucleotide
acatgtcacattagactaaaagtgacacatcacgaa

SEQ ID NO: 15247 - DNA, 35 bp, Artificial Sequence
  Synthetic oligonucleotide
acgcttcacattcccctccatgcgttggctcgttc

SEQ ID NO: 15248 - DNA, 36 bp, Artificial Sequence
  Synthetic oligonucleotide
actgagatcggacgtcatgaaggaaaataatggcga

SEQ ID NO: 15249 - DNA, 38 bp, Artificial Sequence
  Synthetic oligonucleotide
actggtaggtagaggtgtatgcactgagtaatgaatga

SEQ ID NO: 15250 - DNA, 36 bp, Artificial Sequence
  Synthetic oligonucleotide
actgttggtgtcatgtacgtccagcaattggttgta

SEQ ID NO: 15251 - DNA, 36 bp, Artificial Sequence
  Synthetic oligonucleotide
agaacactgtacgcggacgtcctgatcaggccgaaa

SEQ ID NO: 15252 - DNA, 36 bp, Artificial Sequence
  Synthetic oligonucleotide
agagggagtctagcaagcgggaagaacgttaggtta

SEQ ID NO: 15253 - DNA, 36 bp, Artificial Sequence
  Synthetic oligonucleotide
aggtgcagatctgacatggaacacggtcgactagga

SEQ ID NO: 15254 - DNA, 35 bp, Artificial Sequence
  Synthetic oligonucleotide
atgtaacctagcagtcggtagtgtataataaatat

SEQ ID NO: 15255 - DNA, 38 bp, Artificial Sequence
  Synthetic oligonucleotide
atgtcgagacaatcgtcgcttatgaaaaacgtgcctga

SEQ ID NO: 15256 - DNA, 36 bp, Artificial Sequence
  Synthetic oligonucleotide
caaaccttcccccgcgtcctggagtgggcaatctaa

SEQ ID NO: 15257 - DNA, 36 bp, Artificial Sequence
  Synthetic oligonucleotide
caagcacgctgaaattcgggtactgggttcgaccga

SEQ ID NO: 15258 - DNA, 36 bp, Artificial Sequence
  Synthetic oligonucleotide
caatcccggactttatgcgttattatgagactcgca

SEQ ID NO: 15259 - DNA, 36 bp, Artificial Sequence
  Synthetic oligonucleotide
catgacctattaggtggggattgcgtgccttgtaga

SEQ ID NO: 15260 - DNA, 36 bp, Artificial Sequence
  Synthetic oligonucleotide
ccgctaatgggagtaatcacggtgcatgtgctacca

SEQ ID NO: 15261 - DNA, 36 bp, Artificial Sequence
  Synthetic oligonucleotide
cctatgacacgaaaagtcaagtctgtcgacataaga

SEQ ID NO: 15262 - DNA, 35 bp, Artificial Sequence
  Synthetic oligonucleotide
cgaatcactggatcagaggacccgtggccttacac

SEQ ID NO: 15263 - DNA, 37 bp, Artificial Sequence
  Synthetic oligonucleotide
cgccttgtgatcgaactataatcaaagtccgcgcgga

SEQ ID NO: 15264 - DNA, 36 bp, Artificial Sequence
  Synthetic oligonucleotide
cgtgcgctgcatgataacttattgtcaacctgggga

SEQ ID NO: 15265 - DNA, 37 bp, Artificial Sequence
  Synthetic oligonucleotide
gaaagttgccgtgggccgattagagaccacggcctga

SEQ ID NO: 15266 - DNA, 38 bp, Artificial Sequence
  Synthetic oligonucleotide
gaagcttaggtcagggtagtctggtcttacgattgtga

SEQ ID NO: 15267 - DNA, 36 bp, Artificial Sequence
  Synthetic oligonucleotide
gacatgcgaatactgcattatcgggttcatatcgga

SEQ ID NO: 15268 - DNA, 35 bp, Artificial Sequence
  Synthetic oligonucleotide
gacctgggcgtgaatacccaggtatgagctgcaaa

SEQ ID NO: 15269 - DNA, 38 bp, Artificial Sequence
  Synthetic oligonucleotide
gagtggcccgggtaccagcaggtctgttagtcatctga

SEQ ID NO: 15270 - DNA, 37 bp, Artificial Sequence
  Synthetic oligonucleotide
gatgaggctaacctcacttcatgggcaccggccatga

SEQ ID NO: 15271 - DNA, 36 bp, Artificial Sequence
  Synthetic oligonucleotide
gatgcaccatgaatcttctacgccaatttggggcta

SEQ ID NO: 15272 - DNA, 38 bp, Artificial Sequence
  Synthetic oligonucleotide
gcatggtgggctggtcaaacggcggactccatttctga

SEQ ID NO: 15273 - DNA, 38 bp, Artificial Sequence
  Synthetic oligonucleotide
gccaatgaagaggcacttggtacgggcgtagtccctga

SEQ ID NO: 15274 - DNA, 37 bp, Artificial Sequence
  Synthetic oligonucleotide
gccggtcacttgacgtggggttacattataaccgtga

SEQ ID NO: 15275 - DNA, 35 bp, Artificial Sequence
  Synthetic oligonucleotide
gcctatttattgcaaagcatattacgaaagcctag

SEQ ID NO: 15276 - DNA, 35 bp, Artificial Sequence
  Synthetic oligonucleotide
gcgaagagtagtgttccacacgtatcgtagaagca

SEQ ID NO: 15277 - DNA, 38 bp, Artificial Sequence
  Synthetic oligonucleotide
gcgatcaagaaatgtgggctccgctatatgaggtatga

SEQ ID NO: 15278 - DNA, 35 bp, Artificial Sequence
  Synthetic oligonucleotide
gcgattgtctgaatgtcattcctttctcgcacacg

SEQ ID NO: 15279 - DNA, 38 bp, Artificial Sequence
  Synthetic oligonucleotide
gcggaaaaacaggtcctgcttcgatgggatcggaatga

SEQ ID NO: 15280 - DNA, 36 bp, Artificial Sequence
  Synthetic oligonucleotide
gctcaacatctccggaccgacggacctacgacataa

SEQ ID NO: 15281 - DNA, 38 bp, Artificial Sequence
  Synthetic oligonucleotide
gctgcaggtagagcgcggacgcatgaagacgcttatga

SEQ ID NO: 15282 - DNA, 37 bp, Artificial Sequence
  Synthetic oligonucleotide
gcttcgttaaacatgtttaaagcaagggagtgcgcga

SEQ ID NO: 15283 - DNA, 38 bp, Artificial Sequence
  Synthetic oligonucleotide
gctttttcatactactggctcatgcaaagggtgcgtga

SEQ ID NO: 15284 - DNA, 36 bp, Artificial Sequence
  Synthetic oligonucleotide
ggaggacggtggtatatgcgttctggatccatcgta

SEQ ID NO: 15285 - DNA, 38 bp, Artificial Sequence
  Synthetic oligonucleotide
ggagtggtgacaggcggttaaacaggatcgagtaatga

SEQ ID NO: 15286 - DNA, 38 bp, Artificial Sequence
  Synthetic oligonucleotide
ggctcgatagactggcgattttcgatcataagccacga

SEQ ID NO: 15287 - DNA, 38 bp, Artificial Sequence
  Synthetic oligonucleotide
gggagtcagacgaccgacgatcattttaatggtattga

SEQ ID NO: 15288 - DNA, 38 bp, Artificial Sequence
  Synthetic oligonucleotide
gggcaatttttgcccgacatacttcgtcctctgtctga

SEQ ID NO: 15289 - DNA, 37 bp, Artificial Sequence
  Synthetic oligonucleotide
ggtcgccatgcattctgtatgacaagtggaaagcgga

SEQ ID NO: 15290 - DNA, 35 bp, Artificial Sequence
  Synthetic oligonucleotide
ggttggatcaccaacagtttaatctatgttggagg

SEQ ID NO: 15291 - DNA, 37 bp, Artificial Sequence
  Synthetic oligonucleotide
gtacgttggaattggtgaatatggcgaacctgcgtga

SEQ ID NO: 15292 - DNA, 37 bp, Artificial Sequence
  Synthetic oligonucleotide
gtatcaggcttattccattgaactgagtactcgacga

SEQ ID NO: 15293 - DNA, 35 bp, Artificial Sequence
  Synthetic oligonucleotide
gtatggccgttatattgctccgtgcatactattga

SEQ ID NO: 15294 - DNA, 37 bp, Artificial Sequence
  Synthetic oligonucleotide
gtccggtatttcatggacacatcgccctagggaaaga

SEQ ID NO: 15295 - DNA, 36 bp, Artificial Sequence
  Synthetic oligonucleotide
gtcgatctatccgctatctgaactgtcacctggcta

SEQ ID NO: 15296 - DNA, 37 bp, Artificial Sequence
  Synthetic oligonucleotide
gttagtgggccccggtaatagagatatcccgtgttga

SEQ ID NO: 15297 - DNA, 35 bp, Artificial Sequence
  Synthetic oligonucleotide
gttggagatcgaggtgaggagacctgatcaccgca

SEQ ID NO: 15298 - DNA, 35 bp, Artificial Sequence
  Synthetic oligonucleotide
gttgggtcgtagcaccctgatttagtgtcttattc

SEQ ID NO: 15299 - DNA, 38 bp, Artificial Sequence
  Synthetic oligonucleotide
gttgttgcactgactgtggtcggagaatctgaagatga

SEQ ID NO: 15300 - DNA, 33 bp, Artificial Sequence
  Synthetic oligonucleotide
tacactagcattaaactcaaattttgtgaccta

SEQ ID NO: 15301 - DNA, 38 bp, Artificial Sequence
  Synthetic oligonucleotide
tacattggtacgaaccttgtgtctactcagtcagctga

SEQ ID NO: 15302 - DNA, 37 bp, Artificial Sequence
  Synthetic oligonucleotide
taccgacaacacacggagactagtcctactgtggcga

SEQ ID NO: 15303 - DNA, 37 bp, Artificial Sequence
  Synthetic oligonucleotide
tacgcgacgcctggggggtggtccagtaaccacggga

SEQ ID NO: 15304 - DNA, 37 bp, Artificial Sequence
  Synthetic oligonucleotide
tacgtaatggagctagtaacgaatggccaagtgtgga

SEQ ID NO: 15305 - DNA, 38 bp, Artificial Sequence
  Synthetic oligonucleotide
tactatcgcgtgtaacacaaggatgttagccagagtga

SEQ ID NO: 15306 - DNA, 36 bp, Artificial Sequence
  Synthetic oligonucleotide
tatgagtaagattcggagacgcctcgctaactgtta

SEQ ID NO: 15307 - DNA, 37 bp, Artificial Sequence
  Synthetic oligonucleotide
tcattagagacaaaacgcggatggtatggtacgggga

SEQ ID NO: 15308 - DNA, 37 bp, Artificial Sequence
  Synthetic oligonucleotide
tccaagtgcccgcacgccgatatttccagttcggcga

SEQ ID NO: 15309 - DNA, 35 bp, Artificial Sequence
  Synthetic oligonucleotide
tcgagtacgatcggtccggcatgaacccggcattt

SEQ ID NO: 15310 - DNA, 35 bp, Artificial Sequence
  Synthetic oligonucleotide
tctatcgttgggccaatagtgaggctgtaaagtac

SEQ ID NO: 15311 - DNA, 38 bp, Artificial Sequence
  Synthetic oligonucleotide
tgcaccaagggacttagtaggcgattgcgtattcgtga

SEQ ID NO: 15312 - DNA, 38 bp, Artificial Sequence
  Synthetic oligonucleotide
tgccatcatgacgttcacaactccgttacagtcggtga

SEQ ID NO: 15313 - DNA, 36 bp, Artificial Sequence
  Synthetic oligonucleotide
tgcctaaaaacgttctttcggtaatgggtcctgaaa

SEQ ID NO: 15314 - DNA, 35 bp, Artificial Sequence
  Synthetic oligonucleotide
tgcgagcatgctcatgcaggatcacgtagttgtca

SEQ ID NO: 15315 - DNA, 36 bp, Artificial Sequence
  Synthetic oligonucleotide
tgcgcccaaattgttggggcgtctgaatgagttgta

SEQ ID NO: 15316 - DNA, 35 bp, Artificial Sequence
  Synthetic oligonucleotide
tgcgtagacacattcatggggctggcccttgcatc

SEQ ID NO: 15317 - DNA, 37 bp, Artificial Sequence
  Synthetic oligonucleotide
tgctcactatctacttgtcaaatggtacgtcgcacga

SEQ ID NO: 15318 - DNA, 37 bp, Artificial Sequence
  Synthetic oligonucleotide
tgctctggtcctcccggttaaccgcgtagatcaacga

SEQ ID NO: 15319 - DNA, 36 bp, Artificial Sequence
  Synthetic oligonucleotide
tgctgtatcgagctgcgtttaatgacgcgtacccct

SEQ ID NO: 15320 - DNA, 36 bp, Artificial Sequence
  Synthetic oligonucleotide
tgggtagccgataaaatcacgagcgataccggtgca

SEQ ID NO: 15321 - DNA, 38 bp, Artificial Sequence
  Synthetic oligonucleotide
tggttgagagttgcgtgacgtttcaagtcaagttttga

SEQ ID NO: 15322 - DNA, 38 bp, Artificial Sequence
  Synthetic oligonucleotide
tgtacactattcgtgaggcgattacatacacctcctga

SEQ ID NO: 15323 - DNA, 38 bp, Artificial Sequence
  Synthetic oligonucleotide
tgtcatggtgtgtgagttttacggcttaggctgccgac

SEQ ID NO: 15324 - DNA, 37 bp, Artificial Sequence
  Synthetic oligonucleotide
tgtcgtacagtggccgtgttccgtacccatagtttga

SEQ ID NO: 15325 - DNA, 36 bp, Artificial Sequence
  Synthetic oligonucleotide
ttatcgctgtggcaccagttatatttgttattatta

SEQ ID NO: 15326 - DNA, 36 bp, Artificial Sequence
  Synthetic oligonucleotide
ttgagggagatgacaactgcaaaagtcttagggcga

SEQ ID NO: 15327 - DNA, 36 bp, Artificial Sequence
  Synthetic oligonucleotide
ttgcactgataggggctgcacgcccagtctgtacga

SEQ ID NO: 15328 - DNA, 36 bp, Artificial Sequence
  Synthetic oligonucleotide
ttggcctagtaatccacaccccatcggcccaacgta

SEQ ID NO: 15329 - DNA, 35 bp, Artificial Sequence
  Synthetic oligonucleotide
ttgggggaacaaccgactgcagggatctccacgat

SEQ ID NO: 15330 - DNA, 37 bp, Artificial Sequence
  Synthetic oligonucleotide
ttgtgacagatgtcggcctccactagctgccgattga

SEQ ID NO: 15331 - DNA, 36 bp, Artificial Sequence
  Synthetic oligonucleotide
ttgttcacgctgactgaacgacatgcgggagggcta

SEQ ID NO: 15332 - DNA, 35 bp, Artificial Sequence
  Synthetic oligonucleotide
gattatccgtacaaggggggaagtgccgcatatgg

SEQ ID NO: 15333 - DNA, 38 bp, Artificial Sequence
  Synthetic oligonucleotide
ttgcaagctacgtgcaggacgtcatgaaatacgcctga

SEQ ID NO: 15334 - DNA, 36 bp, Artificial Sequence
  Synthetic oligonucleotide
atcgtgatcgcgtttcgggctgtaaatgctggacaa

SEQ ID NO: 15335 - DNA, 38 bp, Artificial Sequence
  Synthetic oligonucleotide
ttggagatagaaagttctgcgctttgatgacagattga

SEQ ID NO: 15336 - DNA, 35 bp, Artificial Sequence
  Synthetic oligonucleotide
gaaccagagcataacttctctcgtggtttagtact

SEQ ID NO: 15337 - DNA, 35 bp, Artificial Sequence
  Synthetic oligonucleotide
gcactgcatgggcctacaagcaccgttcttggtgc

SEQ ID NO: 15338 - DNA, 35 bp, Artificial Sequence
  Synthetic oligonucleotide
gcctgcctacacttcctcttacatttttcctacca

SEQ ID NO: 15339 - DNA, 37 bp, Artificial Sequence
  Synthetic oligonucleotide
gggaatagcctccatcgattacgacgacgggtaccga

SEQ ID NO: 15340 - DNA, 36 bp, Artificial Sequence
  Synthetic oligonucleotide
acgcacgccgtacgccacacgacatacaagccccta

SEQ ID NO: 15341 - DNA, 37 bp, Artificial Sequence
  Synthetic oligonucleotide
actttcagcagccaatgttgcatgggatgggtaaaga

SEQ ID NO: 15342 - DNA, 37 bp, Artificial Sequence
  Synthetic oligonucleotide
aggaatgccacgactggaagtgtatcgcggggcgaga

SEQ ID NO: 15343 - DNA, 38 bp, Artificial Sequence
  Synthetic oligonucleotide
atcgggtgaggtagtctaagccgattgacgtcctctga

SEQ ID NO: 15344 - DNA, 38 bp, Artificial Sequence
  Synthetic oligonucleotide
cttggaatgacttatgtgaggaagagtattagacttga

SEQ ID NO: 15345 - DNA, 38 bp, Artificial Sequence
  Synthetic oligonucleotide
gactgtgccgaagtggcgggcatgacgttgaatgatga

SEQ ID NO: 15346 - DNA, 34 bp, Artificial Sequence
  Synthetic oligonucleotide
gtcatgaacatacggtcacgaccgtgtgcacaga

SEQ ID NO: 15347 - DNA, 37 bp, Artificial Sequence
  Synthetic oligonucleotide
tagcaccgataccgcgagcggccggactggggttgga

SEQ ID NO: 15348 - DNA, 36 bp, Artificial Sequence
  Synthetic oligonucleotide
agtcacgccctcgggacaggtatgggcaacatgaaa

SEQ ID NO: 15349 - DNA, 37 bp, Artificial Sequence
  Synthetic oligonucleotide
atagcgtactgtgatgtaagggtaggcaagactgcga

SEQ ID NO: 15350 - DNA, 38 bp, Artificial Sequence
  Synthetic oligonucleotide
gcaatgatccctggcatcttgtgtcacttgcaccttga

SEQ ID NO: 15351 - DNA, 35 bp, Artificial Sequence
  Synthetic oligonucleotide
gccaggactccaccacggctaaggggaacagcatg

SEQ ID NO: 15352 - DNA, 35 bp, Artificial Sequence
  Synthetic oligonucleotide
gtcccctcaatgtcgaagactagagcttaaactta

SEQ ID NO: 15353 - DNA, 36 bp, Artificial Sequence
  Synthetic oligonucleotide
gtgctggagatcaagtactcggttctttcggctgta

SEQ ID NO: 15354 - DNA, 36 bp, Artificial Sequence
  Synthetic oligonucleotide
tgcaacagaattttattgataggctcgatccggtga

SEQ ID NO: 15355 - DNA, 37 bp, Artificial Sequence
  Synthetic oligonucleotide
ttggcgacgagcgactaaacagcaaacgggtgctaga

SEQ ID NO: 15356 - DNA, 35 bp, Artificial Sequence
  Synthetic oligonucleotide
actgtccgcatgaactggatgagcagacatgatcg

SEQ ID NO: 15357 - DNA, 35 bp, Artificial Sequence
  Synthetic oligonucleotide
gttctagtagtgtcattagttgtctagtcgcaggg

SEQ ID NO: 15358 - DNA, 37 bp, Artificial Sequence
  Synthetic oligonucleotide
aacaacccgaccagaagagtttataccatccaggtga

SEQ ID NO: 15359 - DNA, 38 bp, Artificial Sequence
  Synthetic oligonucleotide
aatccggaactacactgactgcatgctggtagtcgtga

SEQ ID NO: 15360 - DNA, 36 bp, Artificial Sequence
  Synthetic oligonucleotide
acaattccgacctcatgggtagatctggaaggttga

SEQ ID NO: 15361 - DNA, 37 bp, Artificial Sequence
  Synthetic oligonucleotide
acgagctgagtaggcaacactgtctccccgcatgtga

SEQ ID NO: 15362 - DNA, 35 bp, Artificial Sequence
  Synthetic oligonucleotide
actgcctggttagatccatctgagacatgcgtaca

SEQ ID NO: 15363 - DNA, 37 bp, Artificial Sequence
  Synthetic oligonucleotide
agcgcggagcacggggaccgttacctccccccaggga

SEQ ID NO: 15364 - DNA, 35 bp, Artificial Sequence
  Synthetic oligonucleotide
agtggaacgccctgaagttatgtgaaggttccctc

SEQ ID NO: 15365 - DNA, 37 bp, Artificial Sequence
  Synthetic oligonucleotide
atagacgcccgcttgaaggcgtggcatcccgtgaaga

SEQ ID NO: 15366 - DNA, 35 bp, Artificial Sequence
  Synthetic oligonucleotide
atcgcgggttgggcattcccggcgacacattctga

SEQ ID NO: 15367 - DNA, 36 bp, Artificial Sequence
  Synthetic oligonucleotide
atgggtgggcggttcggatacattaaggggggtgga

SEQ ID NO: 15368 - DNA, 35 bp, Artificial Sequence
  Synthetic oligonucleotide
cgggaccttgagcgactactgacatggcccgcgta

SEQ ID NO: 15369 - DNA, 35 bp, Artificial Sequence
  Synthetic oligonucleotide
gcaactagttaatgctatttcgggcttgagcgatc

SEQ ID NO: 15370 - DNA, 35 bp, Artificial Sequence
  Synthetic oligonucleotide
gccttagccgcctcggaatcggtggagtttcggta

SEQ ID NO: 15371 - DNA, 36 bp, Artificial Sequence
  Synthetic oligonucleotide
gggggagtcggatcctagccgtttttccgcaggata

SEQ ID NO: 15372 - DNA, 37 bp, Artificial Sequence
  Synthetic oligonucleotide
gtatgctccagtatgggcgtggcatgtcacagactga

SEQ ID NO: 15373 - DNA, 38 bp, Artificial Sequence
  Synthetic oligonucleotide
gtgatgggtagaactggctttcagttatggcctgttga

SEQ ID NO: 15374 - DNA, 34 bp, Artificial Sequence
  Synthetic oligonucleotide
gtgcttgctcagtaacgtgtgaatcgcgccggcc

SEQ ID NO: 15375 - DNA, 38 bp, Artificial Sequence
  Synthetic oligonucleotide
tatggacgtccgtagtgactaagcctcctggttggtga

SEQ ID NO: 15376 - DNA, 38 bp, Artificial Sequence
  Synthetic oligonucleotide
tcacgaaccttgtaatgacgtatcctaggggtgactga

SEQ ID NO: 15377 - DNA, 35 bp, Artificial Sequence
  Synthetic oligonucleotide
ttctggataaaccatggcgcatgagtacaggcgtt

SEQ ID NO: 15378 - DNA, 37 bp, Artificial Sequence
  Synthetic oligonucleotide
ggacattagagaacattttggtggcttgccagtacga

SEQ ID NO: 15379 - DNA, 35 bp, Artificial Sequence
  Synthetic oligonucleotide
aatagtacgcagctgtcaactcagttgggtgatta

SEQ ID NO: 15380 - DNA, 36 bp, Artificial Sequence
  Synthetic oligonucleotide
tcgcacgtttggtaaactctcatttcactgtaagta

SEQ ID NO: 15381 - DNA, 38 bp, Artificial Sequence
  Synthetic oligonucleotide
aactaggcttgtcctacaatgggtcgtctcaactctga

SEQ ID NO: 15382 - DNA, 36 bp, Artificial Sequence
  Synthetic oligonucleotide
aactggtcggttgtagccgccgcaatgtcttacgta

SEQ ID NO: 15383 - DNA, 36 bp, Artificial Sequence
  Synthetic oligonucleotide
aattacagcacacggcgtgactggtaactactttta

SEQ ID NO: 15384 - DNA, 36 bp, Artificial Sequence
  Synthetic oligonucleotide
acaactatcaattcctgtgctgatatcgtgtgcgta

SEQ ID NO: 15385 - DNA, 37 bp, Artificial Sequence
  Synthetic oligonucleotide
acagggactccgtacccaggcttggtgtgctgttaga

SEQ ID NO: 15386 - DNA, 38 bp, Artificial Sequence
  Synthetic oligonucleotide
acaggttcggtaggaatctgatacgtacaatggaatga

SEQ ID NO: 15387 - DNA, 38 bp, Artificial Sequence
  Synthetic oligonucleotide
acagtgcacaacgtagactttcgcggtataaaggatga

SEQ ID NO: 15388 - DNA, 37 bp, Artificial Sequence
  Synthetic oligonucleotide
acatcgaggtgggaggcgagggttatgttcctgacga

SEQ ID NO: 15389 - DNA, 36 bp, Artificial Sequence
  Synthetic oligonucleotide
acctaaaccagacgctcatatatcttcgggggggga

SEQ ID NO: 15390 - DNA, 35 bp, Artificial Sequence
  Synthetic oligonucleotide
acgcgcacgagcggtccccagccgcccggcgttgt

SEQ ID NO: 15391 - DNA, 38 bp, Artificial Sequence
  Synthetic oligonucleotide
acgtcgcttggataggctagatgacggatggtcgctga

SEQ ID NO: 15392 - DNA, 38 bp, Artificial Sequence
  Synthetic oligonucleotide
actggcgaatgagtgtgcgtttggatacgattaaatga

SEQ ID NO: 15393 - DNA, 36 bp, Artificial Sequence
  Synthetic oligonucleotide
agcgtgagcaacggtatcctgtgtggacccgctcta

SEQ ID NO: 15394 - DNA, 36 bp, Artificial Sequence
  Synthetic oligonucleotide
atccgtaggcggacgcagtctggggaccggtactta

SEQ ID NO: 15395 - DNA, 35 bp, Artificial Sequence
  Synthetic oligonucleotide
atctctcgaagctctgcggatccgaaggtgggtga

SEQ ID NO: 15396 - DNA, 37 bp, Artificial Sequence
  Synthetic oligonucleotide
atgaatgtagtaggcacatgcagttggtcctgttaga

SEQ ID NO: 15397 - DNA, 36 bp, Artificial Sequence
  Synthetic oligonucleotide
attagaggtcttcatcgagagtttgtgtacaagcga

SEQ ID NO: 15398 - DNA, 35 bp, Artificial Sequence
  Synthetic oligonucleotide
attcacagcttcaaggaatcgaagctacgcgtact

SEQ ID NO: 15399 - DNA, 38 bp, Artificial Sequence
  Synthetic oligonucleotide
atttgcgacgactcagagtggcattcgttcccgcgtga

SEQ ID NO: 15400 - DNA, 37 bp, Artificial Sequence
  Synthetic oligonucleotide
caacgacgtgactggcaaactaaacatgtgccgacga

SEQ ID NO: 15401 - DNA, 35 bp, Artificial Sequence
  Synthetic oligonucleotide
cacctacatcaacattgaagtggaagaagtactag

SEQ ID NO: 15402 - DNA, 37 bp, Artificial Sequence
  Synthetic oligonucleotide
ccaatcaccagacgtaacacactgagacagtactaga

SEQ ID NO: 15403 - DNA, 35 bp, Artificial Sequence
  Synthetic oligonucleotide
ctaccatccatcccgtggtggctggtataatttgt

SEQ ID NO: 15404 - DNA, 37 bp, Artificial Sequence
  Synthetic oligonucleotide
ctccttgggcgtagtcgccggttgtgtaaaattgaga

SEQ ID NO: 15405 - DNA, 36 bp, Artificial Sequence
  Synthetic oligonucleotide
gaccttcccggagcctgtgcccgaggaaacacagga

SEQ ID NO: 15406 - DNA, 35 bp, Artificial Sequence
  Synthetic oligonucleotide
gactccccaggcattttgactcgagggctacggta

SEQ ID NO: 15407 - DNA, 38 bp, Artificial Sequence
  Synthetic oligonucleotide
gagcgtactagcagaatgacacggggtcacttcagtga

SEQ ID NO: 15408 - DNA, 37 bp, Artificial Sequence
  Synthetic oligonucleotide
gcaagttcaaccaaggttctcaaggagttagtgtaga

SEQ ID NO: 15409 - DNA, 38 bp, Artificial Sequence
  Synthetic oligonucleotide
gccaggggtcgaatcgtgaagtttatcggcccggttga

SEQ ID NO: 15410 - DNA, 36 bp, Artificial Sequence
  Synthetic oligonucleotide
gccattctggagtggtgtttagtaggttcggaaaca

SEQ ID NO: 15411 - DNA, 37 bp, Artificial Sequence
  Synthetic oligonucleotide
gctactagcccatgtccagatatggaccctcaaggga

SEQ ID NO: 15412 - DNA, 38 bp, Artificial Sequence
  Synthetic oligonucleotide
ggaggtacaaacgggaatggatgcggagtgttgtgtga

SEQ ID NO: 15413 - DNA, 35 bp, Artificial Sequence
  Synthetic oligonucleotide
ggcggataaagaccgcaaaccggcactcttacgac

SEQ ID NO: 15414 - DNA, 36 bp, Artificial Sequence
  Synthetic oligonucleotide
gggggtttgagcataatgtcaggcgggcacactgaa

SEQ ID NO: 15415 - DNA, 35 bp, Artificial Sequence
  Synthetic oligonucleotide
gtctatgacatgttgatactgaagggttacgagca

SEQ ID NO: 15416 - DNA, 38 bp, Artificial Sequence
  Synthetic oligonucleotide
gtggaacgacgccaagttcgtattagttcaaaacatga

SEQ ID NO: 15417 - DNA, 38 bp, Artificial Sequence
  Synthetic oligonucleotide
gtgggaggaccctagtctctcacaaaccgctatgatga

SEQ ID NO: 15418 - DNA, 36 bp, Artificial Sequence
  Synthetic oligonucleotide
gttagtcagttcccgaggtgctaattcagggtaata

SEQ ID NO: 15419 - DNA, 37 bp, Artificial Sequence
  Synthetic oligonucleotide
taagagtccaccacaagtacggaggcatcgctattga

SEQ ID NO: 15420 - DNA, 35 bp, Artificial Sequence
  Synthetic oligonucleotide
tacagccgtcgttagccttagggtttaaagaaagg

SEQ ID NO: 15421 - DNA, 37 bp, Artificial Sequence
  Synthetic oligonucleotide
tcacaaactagaatgaatagagtagtgaaggaaacga

SEQ ID NO: 15422 - DNA, 37 bp, Artificial Sequence
  Synthetic oligonucleotide
tctggtctcggcttggtcctaatacgcccgctccgga

SEQ ID NO: 15423 - DNA, 38 bp, Artificial Sequence
  Synthetic oligonucleotide
tgacctaagcgcgccggtgctacatcggtactagatga

SEQ ID NO: 15424 - DNA, 36 bp, Artificial Sequence
  Synthetic oligonucleotide
tgactggtccagcagcctgctgccatgagtaggcca

SEQ ID NO: 15425 - DNA, 36 bp, Artificial Sequence
  Synthetic oligonucleotide
tggacgacaggctatagtaggccctttatcacgtca

SEQ ID NO: 15426 - DNA, 36 bp, Artificial Sequence
  Synthetic oligonucleotide
tggacgatacctatcagattgtagggcaacatcgga

SEQ ID NO: 15427 - DNA, 35 bp, Artificial Sequence
  Synthetic oligonucleotide
ttgacaagaaaagcggacatagcagtcagtagact

SEQ ID NO: 15428 - DNA, 37 bp, Artificial Sequence
  Synthetic oligonucleotide
ttgcttacgggccctgtgcgttatgggtggatcagga

SEQ ID NO: 15429 - DNA, 38 bp, Artificial Sequence
  Synthetic oligonucleotide
ttggggaatggttgacatagtcgctgtgacgtaactga

SEQ ID NO: 15430 - DNA, 34 bp, Artificial Sequence
  Synthetic oligonucleotide
ttttgagagccgtcggtctcctcccgagcgtcca

SEQ ID NO: 15431 - DNA, 36 bp, Artificial Sequence
  Synthetic oligonucleotide
cgctagttggcccccccgcacacacagagcgtagta

SEQ ID NO: 15432 - DNA, 37 bp, Artificial Sequence
  Synthetic oligonucleotide
acaagattgatctgcgacaggcgtgctcggtctacga

SEQ ID NO: 15433 - DNA, 37 bp, Artificial Sequence
  Synthetic oligonucleotide
agcaacatagggtcatcttgttaggtacagtgcttga

SEQ ID NO: 15434 - DNA, 37 bp, Artificial Sequence
  Synthetic oligonucleotide
gactagccgggatttcacgcccaccgagtgggagtga

SEQ ID NO: 15435 - DNA, 36 bp, Artificial Sequence
  Synthetic oligonucleotide
gcaaaagacgaggtcggtgcctggtcgaagataata

SEQ ID NO: 15436 - DNA, 37 bp, Artificial Sequence
  Synthetic oligonucleotide
gtggcgaatggaatttgccactctggtacaagtacga

SEQ ID NO: 15437 - DNA, 35 bp, Artificial Sequence
  Synthetic oligonucleotide
gttgttacctggatgattgcatttccagggtatga

SEQ ID NO: 15438 - DNA, 35 bp, Artificial Sequence
  Synthetic oligonucleotide
tgggccagcttatgttctggtccctttttctgtac

SEQ ID NO: 15439 - DNA, 35 bp, Artificial Sequence
  Synthetic oligonucleotide
gctagtcatggctggaagcggcgaacctccagtgt

SEQ ID NO: 15440 - DNA, 37 bp, Artificial Sequence
  Synthetic oligonucleotide
aaacgctatgttggtgaaactagcacagacatccaga

SEQ ID NO: 15441 - DNA, 35 bp, Artificial Sequence
  Synthetic oligonucleotide
aaacgtgcaggcgtgcccataaagttgtgaccttg

SEQ ID NO: 15442 - DNA, 37 bp, Artificial Sequence
  Synthetic oligonucleotide
aaccaacagctggtcgggtgcgccctaggtcgcacga

SEQ ID NO: 15443 - DNA, 35 bp, Artificial Sequence
  Synthetic oligonucleotide
aagtctagagtatgtccatggaaacactaaatgga

SEQ ID NO: 15444 - DNA, 35 bp, Artificial Sequence
  Synthetic oligonucleotide
aagtctgagatacttgtgtccatctgttctggcat

SEQ ID NO: 15445 - DNA, 37 bp, Artificial Sequence
  Synthetic oligonucleotide
aatgcaccggactcaatttcatgactgtggtacttga

SEQ ID NO: 15446 - DNA, 38 bp, Artificial Sequence
  Synthetic oligonucleotide
aattagcggtgtactcgattagcgtaatcgtggtatga

SEQ ID NO: 15447 - DNA, 37 bp, Artificial Sequence
  Synthetic oligonucleotide
aattggggtcaaataaatgtgcctccggggagtccga

SEQ ID NO: 15448 - DNA, 38 bp, Artificial Sequence
  Synthetic oligonucleotide
acactgacatttcaggaggttaaatgcgctgttgatga

SEQ ID NO: 15449 - DNA, 38 bp, Artificial Sequence
  Synthetic oligonucleotide
acatacgtgagtgccccggtaaagcgctctggaggtga

SEQ ID NO: 15450 - DNA, 35 bp, Artificial Sequence
  Synthetic oligonucleotide
acgcacgcaaactaagcgtttgtagggcgtgaccc

SEQ ID NO: 15451 - DNA, 37 bp, Artificial Sequence
  Synthetic oligonucleotide
acggaggggccttgtatttaggtacgatcgtgaagga

SEQ ID NO: 15452 - DNA, 35 bp, Artificial Sequence
  Synthetic oligonucleotide
actcgatatcgcatatcatgccgggacgtactgct

SEQ ID NO: 15453 - DNA, 37 bp, Artificial Sequence
  Synthetic oligonucleotide
agcacgggtgacgcaagtttggactgcaatcagtgga

SEQ ID NO: 15454 - DNA, 38 bp, Artificial Sequence
  Synthetic oligonucleotide
agcagtctagcgataatatgtaatacgtagttccttga

SEQ ID NO: 15455 - DNA, 37 bp, Artificial Sequence
  Synthetic oligonucleotide
aggggcgtgcccggtccacgcccacgcttctgataga

SEQ ID NO: 15456 - DNA, 35 bp, Artificial Sequence
  Synthetic oligonucleotide
agtcgtcactgtaacggatacttcatatccgttca

SEQ ID NO: 15457 - DNA, 35 bp, Artificial Sequence
  Synthetic oligonucleotide
agtctggatactgcgagagactgtaatgggctagg

SEQ ID NO: 15458 - DNA, 37 bp, Artificial Sequence
  Synthetic oligonucleotide
atacatgcagaacacttagtaggtgttgggtccatga

SEQ ID NO: 15459 - DNA, 35 bp, Artificial Sequence
  Synthetic oligonucleotide
atcaagagggctacaacttgcacgtgtcacggaaa

SEQ ID NO: 15460 - DNA, 35 bp, Artificial Sequence
  Synthetic oligonucleotide
atcagactacgatctacggcggtatgcgcacgttg

SEQ ID NO: 15461 - DNA, 38 bp, Artificial Sequence
  Synthetic oligonucleotide
atcatgcgggaaaatatacggatgtggaaataggttga

SEQ ID NO: 15462 - DNA, 38 bp, Artificial Sequence
  Synthetic oligonucleotide
atgaagccccggtgcaaggaatgatgaatcgcgagtga

SEQ ID NO: 15463 - DNA, 37 bp, Artificial Sequence
  Synthetic oligonucleotide
atgacgccactcgcagggcgtatgttcagaggggaga

SEQ ID NO: 15464 - DNA, 35 bp, Artificial Sequence
  Synthetic oligonucleotide
atggacccctagatagtaggtgtcaagttttgatc

SEQ ID NO: 15465 - DNA, 37 bp, Artificial Sequence
  Synthetic oligonucleotide
atggtacccggcgttgtagccatacatatgcagacga

SEQ ID NO: 15466 - DNA, 36 bp, Artificial Sequence
  Synthetic oligonucleotide
atgtacgttaatggagttcgagcttggaaatgtata

SEQ ID NO: 15467 - DNA, 36 bp, Artificial Sequence
  Synthetic oligonucleotide
attactgtcgggtcacgatatgcgtcatggtttaaa

SEQ ID NO: 15468 - DNA, 35 bp, Artificial Sequence
  Synthetic oligonucleotide
catgacggacgatcggttgatgaaatacgtattat

SEQ ID NO: 15469 - DNA, 36 bp, Artificial Sequence
  Synthetic oligonucleotide
catgacgtccgccccgaaatgaaagccggaaggtga

SEQ ID NO: 15470 - DNA, 37 bp, Artificial Sequence
  Synthetic oligonucleotide
cccagcgcgagtcgctatagcagatttctggagcgga

SEQ ID NO: 15471 - DNA, 35 bp, Artificial Sequence
  Synthetic oligonucleotide
ccgttgatgtccctgaattcgatggtagagctttg

SEQ ID NO: 15472 - DNA, 36 bp, Artificial Sequence
  Synthetic oligonucleotide
ccttgagtatgccgaacagccgtcatgtcaggggta

SEQ ID NO: 15473 - DNA, 36 bp, Artificial Sequence
  Synthetic oligonucleotide
ctacgctgagctccgtagtgctggcgtagatggata

SEQ ID NO: 15474 - DNA, 35 bp, Artificial Sequence
  Synthetic oligonucleotide
ctccccccataagtggtcccagtgctcacctcgtt

SEQ ID NO: 15475 - DNA, 36 bp, Artificial Sequence
  Synthetic oligonucleotide
ctggaaagcatctaactctctggtagtactgcgtta

SEQ ID NO: 15476 - DNA, 35 bp, Artificial Sequence
  Synthetic oligonucleotide
gaactgggacgctgttaccaagtgacgtgcgctca

SEQ ID NO: 15477 - DNA, 38 bp, Artificial Sequence
  Synthetic oligonucleotide
gaagcttgcgacatattcacgggataggcgaatactga

SEQ ID NO: 15478 - DNA, 35 bp, Artificial Sequence
  Synthetic oligonucleotide
gaatgagacacgtgtagcacttatgggaaaacctc

SEQ ID NO: 15479 - DNA, 37 bp, Artificial Sequence
  Synthetic oligonucleotide
gacatgctccgccaagtcacacttttggtgagataga

SEQ ID NO: 15480 - DNA, 37 bp, Artificial Sequence
  Synthetic oligonucleotide
gacccagttcaatccctccgcttactgtggcactcga

SEQ ID NO: 15481 - DNA, 37 bp, Artificial Sequence
  Synthetic oligonucleotide
gagctacaccgaccggcgttggtttttattgtttgga

SEQ ID NO: 15482 - DNA, 35 bp, Artificial Sequence
  Synthetic oligonucleotide
gagggatgttcaatgcttacaggccaccaaaatca

SEQ ID NO: 15483 - DNA, 38 bp, Artificial Sequence
  Synthetic oligonucleotide
gagtgactcggtgagttgagcgttctacgggcctttga

SEQ ID NO: 15484 - DNA, 36 bp, Artificial Sequence
  Synthetic oligonucleotide
gatattcgtcaatgcggtctctgccagtcgaaaaga

SEQ ID NO: 15485 - DNA, 37 bp, Artificial Sequence
  Synthetic oligonucleotide
gattagcgctacgtgcaagagtgtgctcacacggcga

SEQ ID NO: 15486 - DNA, 37 bp, Artificial Sequence
  Synthetic oligonucleotide
gcaagtttggtcatggggtagtcgtgtctggacccga

SEQ ID NO: 15487 - DNA, 36 bp, Artificial Sequence
  Synthetic oligonucleotide
gcaatgtggcttatccaagactaagtaacagtttga

SEQ ID NO: 15488 - DNA, 37 bp, Artificial Sequence
  Synthetic oligonucleotide
gccatggccctacgttttggcctgctggtcaagacga

SEQ ID NO: 15489 - DNA, 36 bp, Artificial Sequence
  Synthetic oligonucleotide
gccccgtaggcaatggatgctgtattatctacgcga

SEQ ID NO: 15490 - DNA, 38 bp, Artificial Sequence
  Synthetic oligonucleotide
gccctccagggctagttcgaagtgtttgaaacacgtga

SEQ ID NO: 15491 - DNA, 35 bp, Artificial Sequence
  Synthetic oligonucleotide
gcctatgcaagaaccaaatgttataaatgggtttg

SEQ ID NO: 15492 - DNA, 38 bp, Artificial Sequence
  Synthetic oligonucleotide
gcctgcagctataatgagtgccctatgctggtttgtga

SEQ ID NO: 15493 - DNA, 36 bp, Artificial Sequence
  Synthetic oligonucleotide
gcgaccggtgatttaaggtagtggtctgtgggacga

SEQ ID NO: 15494 - DNA, 36 bp, Artificial Sequence
  Synthetic oligonucleotide
gcggggcgatcaacaatgggattgggatcgtgggta

SEQ ID NO: 15495 - DNA, 36 bp, Artificial Sequence
  Synthetic oligonucleotide
gcggtaaactacgaaatccggacaagtggagtctta

SEQ ID NO: 15496 - DNA, 38 bp, Artificial Sequence
  Synthetic oligonucleotide
ggacacacggctcgggttgtacgcccagttcggtctga

SEQ ID NO: 15497 - DNA, 38 bp, Artificial Sequence
  Synthetic oligonucleotide
ggccaaacaggtcgttgttctacgtacaagcgttatga

SEQ ID NO: 15498 - DNA, 36 bp, Artificial Sequence
  Synthetic oligonucleotide
gggtacgtaagccatggaatggggatcagagatgga

SEQ ID NO: 15499 - DNA, 35 bp, Artificial Sequence
  Synthetic oligonucleotide
ggtactgtcagccagaacactttaccagtattact

SEQ ID NO: 15500 - DNA, 36 bp, Artificial Sequence
  Synthetic oligonucleotide
ggtcccaacgatctgggatttccattgggctacgca

SEQ ID NO: 15501 - DNA, 36 bp, Artificial Sequence
  Synthetic oligonucleotide
ggtcttgttcatgcgtggccacagcatgacgggtaa

SEQ ID NO: 15502 - DNA, 38 bp, Artificial Sequence
  Synthetic oligonucleotide
ggtggacgcgcgaggtaccgcgagatgggaagccgtga

SEQ ID NO: 15503 - DNA, 37 bp, Artificial Sequence
  Synthetic oligonucleotide
ggtgttgtggtgctgtagtaactgcgaacatgacgga

SEQ ID NO: 15504 - DNA, 37 bp, Artificial Sequence
  Synthetic oligonucleotide
ggttcagctagatactgtctggctttagtctaggcga

SEQ ID NO: 15505 - DNA, 35 bp, Artificial Sequence
  Synthetic oligonucleotide
ggttggggctcccttagattctatttcgttcactg

SEQ ID NO: 15506 - DNA, 38 bp, Artificial Sequence
  Synthetic oligonucleotide
gtaacagaactcaaccttagtgatgaaagatcacatga

SEQ ID NO: 15507 - DNA, 35 bp, Artificial Sequence
  Synthetic oligonucleotide
gtaaccaacccggatagcaattagctcggcctctc

SEQ ID NO: 15508 - DNA, 37 bp, Artificial Sequence
  Synthetic oligonucleotide
gtacggcttgttgggagggctctacgagtctgtttga

SEQ ID NO: 15509 - DNA, 35 bp, Artificial Sequence
  Synthetic oligonucleotide
gtaggtggtcctgtatagttgtgtaatgcttcacg

SEQ ID NO: 15510 - DNA, 36 bp, Artificial Sequence
  Synthetic oligonucleotide
gtagtccgtacgttgaaacaggcaaatcccgaccga

SEQ ID NO: 15511 - DNA, 35 bp, Artificial Sequence
  Synthetic oligonucleotide
gtatgtaaggaaaggtgcatcgagacctagtgtag

SEQ ID NO: 15512 - DNA, 35 bp, Artificial Sequence
  Synthetic oligonucleotide
gtgaattgctatacgtgcctggtaaccacacggtt

SEQ ID NO: 15513 - DNA, 37 bp, Artificial Sequence
  Synthetic oligonucleotide
gtgcgacgagatctatcagtgatggatagttgtgaga

SEQ ID NO: 15514 - DNA, 38 bp, Artificial Sequence
  Synthetic oligonucleotide
gtggtcgttgctctgcatggcccgtacggacatgttga

SEQ ID NO: 15515 - DNA, 35 bp, Artificial Sequence
  Synthetic oligonucleotide
gtgtgtgcacttggacactgcgtcacatatagcgt

SEQ ID NO: 15516 - DNA, 37 bp, Artificial Sequence
  Synthetic oligonucleotide
gttacgtacagacggttagctagagactaaaggggga

SEQ ID NO: 15517 - DNA, 37 bp, Artificial Sequence
  Synthetic oligonucleotide
gttagcgctcgggtagatgtggcgaagcccataaaga

SEQ ID NO: 15518 - DNA, 35 bp, Artificial Sequence
  Synthetic oligonucleotide
gttgatgtccaaccgtgcctggatacacccgcccc

SEQ ID NO: 15519 - DNA, 36 bp, Artificial Sequence
  Synthetic oligonucleotide
tacaaagggtcgcccgatagggaggacgcggactca

SEQ ID NO: 15520 - DNA, 37 bp, Artificial Sequence
  Synthetic oligonucleotide
tacatgaacaattagcatactaaaggtgcttggtcga

SEQ ID NO: 15521 - DNA, 36 bp, Artificial Sequence
  Synthetic oligonucleotide
taccgggttagggaaggaactggctacaggagggca

SEQ ID NO: 15522 - DNA, 36 bp, Artificial Sequence
  Synthetic oligonucleotide
tacgctacgagtacaacgtctgaggcgcgtggcaca

SEQ ID NO: 15523 - DNA, 38 bp, Artificial Sequence
  Synthetic oligonucleotide
tacgcttgacgctgctttacaaatcaccagtcaactga

SEQ ID NO: 15524 - DNA, 38 bp, Artificial Sequence
  Synthetic oligonucleotide
tacgttcgcgaacatcatggtggctgtgctccacatga

SEQ ID NO: 15525 - DNA, 35 bp, Artificial Sequence
  Synthetic oligonucleotide
tagaggacatgatcattcaggttcggtcggggttg

SEQ ID NO: 15526 - DNA, 38 bp, Artificial Sequence
  Synthetic oligonucleotide
tcactggatcattgggtctgaagatggagtgactttga

SEQ ID NO: 15527 - DNA, 38 bp, Artificial Sequence
  Synthetic oligonucleotide
tcattctggccttatgaacagaaatgccatggcactga

SEQ ID NO: 15528 - DNA, 38 bp, Artificial Sequence
  Synthetic oligonucleotide
tcggaggagttcgactatctactacgatacctgcctga

SEQ ID NO: 15529 - DNA, 36 bp, Artificial Sequence
  Synthetic oligonucleotide
tcgggtctgacttgggggccacagcctcgactcgga

SEQ ID NO: 15530 - DNA, 38 bp, Artificial Sequence
  Synthetic oligonucleotide
tcgtacccggcccctactgcttgtactggttgtagtga

SEQ ID NO: 15531 - DNA, 35 bp, Artificial Sequence
  Synthetic oligonucleotide
tctcgcactagtcagcaggttggaatcatcaacct

SEQ ID NO: 15532 - DNA, 37 bp, Artificial Sequence
  Synthetic oligonucleotide
tgacatggatcgtacctggacagtgcgggagggtgga

SEQ ID NO: 15533 - DNA, 36 bp, Artificial Sequence
  Synthetic oligonucleotide
tgatgtgtctgagcatcaggcatgcgcacaacgtca

SEQ ID NO: 15534 - DNA, 35 bp, Artificial Sequence
  Synthetic oligonucleotide
tgcaaatggctgatcgtcgtcatacgctattgcca

SEQ ID NO: 15535 - DNA, 38 bp, Artificial Sequence
  Synthetic oligonucleotide
tgccagctaacatttcgtagtaaattgggaaaacctga

SEQ ID NO: 15536 - DNA, 35 bp, Artificial Sequence
  Synthetic oligonucleotide
tgccgtcgtgccctagtcccgtatgattaccgaga

SEQ ID NO: 15537 - DNA, 35 bp, Artificial Sequence
  Synthetic oligonucleotide
tgcgagagggtagccatttcatcaaacagaagtgc

SEQ ID NO: 15538 - DNA, 37 bp, Artificial Sequence
  Synthetic oligonucleotide
tgcggttctcacgcaacggtccggtcgtgcggaggga

SEQ ID NO: 15539 - DNA, 35 bp, Artificial Sequence
  Synthetic oligonucleotide
tgtcacagtgttgcacggtgcaatgaatcagtagt

SEQ ID NO: 15540 - DNA, 37 bp, Artificial Sequence
  Synthetic oligonucleotide
tgtcgtttgtattatgaaaactcaacgcaaaacggga

SEQ ID NO: 15541 - DNA, 36 bp, Artificial Sequence
  Synthetic oligonucleotide
tgttaccggttaccggtttgtaaagacgcagtctca

SEQ ID NO: 15542 - DNA, 37 bp, Artificial Sequence
  Synthetic oligonucleotide
ttaaactgtagtcggtccgtacaaccttgtaattaga

SEQ ID NO: 15543 - DNA, 35 bp, Artificial Sequence
  Synthetic oligonucleotide
ttaaatacttgctcgtgggaggtgtctgagggacg

SEQ ID NO: 15544 - DNA, 37 bp, Artificial Sequence
  Synthetic oligonucleotide
ttcaagtgggccgggtatagaatcggcctcaggggga

SEQ ID NO: 15545 - DNA, 37 bp, Artificial Sequence
  Synthetic oligonucleotide
ttcgccgaacgtctctggagagagggagacgggtcga

SEQ ID NO: 15546 - DNA, 37 bp, Artificial Sequence
  Synthetic oligonucleotide
ttgcggctcgccgctgggagaacgtaaactggaacga

SEQ ID NO: 15547 - DNA, 35 bp, Artificial Sequence
  Synthetic oligonucleotide
ttggtcctgcacatggtgcctcgccgattttagcc

SEQ ID NO: 15548 - DNA, 37 bp, Artificial Sequence
  Synthetic oligonucleotide
ttgtactcaggttctgttctagcaggcatgccacaga

SEQ ID NO: 15549 - DNA, 36 bp, Artificial Sequence
  Synthetic oligonucleotide
tttacgtggttacgcaggcctcatagatggtacgta

SEQ ID NO: 15550 - DNA, 35 bp, Artificial Sequence
  Synthetic oligonucleotide
tttgagaccggactagctccattaatcgcgcacgc

SEQ ID NO: 15551 - DNA, 35 bp, Artificial Sequence
  Synthetic oligonucleotide
tttgcatgaagtctgtttgacagtctggggtcgtg

SEQ ID NO: 15552 - DNA, 38 bp, Artificial Sequence
  Synthetic oligonucleotide
tagggggcttcacatgagaaaaacacggtcgtatgtga

SEQ ID NO: 15553 - DNA, 36 bp, Artificial Sequence
  Synthetic oligonucleotide
tgtcatgcaacgtgagatcaactggtttaaagtcga

SEQ ID NO: 15554 - DNA, 35 bp, Artificial Sequence
  Synthetic oligonucleotide
aatgctagttccccccgtaggttctgttgatcagt

SEQ ID NO: 15555 - DNA, 38 bp, Artificial Sequence
  Synthetic oligonucleotide
cgtcgaatgatagtgatgcaaacatgcgagcgatatga

SEQ ID NO: 15556 - DNA, 38 bp, Artificial Sequence
  Synthetic oligonucleotide
tacgtcacaagacagtgcctttgtgcggaccctgctga

SEQ ID NO: 15557 - DNA, 35 bp, Artificial Sequence
  Synthetic oligonucleotide
aaaacgcggattttgagttcccaatacgggtacgt

SEQ ID NO: 15558 - DNA, 37 bp, Artificial Sequence
  Synthetic oligonucleotide
aaaacgtcgtacatgcatctactctggcgaaggttga

SEQ ID NO: 15559 - DNA, 36 bp, Artificial Sequence
  Synthetic oligonucleotide
aatgagctcggtactgtgtcatgaaggtgcccctta

SEQ ID NO: 15560 - DNA, 35 bp, Artificial Sequence
  Synthetic oligonucleotide
accggaggagtgtatttatccgactcggttccgtc

SEQ ID NO: 15561 - DNA, 38 bp, Artificial Sequence
  Synthetic oligonucleotide
actcccgagatactgcccgtccccctgattgcacatga

SEQ ID NO: 15562 - DNA, 36 bp, Artificial Sequence
  Synthetic oligonucleotide
agagcaagggaacttacagggggccaatgcttttga

SEQ ID NO: 15563 - DNA, 35 bp, Artificial Sequence
  Synthetic oligonucleotide
atattgtactggtgactgggatcactacttagtgt

SEQ ID NO: 15564 - DNA, 36 bp, Artificial Sequence
  Synthetic oligonucleotide
atcatacttcgttatactagtaattttcacttcgga

SEQ ID NO: 15565 - DNA, 35 bp, Artificial Sequence
  Synthetic oligonucleotide
gctaagcctagtacgtgtagtagctcctagcctgc

SEQ ID NO: 15566 - DNA, 38 bp, Artificial Sequence
  Synthetic oligonucleotide
gctcgaagtgtgcgtactgacaagggagcatttcgtga

SEQ ID NO: 15567 - DNA, 38 bp, Artificial Sequence
  Synthetic oligonucleotide
gctgtagtccacgaggctgatacttaactcttgagtga

SEQ ID NO: 15568 - DNA, 31 bp, Artificial Sequence
  Synthetic oligonucleotide
gggattgccttctcaaagagcccacgactgg

SEQ ID NO: 15569 - DNA, 38 bp, Artificial Sequence
  Synthetic oligonucleotide
gtgtgcagaatcctgacacatccaaccgggttaggtga

SEQ ID NO: 15570 - DNA, 38 bp, Artificial Sequence
  Synthetic oligonucleotide
taaacgggtttacgacgcgctgctaaaggagttggtga

SEQ ID NO: 15571 - DNA, 38 bp, Artificial Sequence
  Synthetic oligonucleotide
tataccccgcttctgtgcgtcgagcggtcactgcctga

SEQ ID NO: 15572 - DNA, 36 bp, Artificial Sequence
  Synthetic oligonucleotide
tcaacatccatttgtgattatatggttagggtgaaa

SEQ ID NO: 15573 - DNA, 37 bp, Artificial Sequence
  Synthetic oligonucleotide
tcgtccaccgcccgcggaatgtaaagacctgggaaga

SEQ ID NO: 15574 - DNA, 38 bp, Artificial Sequence
  Synthetic oligonucleotide
ttacgtatgagatatcagaatgggtcaactatagttga

SEQ ID NO: 15575 - DNA, 35 bp, Artificial Sequence
  Synthetic oligonucleotide
ctgttcagggaactgaaggacgggtaatcataatg

SEQ ID NO: 15576 - DNA, 38 bp, Artificial Sequence
  Synthetic oligonucleotide
aagtcatagcgacgaaaggcacagtctcatggtcacga

SEQ ID NO: 15577 - DNA, 35 bp, Artificial Sequence
  Synthetic oligonucleotide
atgcaatttacgtacaattagggaaacacctgtgg

SEQ ID NO: 15578 - DNA, 38 bp, Artificial Sequence
  Synthetic oligonucleotide
gaaacgtggcgatggtgagccgcgtggtgtcctactga

SEQ ID NO: 15579 - DNA, 38 bp, Artificial Sequence
  Synthetic oligonucleotide
gacacggggagcagaataccccagcgcgaccctactga

SEQ ID NO: 15580 - DNA, 38 bp, Artificial Sequence
  Synthetic oligonucleotide
ttaccgggaatcgttgcgactgtttaaaataaggttga

SEQ ID NO: 15581 - DNA, 37 bp, Artificial Sequence
  Synthetic oligonucleotide
gcagagatcgatttgtaaagatctccgccccgtacga

SEQ ID NO: 15582 - DNA, 38 bp, Artificial Sequence
  Synthetic oligonucleotide
gtgcgactcactgccaagtataaagcgggctcgactga

SEQ ID NO: 15583 - DNA, 35 bp, Artificial Sequence
  Synthetic oligonucleotide
aaaacatcttcgggatttgggactaaccatgccag

SEQ ID NO: 15584 - DNA, 37 bp, Artificial Sequence
  Synthetic oligonucleotide
aagtgtcactgtacggctttagatgattggctcagga

SEQ ID NO: 15585 - DNA, 35 bp, Artificial Sequence
  Synthetic oligonucleotide
acatcctcccaggccgcagtattcccccccgcagg

SEQ ID NO: 15586 - DNA, 35 bp, Artificial Sequence
  Synthetic oligonucleotide
acgggagtgaacacgcctgtagcaggtggagtaaa

SEQ ID NO: 15587 - DNA, 35 bp, Artificial Sequence
  Synthetic oligonucleotide
acttccgccgatattcttgcattaagagaattgga

SEQ ID NO: 15588 - DNA, 37 bp, Artificial Sequence
  Synthetic oligonucleotide
agagcacctgaaaggtctgtgaagggggtggagggga

SEQ ID NO: 15589 - DNA, 36 bp, Artificial Sequence
  Synthetic oligonucleotide
agtccacaatatgctattccggaaccggttctatta

SEQ ID NO: 15590 - DNA, 37 bp, Artificial Sequence
  Synthetic oligonucleotide
atatagcccgggatgggcgcatgtatggtaggtgcga

SEQ ID NO: 15591 - DNA, 35 bp, Artificial Sequence
  Synthetic oligonucleotide
atcccgattacgttactgctttcacgttcttttgt

SEQ ID NO: 15592 - DNA, 37 bp, Artificial Sequence
  Synthetic oligonucleotide
atggttcgtggggctgcaggcccgacgtctgaatgga

SEQ ID NO: 15593 - DNA, 38 bp, Artificial Sequence
  Synthetic oligonucleotide
atgtcgggggcaccacgttgataaatggtgcaatgtga

SEQ ID NO: 15594 - DNA, 37 bp, Artificial Sequence
  Synthetic oligonucleotide
atttctccctctgagcgaaaagtgctcgtggggacga

SEQ ID NO: 15595 - DNA, 35 bp, Artificial Sequence
  Synthetic oligonucleotide
cactaacatataacaagtgaatggccttgtggcgc

SEQ ID NO: 15596 - DNA, 36 bp, Artificial Sequence
  Synthetic oligonucleotide
gaagatcacgttcggtagtgtgatctactaatggta

SEQ ID NO: 15597 - DNA, 37 bp, Artificial Sequence
  Synthetic oligonucleotide
gaccggagatcgagcaatttcgcttacagggcgttga

SEQ ID NO: 15598 - DNA, 38 bp, Artificial Sequence
  Synthetic oligonucleotide
gagtgctttcttctgtgaccataaggtttcatgtgtga

SEQ ID NO: 15599 - DNA, 35 bp, Artificial Sequence
  Synthetic oligonucleotide
gatgtttgagtttcggtggacgtcaggatttttcg

SEQ ID NO: 15600 - DNA, 37 bp, Artificial Sequence
  Synthetic oligonucleotide
gcaacgtgaagagctagaagtccatttcgttttatga

SEQ ID NO: 15601 - DNA, 35 bp, Artificial Sequence
  Synthetic oligonucleotide
gccgagatgctggggtaggctgcacggtcaaggta

SEQ ID NO: 15602 - DNA, 35 bp, Artificial Sequence
  Synthetic oligonucleotide
ggatatcggctggatggtctggaggggcgttctct

SEQ ID NO: 15603 - DNA, 35 bp, Artificial Sequence
  Synthetic oligonucleotide
ggtaaactcgtcatggaccaggtatgtcgattgcc

SEQ ID NO: 15604 - DNA, 36 bp, Artificial Sequence
  Synthetic oligonucleotide
gtaacgatgtattagaatcagacgttatgttaagta

SEQ ID NO: 15605 - DNA, 38 bp, Artificial Sequence
  Synthetic oligonucleotide
gttaggccgctattattgtactgtatgcggcccactga

SEQ ID NO: 15606 - DNA, 36 bp, Artificial Sequence
  Synthetic oligonucleotide
gttatctgtgtcctatatggatataatggtccgtga

SEQ ID NO: 15607 - DNA, 37 bp, Artificial Sequence
  Synthetic oligonucleotide
gtttaaaggctttgctgctactcattcgatcgaagga

SEQ ID NO: 15608 - DNA, 37 bp, Artificial Sequence
  Synthetic oligonucleotide
tagtagtgatgcgctagactcatgcggggtcatgaga

SEQ ID NO: 15609 - DNA, 38 bp, Artificial Sequence
  Synthetic oligonucleotide
tataacgcgtgatatgcacttatttacattcagtatga

SEQ ID NO: 15610 - DNA, 38 bp, Artificial Sequence
  Synthetic oligonucleotide
tattgaaagaatactgaaatcagccagtacccccgtga

SEQ ID NO: 15611 - DNA, 37 bp, Artificial Sequence
  Synthetic oligonucleotide
tcccacagcacatttgatttgcattttgtggatatga

SEQ ID NO: 15612 - DNA, 34 bp, Artificial Sequence
  Synthetic oligonucleotide
tcgtggggtatgatatacgtcctgcttgaatgca

SEQ ID NO: 15613 - DNA, 35 bp, Artificial Sequence
  Synthetic oligonucleotide
tgaggtaatttggggagccttacccggtacgggtg

SEQ ID NO: 15614 - DNA, 38 bp, Artificial Sequence
  Synthetic oligonucleotide
tgccattcgttgtttggatcgaacgagtagcgagttga

SEQ ID NO: 15615 - DNA, 38 bp, Artificial Sequence
  Synthetic oligonucleotide
tggtagctcagatacacaaaacgcttgagcaaagttga

SEQ ID NO: 15616 - DNA, 36 bp, Artificial Sequence
  Synthetic oligonucleotide
tgttaccttgtacacatgtacgaggctagtacgaaa

SEQ ID NO: 15617 - DNA, 36 bp, Artificial Sequence
  Synthetic oligonucleotide
tgttgagcaacttggtgctatctaaatagcggacta

SEQ ID NO: 15618 - DNA, 38 bp, Artificial Sequence
  Synthetic oligonucleotide
ttcgtactgagtatgtggattccatatcgactggttga

SEQ ID NO: 15619 - DNA, 35 bp, Artificial Sequence
  Synthetic oligonucleotide
ttgcccacccagtattgcgtttagcgcgctatcga

SEQ ID NO: 15620 - DNA, 38 bp, Artificial Sequence
  Synthetic oligonucleotide
aactacgcagaggacggagcgggaagtcttctatgtga

SEQ ID NO: 15621 - DNA, 35 bp, Artificial Sequence
  Synthetic oligonucleotide
attgaatggagggctgttccagtggggagagcagg

SEQ ID NO: 15622 - DNA, 37 bp, Artificial Sequence
  Synthetic oligonucleotide
gaacagtgcaatgagtgggattggcttcaccgcctga

SEQ ID NO: 15623 - DNA, 36 bp, Artificial Sequence
  Synthetic oligonucleotide
tcacgtttgtagttatagaataaggcctgacgggta

SEQ ID NO: 15624 - DNA, 38 bp, Artificial Sequence
  Synthetic oligonucleotide
ttccacaggtgagttttagccacctgctttcatagtga

SEQ ID NO: 15625 - DNA, 38 bp, Artificial Sequence
  Synthetic oligonucleotide
aaagcagggaggccgttaagccgacgtaatgacgctga

SEQ ID NO: 15626 - DNA, 38 bp, Artificial Sequence
  Synthetic oligonucleotide
aggactcgcgcaagcaacactgcgcgttcacaatgtga

SEQ ID NO: 15627 - DNA, 35 bp, Artificial Sequence
  Synthetic oligonucleotide
ttagtgaagttcccgataccgttacctggagtcag

SEQ ID NO: 15628 - DNA, 35 bp, Artificial Sequence
  Synthetic oligonucleotide
ttacggacactaaacatacgaggttgcgggtcggg

SEQ ID NO: 15629 - DNA, 37 bp, Artificial Sequence
  Synthetic oligonucleotide
aatcagctacataaggcatatgggaacaggctgagga

SEQ ID NO: 15630 - DNA, 35 bp, Artificial Sequence
  Synthetic oligonucleotide
taatacgttatcagacccgcattagtgtaaacgtt

SEQ ID NO: 15631 - DNA, 35 bp, Artificial Sequence
  Synthetic oligonucleotide
ttaaggggcacggatatcgtgctgaatcgaaacgt

SEQ ID NO: 15632 - DNA, 37 bp, Artificial Sequence
  Synthetic oligonucleotide
aacagttgggtcaggggaaacaggggcatatggctga

SEQ ID NO: 15633 - DNA, 37 bp, Artificial Sequence
  Synthetic oligonucleotide
aacgtggtggagtcaatacttaagtacgagtcgctga

SEQ ID NO: 15634 - DNA, 35 bp, Artificial Sequence
  Synthetic oligonucleotide
aactgacggtgcgagccacccagaaaagtgtaatg

SEQ ID NO: 15635 - DNA, 38 bp, Artificial Sequence
  Synthetic oligonucleotide
aagattgcaggtttctagatcatgcgtagtgagtatga

SEQ ID NO: 15636 - DNA, 37 bp, Artificial Sequence
  Synthetic oligonucleotide
aatgagtggatcctcattgtaactaggcattcacgga

SEQ ID NO: 15637 - DNA, 35 bp, Artificial Sequence
  Synthetic oligonucleotide
aattgacggttgcaggtctcgcaaagtggagactg

SEQ ID NO: 15638 - DNA, 35 bp, Artificial Sequence
  Synthetic oligonucleotide
acaaacggattgaagactgtaacctatacagtgcg

SEQ ID NO: 15639 - DNA, 37 bp, Artificial Sequence
  Synthetic oligonucleotide
acaacacaagcttttgccgcgacggagtgcgactgga

SEQ ID NO: 15640 - DNA, 36 bp, Artificial Sequence
  Synthetic oligonucleotide
acaagcagtacgtacctgacgaggcgttaaatcaaa

SEQ ID NO: 15641 - DNA, 35 bp, Artificial Sequence
  Synthetic oligonucleotide
acacgtctcaggttagttacccctgaccacgcggg

SEQ ID NO: 15642 - DNA, 37 bp, Artificial Sequence
  Synthetic oligonucleotide
accgagagacgtcgaaagccgtccatattgtaaagga

SEQ ID NO: 15643 - DNA, 37 bp, Artificial Sequence
  Synthetic oligonucleotide
accgccctgcaatttgtccataattacaggatgtgga

SEQ ID NO: 15644 - DNA, 35 bp, Artificial Sequence
  Synthetic oligonucleotide
acgcactttggagttgtcataaggcatagttagta

SEQ ID NO: 15645 - DNA, 37 bp, Artificial Sequence
  Synthetic oligonucleotide
acgcccccggggtgctttaccgtccacttttcagtga

SEQ ID NO: 15646 - DNA, 36 bp, Artificial Sequence
  Synthetic oligonucleotide
acgctgatcaaggaaagtatcaacgatgctccggga

SEQ ID NO: 15647 - DNA, 35 bp, Artificial Sequence
  Synthetic oligonucleotide
acgtacctatgttgtgaacgggagtaggggacctt

SEQ ID NO: 15648 - DNA, 35 bp, Artificial Sequence
  Synthetic oligonucleotide
actgcagaattatgccagtgggtatggccaaagga

SEQ ID NO: 15649 - DNA, 37 bp, Artificial Sequence
  Synthetic oligonucleotide
actgccgcatactgggatgtctcttaaacctctcgga

SEQ ID NO: 15650 - DNA, 35 bp, Artificial Sequence
  Synthetic oligonucleotide
acttcgttagatctcctggagaaaggggtacttgg

SEQ ID NO: 15651 - DNA, 36 bp, Artificial Sequence
  Synthetic oligonucleotide
agcatatgggcacgtgttgatcgccctatttaagga

SEQ ID NO: 15652 - DNA, 38 bp, Artificial Sequence
  Synthetic oligonucleotide
agcccagccgcgcccgggtccgataaccgcggtcatga

SEQ ID NO: 15653 - DNA, 37 bp, Artificial Sequence
  Synthetic oligonucleotide
agtacttggtctgggccccacaataaacaataaggga

SEQ ID NO: 15654 - DNA, 35 bp, Artificial Sequence
  Synthetic oligonucleotide
atagcgggggtagttctttttagccagattagtgt

SEQ ID NO: 15655 - DNA, 36 bp, Artificial Sequence
  Synthetic oligonucleotide
atatctgtgacttcgagtatcgggattgccgagcta

SEQ ID NO: 15656 - DNA, 38 bp, Artificial Sequence
  Synthetic oligonucleotide
atcggacggtcgttgtgctggaggaacgtctgatatga

SEQ ID NO: 15657 - DNA, 35 bp, Artificial Sequence
  Synthetic oligonucleotide
atcttatccgcacagacttgtgaacgggtgatggt

SEQ ID NO: 15658 - DNA, 37 bp, Artificial Sequence
  Synthetic oligonucleotide
atgaccaacaaacgctcatagatcgtgggtacaacga

SEQ ID NO: 15659 - DNA, 35 bp, Artificial Sequence
  Synthetic oligonucleotide
atgcggtttagcaaattgttaacttagtgtgagat

SEQ ID NO: 15660 - DNA, 37 bp, Artificial Sequence
  Synthetic oligonucleotide
atgtagcactgccggtacttccgtcagttaatctgga

SEQ ID NO: 15661 - DNA, 35 bp, Artificial Sequence
  Synthetic oligonucleotide
atgtatcgcagtgtattaaggctttcggcggatcc

SEQ ID NO: 15662 - DNA, 37 bp, Artificial Sequence
  Synthetic oligonucleotide
atgtgcctaacgtacggttgcacttacctgacaaaga

SEQ ID NO: 15663 - DNA, 36 bp, Artificial Sequence
  Synthetic oligonucleotide
attattagggcatttttgctagagcctgggtcgcaa

SEQ ID NO: 15664 - DNA, 38 bp, Artificial Sequence
  Synthetic oligonucleotide
attcccgctcgcctcaatgtttagggggtacctcatga

SEQ ID NO: 15665 - DNA, 36 bp, Artificial Sequence
  Synthetic oligonucleotide
attgacgcaggtcgatttataacctggggaaagcta

SEQ ID NO: 15666 - DNA, 36 bp, Artificial Sequence
  Synthetic oligonucleotide
atttaacctgtggctcggggacatttaggtgggcta

SEQ ID NO: 15667 - DNA, 36 bp, Artificial Sequence
  Synthetic oligonucleotide
caatgccaaagtggcgggatagggtcatgtaggcga

SEQ ID NO: 15668 - DNA, 36 bp, Artificial Sequence
  Synthetic oligonucleotide
cacggaggatggacgccggtcgcgacactgaagcta

SEQ ID NO: 15669 - DNA, 37 bp, Artificial Sequence
  Synthetic oligonucleotide
catgatagttactcattgcgaatgagccgctgggtga

SEQ ID NO: 15670 - DNA, 37 bp, Artificial Sequence
  Synthetic oligonucleotide
catggacggggtgcggtgcatgtggagcttccttaga

SEQ ID NO: 15671 - DNA, 38 bp, Artificial Sequence
  Synthetic oligonucleotide
gaaagcgaataccgtgacgagtgaaatctggctggtga

SEQ ID NO: 15672 - DNA, 37 bp, Artificial Sequence
  Synthetic oligonucleotide
gagcgatgccatcggcccttgcataaagtactaggga

SEQ ID NO: 15673 - DNA, 37 bp, Artificial Sequence
  Synthetic oligonucleotide
gagcggttcatgtgactagttatgaacattatgcaga

SEQ ID NO: 15674 - DNA, 37 bp, Artificial Sequence
  Synthetic oligonucleotide
gagtcatctggggtactaccctaaggactcacgggga

SEQ ID NO: 15675 - DNA, 36 bp, Artificial Sequence
  Synthetic oligonucleotide
gagtcgggtctccagtcgcgattgtcgacctatgta

SEQ ID NO: 15676 - DNA, 38 bp, Artificial Sequence
  Synthetic oligonucleotide
gagtgtctaataccacctatatatcagtatattgctga

SEQ ID NO: 15677 - DNA, 36 bp, Artificial Sequence
  Synthetic oligonucleotide
gataagaagagcgctaggcttgccctctgtggttta

SEQ ID NO: 15678 - DNA, 38 bp, Artificial Sequence
  Synthetic oligonucleotide
gcaacgccacggcactgggctggcgtatgattcttgga

SEQ ID NO: 15679 - DNA, 35 bp, Artificial Sequence
  Synthetic oligonucleotide
gcaaggagtaggtctgatggcctagcgctcgagaa

SEQ ID NO: 15680 - DNA, 35 bp, Artificial Sequence
  Synthetic oligonucleotide
gcaaggcctaccaaccagtctggctgtctcacacc

SEQ ID NO: 15681 - DNA, 38 bp, Artificial Sequence
  Synthetic oligonucleotide
gcaatcgcgagacatgtagggttggtgggactttttga

SEQ ID NO: 15682 - DNA, 36 bp, Artificial Sequence
  Synthetic oligonucleotide
gcaatgtcgtagatgactgtacctggtaatgaacga

SEQ ID NO: 15683 - DNA, 36 bp, Artificial Sequence
  Synthetic oligonucleotide
gcataatggtggcatgcacaactgagtttctctgga

SEQ ID NO: 15684 - DNA, 36 bp, Artificial Sequence
  Synthetic oligonucleotide
gccatacgtgctgattgcatatgtctgtcgtacata

SEQ ID NO: 15685 - DNA, 37 bp, Artificial Sequence
  Synthetic oligonucleotide
gcgcacgcgggtactgcagagagtctggacgatttga

SEQ ID NO: 15686 - DNA, 31 bp, Artificial Sequence
  Synthetic oligonucleotide
gctaccagtgtgcctcatacctcaaggggca

SEQ ID NO: 15687 - DNA, 35 bp, Artificial Sequence
  Synthetic oligonucleotide
ggaaatacaacattgaggatgttgacccagtgttc

SEQ ID NO: 15688 - DNA, 35 bp, Artificial Sequence
  Synthetic oligonucleotide
ggaacagcacatacggctggtgcagttaactttga

SEQ ID NO: 15689 - DNA, 36 bp, Artificial Sequence
  Synthetic oligonucleotide
ggacgcacttagttaaggtaacaatgttggctcaca

SEQ ID NO: 15690 - DNA, 37 bp, Artificial Sequence
  Synthetic oligonucleotide
ggatacatactatcgtactgtgtgtgggtggggacga

SEQ ID NO: 15691 - DNA, 37 bp, Artificial Sequence
  Synthetic oligonucleotide
ggtcataccgaaccccatccccgttctctacgttgga

SEQ ID NO: 15692 - DNA, 37 bp, Artificial Sequence
  Synthetic oligonucleotide
ggtcgagctgactcccaggggccgaggtcgtcaagga

SEQ ID NO: 15693 - DNA, 35 bp, Artificial Sequence
  Synthetic oligonucleotide
ggtgcattagggcgcactttcgctcatgcgggtcc

SEQ ID NO: 15694 - DNA, 36 bp, Artificial Sequence
  Synthetic oligonucleotide
ggtgcgccgtggatgaatggcgttgcgccaccacta

SEQ ID NO: 15695 - DNA, 37 bp, Artificial Sequence
  Synthetic oligonucleotide
gtacgactctacagtgctgtccgcaagcgtaatgcga

SEQ ID NO: 15696 - DNA, 37 bp, Artificial Sequence
  Synthetic oligonucleotide
gtagtccatgttaagcggtaaacgttagggacttgga

SEQ ID NO: 15697 - DNA, 35 bp, Artificial Sequence
  Synthetic oligonucleotide
gtcaagcaacgctttccgtcatcgatacgtacgga

SEQ ID NO: 15698 - DNA, 35 bp, Artificial Sequence
  Synthetic oligonucleotide
gtcaatataggacagtgttaagtggaaggtctata

SEQ ID NO: 15699 - DNA, 35 bp, Artificial Sequence
  Synthetic oligonucleotide
gtccactagagttaggcctctggagaattgcgtac

SEQ ID NO: 15700 - DNA, 36 bp, Artificial Sequence
  Synthetic oligonucleotide
gtcgtgtgacagattggaagactagaggttgtagta

SEQ ID NO: 15701 - DNA, 37 bp, Artificial Sequence
  Synthetic oligonucleotide
gtctgaaaacgtggcgctttaaaatcggtctagtcga

SEQ ID NO: 15702 - DNA, 35 bp, Artificial Sequence
  Synthetic oligonucleotide
gtctgtcaaaaatgtgcggtcgtttagcaacatgg

SEQ ID NO: 15703 - DNA, 38 bp, Artificial Sequence
  Synthetic oligonucleotide
gtgacgtggaagagttgagatctagcacagtgacgtga

SEQ ID NO: 15704 - DNA, 37 bp, Artificial Sequence
  Synthetic oligonucleotide
gttagtacacgtgataccctaaggtaggccaagggga

SEQ ID NO: 15705 - DNA, 37 bp, Artificial Sequence
  Synthetic oligonucleotide
gttggctcgggtgtaccctacactcactgaagagaga

SEQ ID NO: 15706 - DNA, 37 bp, Artificial Sequence
  Synthetic oligonucleotide
tacctggcttgcagacctgtaggagtgctaatcggga

SEQ ID NO: 15707 - DNA, 35 bp, Artificial Sequence
  Synthetic oligonucleotide
tagccacaaatatctgaggtacaactgcaatctgg

SEQ ID NO: 15708 - DNA, 36 bp, Artificial Sequence
  Synthetic oligonucleotide
taggcctcatttacctggggctgggaagttcgggga

SEQ ID NO: 15709 - DNA, 37 bp, Artificial Sequence
  Synthetic oligonucleotide
taggtcccgggattggacttctggttcgcgaacctga

SEQ ID NO: 15710 - DNA, 37 bp, Artificial Sequence
  Synthetic oligonucleotide
tatgtgaatgcgctgaagttcatgtatgctgatgtga

SEQ ID NO: 15711 - DNA, 37 bp, Artificial Sequence
  Synthetic oligonucleotide
tcatcatgcgtgctgtagtttaatggctatggggcga

SEQ ID NO: 15712 - DNA, 35 bp, Artificial Sequence
  Synthetic oligonucleotide
tccacgctgtacaatcgaaaaattcgagagtttat

SEQ ID NO: 15713 - DNA, 38 bp, Artificial Sequence
  Synthetic oligonucleotide
tccatgtttggtgaagtaattgtacgtggacttactga

SEQ ID NO: 15714 - DNA, 35 bp, Artificial Sequence
  Synthetic oligonucleotide
tccggatccaggttccaggactggaattaataagg

SEQ ID NO: 15715 - DNA, 36 bp, Artificial Sequence
  Synthetic oligonucleotide
tctagctgctgttacaagcgctctagtcgagttcta

SEQ ID NO: 15716 - DNA, 37 bp, Artificial Sequence
  Synthetic oligonucleotide
tcttaggctatcactccgcccctggtaggacgcggga

SEQ ID NO: 15717 - DNA, 35 bp, Artificial Sequence
  Synthetic oligonucleotide
tgacgtgcctcccagctcatcaggctttgataaaa

SEQ ID NO: 15718 - DNA, 36 bp, Artificial Sequence
  Synthetic oligonucleotide
tgccagtagagcctagaggattcctacgggcaaata

SEQ ID NO: 15719 - DNA, 35 bp, Artificial Sequence
  Synthetic oligonucleotide
tgcccccagtagtccggacatcgtttgtagcttct

SEQ ID NO: 15720 - DNA, 38 bp, Artificial Sequence
  Synthetic oligonucleotide
tgctaaacgctcccggtaaatgacacgttaaccaatga

SEQ ID NO: 15721 - DNA, 38 bp, Artificial Sequence
  Synthetic oligonucleotide
tggtgccacgcgcgtacagctcgaaattcgtgtcatga

SEQ ID NO: 15722 - DNA, 38 bp, Artificial Sequence
  Synthetic oligonucleotide
tgtgcattttttgtcgagaatctaatggcacatactga

SEQ ID NO: 15723 - DNA, 38 bp, Artificial Sequence
  Synthetic oligonucleotide
tgttgcagaatggtgtgctctgtgaccgtgcgccctga

SEQ ID NO: 15724 - DNA, 35 bp, Artificial Sequence
  Synthetic oligonucleotide
ttaggaagatcggttgttgatatacagcaccgtct

SEQ ID NO: 15725 - DNA, 35 bp, Artificial Sequence
  Synthetic oligonucleotide
ttcaatgggcgattgttggcgggattgatgaacgc

SEQ ID NO: 15726 - DNA, 34 bp, Artificial Sequence
  Synthetic oligonucleotide
ttgaagcgctaaggccacggtcaatagtaggacg

SEQ ID NO: 15727 - DNA, 36 bp, Artificial Sequence
  Synthetic oligonucleotide
ttggaatgtgccccaggactatgtggtaccaggcga

SEQ ID NO: 15728 - DNA, 36 bp, Artificial Sequence
  Synthetic oligonucleotide
ttggtaaaattcctgcgttgacatggatggtggtaa

SEQ ID NO: 15729 - DNA, 37 bp, Artificial Sequence
  Synthetic oligonucleotide
gtcgcccggctcacgtaatattggccgtgtaaacgga

SEQ ID NO: 15730 - DNA, 38 bp, Artificial Sequence
  Synthetic oligonucleotide
ttagtcagggtactaaaggaaataccagtctcaagtga

SEQ ID NO: 15731 - DNA, 37 bp, Artificial Sequence
  Synthetic oligonucleotide
gtagggtgtggaccgacaatcgggtaaagtcaaacga

SEQ ID NO: 15732 - DNA, 37 bp, Artificial Sequence
  Synthetic oligonucleotide
acaccctgatgaatatcgtactgagggcgtttttgga

SEQ ID NO: 15733 - DNA, 37 bp, Artificial Sequence
  Synthetic oligonucleotide
agcaccggcgcttacttaatcatccagaccgggacga

SEQ ID NO: 15734 - DNA, 38 bp, Artificial Sequence
  Synthetic oligonucleotide
atgaaagagatcatggcatgcatgtagatttatgttga

SEQ ID NO: 15735 - DNA, 35 bp, Artificial Sequence
  Synthetic oligonucleotide
atgggcacaggtggctttcccggtggtgcgaacgc

SEQ ID NO: 15736 - DNA, 37 bp, Artificial Sequence
  Synthetic oligonucleotide
attgccttaagtcacccgaaatatgtagccggaacga

SEQ ID NO: 15737 - DNA, 38 bp, Artificial Sequence
  Synthetic oligonucleotide
taaccattagcggcatatagtagacaactgtggactga

SEQ ID NO: 15738 - DNA, 35 bp, Artificial Sequence
  Synthetic oligonucleotide
tacgataggcacaggactgggaaccatgagcttgg

SEQ ID NO: 15739 - DNA, 36 bp, Artificial Sequence
  Synthetic oligonucleotide
ttgcattttgagcgagctatgtattagggcgcggaa

SEQ ID NO: 15740 - DNA, 35 bp, Artificial Sequence
  Synthetic oligonucleotide
tgggtactggcttcagtctaggaaatacattccgg

SEQ ID NO: 15741 - DNA, 37 bp, Artificial Sequence
  Synthetic oligonucleotide
tcatgcgggtgatcacgttatttaggaccaggcctga

SEQ ID NO: 15742 - DNA, 36 bp, Artificial Sequence
  Synthetic oligonucleotide
aatctgcgacaggctggaaatttgggcgaacgtcga

SEQ ID NO: 15743 - DNA, 35 bp, Artificial Sequence
  Synthetic oligonucleotide
acatcaaactttgtgatggttagtcgtattctatg

SEQ ID NO: 15744 - DNA, 36 bp, Artificial Sequence
  Synthetic oligonucleotide
accagggagaaaggcatcttcggtacggtttaccta

SEQ ID NO: 15745 - DNA, 35 bp, Artificial Sequence
  Synthetic oligonucleotide
acgaatgagtgcgctttcatgtggtaattgcatgc

SEQ ID NO: 15746 - DNA, 38 bp, Artificial Sequence
  Synthetic oligonucleotide
agcacggtatagcaatcgcttatcaccatttagggtga

SEQ ID NO: 15747 - DNA, 35 bp, Artificial Sequence
  Synthetic oligonucleotide
aggcgccgcgttcctcgtatgtccgagccgccccc

SEQ ID NO: 15748 - DNA, 36 bp, Artificial Sequence
  Synthetic oligonucleotide
agtctatggctaagcgctctccctccccgatcaata

SEQ ID NO: 15749 - DNA, 35 bp, Artificial Sequence
  Synthetic oligonucleotide
atgaaatagcgttccaagcagccatgtgaggggta

SEQ ID NO: 15750 - DNA, 36 bp, Artificial Sequence
  Synthetic oligonucleotide
catatcaccgcccgtgggtgatgtacaagggtatca

SEQ ID NO: 15751 - DNA, 35 bp, Artificial Sequence
  Synthetic oligonucleotide
cccgaagctcagggtgttggccgcccattgccccc

SEQ ID NO: 15752 - DNA, 35 bp, Artificial Sequence
  Synthetic oligonucleotide
ctgagctcaacgttctggacgagctggtggcatgc

SEQ ID NO: 15753 - DNA, 33 bp, Artificial Sequence
  Synthetic oligonucleotide
gaagtacccagctaaagataagcctagcggtga

SEQ ID NO: 15754 - DNA, 38 bp, Artificial Sequence
  Synthetic oligonucleotide
gacaggtagatacctggtccgtaaactatcatctttga

SEQ ID NO: 15755 - DNA, 38 bp, Artificial Sequence
  Synthetic oligonucleotide
gaccgagtaaaaacagcgtaccagctgatacagggtga

SEQ ID NO: 15756 - DNA, 36 bp, Artificial Sequence
  Synthetic oligonucleotide
gagcgctttcttattcgttatggatgtacggtagga

SEQ ID NO: 15757 - DNA, 35 bp, Artificial Sequence
  Synthetic oligonucleotide
gatattaagtggtggaccggttgatagcaggccac

SEQ ID NO: 15758 - DNA, 38 bp, Artificial Sequence
  Synthetic oligonucleotide
gccgggtgtcaccaggacgaactaaattaagcagctga

SEQ ID NO: 15759 - DNA, 36 bp, Artificial Sequence
  Synthetic oligonucleotide
gcgggtactaaagtgggcgacgggttcgacgccgta

SEQ ID NO: 15760 - DNA, 37 bp, Artificial Sequence
  Synthetic oligonucleotide
ggacccgcagaaacataaaaccccgcggggtgggcga

SEQ ID NO: 15761 - DNA, 36 bp, Artificial Sequence
  Synthetic oligonucleotide
ggtcgcgggatgtagagatcctaccgccatcccata

SEQ ID NO: 15762 - DNA, 36 bp, Artificial Sequence
  Synthetic oligonucleotide
gtacgtgatgtcaagagggggctgttgttcgggtta

SEQ ID NO: 15763 - DNA, 36 bp, Artificial Sequence
  Synthetic oligonucleotide
gtcaaacaactgccgtcagtgaacttttccgatgga

SEQ ID NO: 15764 - DNA, 38 bp, Artificial Sequence
  Synthetic oligonucleotide
gtcgcgcgagatttagggcgcactttctagctgcatga

SEQ ID NO: 15765 - DNA, 35 bp, Artificial Sequence
  Synthetic oligonucleotide
gtgacgtaactgcaagattaccgggtgggaccgta

SEQ ID NO: 15766 - DNA, 37 bp, Artificial Sequence
  Synthetic oligonucleotide
gtgcagggcgaaattgcataagctcccccttttccga

SEQ ID NO: 15767 - DNA, 38 bp, Artificial Sequence
  Synthetic oligonucleotide
gtgcttgttacggtgacgggtactgtacatcacgttga

SEQ ID NO: 15768 - DNA, 37 bp, Artificial Sequence
  Synthetic oligonucleotide
taatcgaacgtgtgcgtcgtgggggaggggttctaga

SEQ ID NO: 15769 - DNA, 35 bp, Artificial Sequence
  Synthetic oligonucleotide
tagccctgccacctgctcagcaggtccggaacgtt

SEQ ID NO: 15770 - DNA, 37 bp, Artificial Sequence
  Synthetic oligonucleotide
tataccgcattgggattaaagcatccggggttggaga

SEQ ID NO: 15771 - DNA, 35 bp, Artificial Sequence
  Synthetic oligonucleotide
tgaggccttgtggggaattgtgtagtacttcaatc

SEQ ID NO: 15772 - DNA, 35 bp, Artificial Sequence
  Synthetic oligonucleotide
tgagttacgcgttcgtcaaatggcaatagctaagc

SEQ ID NO: 15773 - DNA, 35 bp, Artificial Sequence
  Synthetic oligonucleotide
tggaacgcagtgaaggagggttctaacgtgacaac

SEQ ID NO: 15774 - DNA, 37 bp, Artificial Sequence
  Synthetic oligonucleotide
tggagccgaagtagtttgtgctgctgatgcgcgagga

SEQ ID NO: 15775 - DNA, 38 bp, Artificial Sequence
  Synthetic oligonucleotide
tgtctgggcctgcacatgatatgctgaaacgagcctga

SEQ ID NO: 15776 - DNA, 35 bp, Artificial Sequence
  Synthetic oligonucleotide
ttcgtccaggcaggactatgacctctattaacaaa

SEQ ID NO: 15777 - DNA, 36 bp, Artificial Sequence
  Synthetic oligonucleotide
ttgacacggcgtgctaggcgctgacaggagtatcaa

SEQ ID NO: 15778 - DNA, 38 bp, Artificial Sequence
  Synthetic oligonucleotide
tttggggcaacaactgttttaggagtagggggggctga

SEQ ID NO: 15779 - DNA, 36 bp, Artificial Sequence
  Synthetic oligonucleotide
gtacaacagtctaagctgttccccccgcgtgtggca

SEQ ID NO: 15780 - DNA, 36 bp, Artificial Sequence
  Synthetic oligonucleotide
agtagacgcaatcgatgtaatcctcttgcgggcgta

SEQ ID NO: 15781 - DNA, 35 bp, Artificial Sequence
  Synthetic oligonucleotide
tcaacaacacacaaggtgatccaagaggaggtact

SEQ ID NO: 15782 - DNA, 35 bp, Artificial Sequence
  Synthetic oligonucleotide
atgtctaattgattgatcgcgagggtgtatagtag

SEQ ID NO: 15783 - DNA, 38 bp, Artificial Sequence
  Synthetic oligonucleotide
gacttagcgttgcccccctgtcgaataagcggttttga

SEQ ID NO: 15784 - DNA, 37 bp, Artificial Sequence
  Synthetic oligonucleotide
gccttcatggaaagagtcggacgagacacgagtgcga

SEQ ID NO: 15785 - DNA, 36 bp, Artificial Sequence
  Synthetic oligonucleotide
ggaatagcttgtccttaactgatctgacggacctaa

SEQ ID NO: 15786 - DNA, 36 bp, Artificial Sequence
  Synthetic oligonucleotide
tcatcgcgaggtttgggaattaaacatcctaacgta

SEQ ID NO: 15787 - DNA, 38 bp, Artificial Sequence
  Synthetic oligonucleotide
tccggtttccgcaaatgtcagcagtagtcttgctatga

SEQ ID NO: 15788 - DNA, 37 bp, Artificial Sequence
  Synthetic oligonucleotide
actagaaagaagatttgtgtcgtcctgaagcctggga

SEQ ID NO: 15789 - DNA, 37 bp, Artificial Sequence
  Synthetic oligonucleotide
agccggaacggctggtcattcgaggatagtgtcctga

SEQ ID NO: 15790 - DNA, 38 bp, Artificial Sequence
  Synthetic oligonucleotide
agctcataaagattatgacgaatagagttacggagtga

SEQ ID NO: 15791 - DNA, 36 bp, Artificial Sequence
  Synthetic oligonucleotide
ccgtttaccagatacgtacgttgggaagtgcgatga

SEQ ID NO: 15792 - DNA, 35 bp, Artificial Sequence
  Synthetic oligonucleotide
gaagttcagtcattttcgttgggagctttgaatac

SEQ ID NO: 15793 - DNA, 36 bp, Artificial Sequence
  Synthetic oligonucleotide
gcatcatggtaatgaaggtgtgttgtaattgttgta

SEQ ID NO: 15794 - DNA, 38 bp, Artificial Sequence
  Synthetic oligonucleotide
ggacaaagtcaaacgtcagtatctatgtgagtaaatga

SEQ ID NO: 15795 - DNA, 36 bp, Artificial Sequence
  Synthetic oligonucleotide
ggttatccggatgtgctaacgctttgaccagcaaga

SEQ ID NO: 15796 - DNA, 36 bp, Artificial Sequence
  Synthetic oligonucleotide
gtaacatggtagaaggtaggagagacgtaatcgaaa

SEQ ID NO: 15797 - DNA, 36 bp, Artificial Sequence
  Synthetic oligonucleotide
gtggagaccccggcgaaatccgggtgctcatcgtta

SEQ ID NO: 15798 - DNA, 35 bp, Artificial Sequence
  Synthetic oligonucleotide
tactgcggagcacaaggcacccagtgaatgacagc

SEQ ID NO: 15799 - DNA, 34 bp, Artificial Sequence
  Synthetic oligonucleotide
tcagagaaacgtaatgccatgtctacaggtttcc

SEQ ID NO: 15800 - DNA, 35 bp, Artificial Sequence
  Synthetic oligonucleotide
tgcctcgctccacataagttacgaaggctgtttga

SEQ ID NO: 15801 - DNA, 36 bp, Artificial Sequence
  Synthetic oligonucleotide
aaccaggggggcgtgctctccaaaatgcggtcatga

SEQ ID NO: 15802 - DNA, 35 bp, Artificial Sequence
  Synthetic oligonucleotide
ttctccccccgcgtcttgagtttagtcgtctgcac

SEQ ID NO: 15803 - DNA, 36 bp, Artificial Sequence
  Synthetic oligonucleotide
aacagtgaggagtagtatctgctggtaacatttaga

SEQ ID NO: 15804 - DNA, 38 bp, Artificial Sequence
  Synthetic oligonucleotide
aaccacgagctccatattgctccggcgtcctgatatga

SEQ ID NO: 15805 - DNA, 35 bp, Artificial Sequence
  Synthetic oligonucleotide
aacttgagtagccatacaccaatactattccagta

SEQ ID NO: 15806 - DNA, 37 bp, Artificial Sequence
  Synthetic oligonucleotide
aagtggctcctcccaaaatagctcttagactgctgga

SEQ ID NO: 15807 - DNA, 37 bp, Artificial Sequence
  Synthetic oligonucleotide
aagttatcgatgctgggtatcggggggatccggacga

SEQ ID NO: 15808 - DNA, 36 bp, Artificial Sequence
  Synthetic oligonucleotide
aattcgtttcacgcgcatagctttttcgcacttgga

SEQ ID NO: 15809 - DNA, 37 bp, Artificial Sequence
  Synthetic oligonucleotide
aattctgcgtggtgtaagcagtcctaagatcgcccga

SEQ ID NO: 15810 - DNA, 36 bp, Artificial Sequence
  Synthetic oligonucleotide
acgaccggtcgcctggcatgcgggctgtctaccgca

SEQ ID NO: 15811 - DNA, 35 bp, Artificial Sequence
  Synthetic oligonucleotide
acgcgttaatgcagtccatgattacactttttatt

SEQ ID NO: 15812 - DNA, 35 bp, Artificial Sequence
  Synthetic oligonucleotide
acgttgcttgaggaaacggaagcctactgccaggg

SEQ ID NO: 15813 - DNA, 36 bp, Artificial Sequence
  Synthetic oligonucleotide
actcaagcttacgctttagagtgtcagtttcgtaga

SEQ ID NO: 15814 - DNA, 37 bp, Artificial Sequence
  Synthetic oligonucleotide
actcagtatgaggtcagaattaccatgccccaggtga

SEQ ID NO: 15815 - DNA, 36 bp, Artificial Sequence
  Synthetic oligonucleotide
actgcaccgggaaattactctcaggaaggtgcggga

SEQ ID NO: 15816 - DNA, 38 bp, Artificial Sequence
  Synthetic oligonucleotide
actgtttgactgcagagaaaccggttctggaaccttga

SEQ ID NO: 15817 - DNA, 37 bp, Artificial Sequence
  Synthetic oligonucleotide
acttctatgggagatttgtggttaaatcggaatgaga

SEQ ID NO: 15818 - DNA, 35 bp, Artificial Sequence
  Synthetic oligonucleotide
actttcatcgagtggcttaatttggatgtctgttg

SEQ ID NO: 15819 - DNA, 37 bp, Artificial Sequence
  Synthetic oligonucleotide
acttttactagagtctctacgtgaaagtctcgtttga

SEQ ID NO: 15820 - DNA, 35 bp, Artificial Sequence
  Synthetic oligonucleotide
agagtaccacgcgcgggtaaacgtgcgaaatcgca

SEQ ID NO: 15821 - DNA, 37 bp, Artificial Sequence
  Synthetic oligonucleotide
agatggtggctgtaatagcatcgatatcttacggaga

SEQ ID NO: 15822 - DNA, 35 bp, Artificial Sequence
  Synthetic oligonucleotide
agccccgagctatgactgtctcggattgaaagcca

SEQ ID NO: 15823 - DNA, 36 bp, Artificial Sequence
  Synthetic oligonucleotide
agctggaggctcgatccgattttctgacctatgcga

SEQ ID NO: 15824 - DNA, 35 bp, Artificial Sequence
  Synthetic oligonucleotide
agcttaattgtgtttggcccccgcgctcggctatc

SEQ ID NO: 15825 - DNA, 38 bp, Artificial Sequence
  Synthetic oligonucleotide
aggtgggtgtggtactgcagtaagcgtggtggtaatga

SEQ ID NO: 15826 - DNA, 35 bp, Artificial Sequence
  Synthetic oligonucleotide
agtcggggctcgactacgtggtcatacagttacgg

SEQ ID NO: 15827 - DNA, 38 bp, Artificial Sequence
  Synthetic oligonucleotide
agtcgtggtccacgaggccaaactacgaatggtgctga

SEQ ID NO: 15828 - DNA, 36 bp, Artificial Sequence
  Synthetic oligonucleotide
agtgctttgggtttttggtcgaataagaagaaaagt

SEQ ID NO: 15829 - DNA, 35 bp, Artificial Sequence
  Synthetic oligonucleotide
agtgtgaaaaaaaacgctggcatttggtgcatgtt

SEQ ID NO: 15830 - DNA, 36 bp, Artificial Sequence
  Synthetic oligonucleotide
atagctgtacgaggcgacatgaggacacgttacgta

SEQ ID NO: 15831 - DNA, 35 bp, Artificial Sequence
  Synthetic oligonucleotide
ataggactgtttctagtactggtttgcgcatcctc

SEQ ID NO: 15832 - DNA, 37 bp, Artificial Sequence
  Synthetic oligonucleotide
atccggctaaggatttagcttaccccctacaggtgga

SEQ ID NO: 15833 - DNA, 36 bp, Artificial Sequence
  Synthetic oligonucleotide
atgatggcatgcaatgggtgcactggacgtgctaga

SEQ ID NO: 15834 - DNA, 35 bp, Artificial Sequence
  Synthetic oligonucleotide
attagagttttgggcatgattggtttgtccatgca

SEQ ID NO: 15835 - DNA, 36 bp, Artificial Sequence
  Synthetic oligonucleotide
caccctgctcattggagacacagggtgcgattgcta

SEQ ID NO: 15836 - DNA, 38 bp, Artificial Sequence
  Synthetic oligonucleotide
cccaacgtggggcgtacccggttgacagccattggtga

SEQ ID NO: 15837 - DNA, 38 bp, Artificial Sequence
  Synthetic oligonucleotide
ccgggtcttctttaaccggacgacgcttatggctcgga

SEQ ID NO: 15838 - DNA, 38 bp, Artificial Sequence
  Synthetic oligonucleotide
ctcaggtcgcttcacggtggacggagttagggagctga

SEQ ID NO: 15839 - DNA, 35 bp, Artificial Sequence
  Synthetic oligonucleotide
cttctgaggcatgctatgtgccgctcaaagagagc

SEQ ID NO: 15840 - DNA, 36 bp, Artificial Sequence
  Synthetic oligonucleotide
gaatagggttcagtggcctcacaaggctagtgagaa

SEQ ID NO: 15841 - DNA, 38 bp, Artificial Sequence
  Synthetic oligonucleotide
gactaactgcgtacatacattcactggtaccgatgtga

SEQ ID NO: 15842 - DNA, 38 bp, Artificial Sequence
  Synthetic oligonucleotide
gactacaggcacccgtttgcgtttagtgatgtggctga

SEQ ID NO: 15843 - DNA, 35 bp, Artificial Sequence
  Synthetic oligonucleotide
gagcatggtcagtacatggccaaggccttactcgg

SEQ ID NO: 15844 - DNA, 36 bp, Artificial Sequence
  Synthetic oligonucleotide
gagcgtagccgaaggcacgcgcgcgattgaaatgtt

SEQ ID NO: 15845 - DNA, 36 bp, Artificial Sequence
  Synthetic oligonucleotide
gagggtaactgggcaacctcggttttctaaactgga

SEQ ID NO: 15846 - DNA, 38 bp, Artificial Sequence
  Synthetic oligonucleotide
gatatcaggttcagcagaaagtcacaatgagatcatga

SEQ ID NO: 15847 - DNA, 36 bp, Artificial Sequence
  Synthetic oligonucleotide
gatgatccgatccgcgcctccgttgtagtccaggta

SEQ ID NO: 15848 - DNA, 37 bp, Artificial Sequence
  Synthetic oligonucleotide
gattagggtcacatcctggttatgtcgaccgtatcga

SEQ ID NO: 15849 - DNA, 35 bp, Artificial Sequence
  Synthetic oligonucleotide
gattcgactttcaacatagacggcataaagctccg

SEQ ID NO: 15850 - DNA, 37 bp, Artificial Sequence
  Synthetic oligonucleotide
gcacacagctaaggctacattgaaccgaagcatggga

SEQ ID NO: 15851 - DNA, 38 bp, Artificial Sequence
  Synthetic oligonucleotide
gccggttgcgagccatatttcgtggggcacaggactga

SEQ ID NO: 15852 - DNA, 37 bp, Artificial Sequence
  Synthetic oligonucleotide
gcgctgtcatgggtacgtaagcacatagctgccggga

SEQ ID NO: 15853 - DNA, 37 bp, Artificial Sequence
  Synthetic oligonucleotide
gcgtctggcaagtcatggaactagtccggttcaagga

SEQ ID NO: 15854 - DNA, 37 bp, Artificial Sequence
  Synthetic oligonucleotide
gctacagcaatgtgtaacacggtatacgtaggcttga

SEQ ID NO: 15855 - DNA, 35 bp, Artificial Sequence
  Synthetic oligonucleotide
ggaaaagcgaagcgcaaggacctgctacaaccagg

SEQ ID NO: 15856 - DNA, 36 bp, Artificial Sequence
  Synthetic oligonucleotide
ggacccacgagagatgttccactgccttggtctcta

SEQ ID NO: 15857 - DNA, 36 bp, Artificial Sequence
  Synthetic oligonucleotide
ggactgggtgatcaatgtagtctaaaattgaaatta

SEQ ID NO: 15858 - DNA, 36 bp, Artificial Sequence
  Synthetic oligonucleotide
ggtaaggttcggagggggggtcttttggaaagcaaa

SEQ ID NO: 15859 - DNA, 38 bp, Artificial Sequence
  Synthetic oligonucleotide
ggtatcacttccttcctgtagttagggcttacaggtga

SEQ ID NO: 15860 - DNA, 35 bp, Artificial Sequence
  Synthetic oligonucleotide
gtacgtatatgtgtgtatgaatagtgataaggttc

SEQ ID NO: 15861 - DNA, 38 bp, Artificial Sequence
  Synthetic oligonucleotide
gtagcgtgccgccgtcctgtcattagtttgttagttga

SEQ ID NO: 15862 - DNA, 35 bp, Artificial Sequence
  Synthetic oligonucleotide
gtatgatggcaatattcaggacggaccgttaccgg

SEQ ID NO: 15863 - DNA, 38 bp, Artificial Sequence
  Synthetic oligonucleotide
gtcagggaagggaaattagcaactgaccacactgatga

SEQ ID NO: 15864 - DNA, 36 bp, Artificial Sequence
  Synthetic oligonucleotide
gtcattatgggatgtagttcggtcgtttcgcagaca

SEQ ID NO: 15865 - DNA, 35 bp, Artificial Sequence
  Synthetic oligonucleotide
gttaggagagagtatatcctgcggtttgggctact

SEQ ID NO: 15866 - DNA, 38 bp, Artificial Sequence
  Synthetic oligonucleotide
gttgaaattcacgtcaaggtctacgaataagcacttga

SEQ ID NO: 15867 - DNA, 36 bp, Artificial Sequence
  Synthetic oligonucleotide
gttgaatgatccggatatatctagacagtatcccga

SEQ ID NO: 15868 - DNA, 35 bp, Artificial Sequence
  Synthetic oligonucleotide
gttggagtgacgacgttcatcgagccttggtataa

SEQ ID NO: 15869 - DNA, 35 bp, Artificial Sequence
  Synthetic oligonucleotide
taacgttaaagcgtggtaaccaaaaagctcttacg

SEQ ID NO: 15870 - DNA, 38 bp, Artificial Sequence
  Synthetic oligonucleotide
taagtgcttgtctcatgtagtccgtgctgtattcgtga

SEQ ID NO: 15871 - DNA, 38 bp, Artificial Sequence
  Synthetic oligonucleotide
tacctagtaacaacttgccaagttcagtttttggctga

SEQ ID NO: 15872 - DNA, 35 bp, Artificial Sequence
  Synthetic oligonucleotide
tactatgtaagggtaagtcggattatactggaacg

SEQ ID NO: 15873 - DNA, 35 bp, Artificial Sequence
  Synthetic oligonucleotide
taggtacccgtggagctaaatgagcccgcgcccaa

SEQ ID NO: 15874 - DNA, 35 bp, Artificial Sequence
  Synthetic oligonucleotide
tatgctacataggagattccggtacattaggacac

SEQ ID NO: 15875 - DNA, 35 bp, Artificial Sequence
  Synthetic oligonucleotide
tatgctcggtagggtacgaagataacgttcgtggc

SEQ ID NO: 15876 - DNA, 37 bp, Artificial Sequence
  Synthetic oligonucleotide
tattaacgaaagataacacagcgacggacaggtacga

SEQ ID NO: 15877 - DNA, 36 bp, Artificial Sequence
  Synthetic oligonucleotide
tcattggtcgtactgagggttgtctcatgagcttca

SEQ ID NO: 15878 - DNA, 35 bp, Artificial Sequence
  Synthetic oligonucleotide
tcgaacgccgtatggagagtgtggtgtatcaagat

SEQ ID NO: 15879 - DNA, 36 bp, Artificial Sequence
  Synthetic oligonucleotide
tctgtaactgctatatcggagatgggtggggggaga

SEQ ID NO: 15880 - DNA, 36 bp, Artificial Sequence
  Synthetic oligonucleotide
tgaatggccttggtctgcctcatgttagaaggggaa

SEQ ID NO: 15881 - DNA, 36 bp, Artificial Sequence
  Synthetic oligonucleotide
tgatttttactggtgggtgtgggaagtactccggta

SEQ ID NO: 15882 - DNA, 37 bp, Artificial Sequence
  Synthetic oligonucleotide
tgcgcgatgtcatcggttaactaacgtactcatgcga

SEQ ID NO: 15883 - DNA, 35 bp, Artificial Sequence
  Synthetic oligonucleotide
ttaaggctacaactgcgatggagaccggctaccac

SEQ ID NO: 15884 - DNA, 35 bp, Artificial Sequence
  Synthetic oligonucleotide
ttaccctaataccatggttaagcaaactgcagata

SEQ ID NO: 15885 - DNA, 37 bp, Artificial Sequence
  Synthetic oligonucleotide
ttactgggcaatagctaggtcttgatggatcgagcga

SEQ ID NO: 15886 - DNA, 38 bp, Artificial Sequence
  Synthetic oligonucleotide
ttattgagtctgatacggtctaaatggaaagacgttga

SEQ ID NO: 15887 - DNA, 36 bp, Artificial Sequence
  Synthetic oligonucleotide
ttggcctattcgatggcgtgtgacgtaatgcgctta

SEQ ID NO: 15888 - DNA, 37 bp, Artificial Sequence
  Synthetic oligonucleotide
ttgtattggcacatgtgactgggttaagattcccgga

SEQ ID NO: 15889 - DNA, 37 bp, Artificial Sequence
  Synthetic oligonucleotide
gacattgttcatgggcataacgcggtgggcgcaccga

SEQ ID NO: 15890 - DNA, 37 bp, Artificial Sequence
  Synthetic oligonucleotide
atataaactgcaggaacctccatatatttagagaaga

SEQ ID NO: 15891 - DNA, 38 bp, Artificial Sequence
  Synthetic oligonucleotide
gcacccactggcgtctgcctttattttgagcgtgctga

SEQ ID NO: 15892 - DNA, 36 bp, Artificial Sequence
  Synthetic oligonucleotide
ggaaacttttacgtcgtttggtgaaatgcgtaccca

SEQ ID NO: 15893 - DNA, 36 bp, Artificial Sequence
  Synthetic oligonucleotide
gcgagcaccgaccctcaagcagacggatgcgcttca

SEQ ID NO: 15894 - DNA, 38 bp, Artificial Sequence
  Synthetic oligonucleotide
aacaagtgtcgcgcccggattgaaccgccagcagttga

SEQ ID NO: 15895 - DNA, 37 bp, Artificial Sequence
  Synthetic oligonucleotide
aagctcgcgccgccgtacttatgagcttgtaacgtga

SEQ ID NO: 15896 - DNA, 37 bp, Artificial Sequence
  Synthetic oligonucleotide
aagtacgacgcatatagccctgttacaacgggggcga

SEQ ID NO: 15897 - DNA, 36 bp, Artificial Sequence
  Synthetic oligonucleotide
agataaccccctcgagcgtaagttaaatggtgtgta

SEQ ID NO: 15898 - DNA, 36 bp, Artificial Sequence
  Synthetic oligonucleotide
agcacacaatcaacgatggtcaatcttcggcccgaa

SEQ ID NO: 15899 - DNA, 34 bp, Artificial Sequence
  Synthetic oligonucleotide
agtaaggtaacagtactaacagcgcgacgggagg

SEQ ID NO: 15900 - DNA, 38 bp, Artificial Sequence
  Synthetic oligonucleotide
atacccgacctgtcgctgtagtagcacgggtattgtga

SEQ ID NO: 15901 - DNA, 36 bp, Artificial Sequence
  Synthetic oligonucleotide
gaacactcatcatgagtggcctgttttttcacagaa

SEQ ID NO: 15902 - DNA, 36 bp, Artificial Sequence
  Synthetic oligonucleotide
gaccagcacgttggagatgagcgcatgcgctactca

SEQ ID NO: 15903 - DNA, 37 bp, Artificial Sequence
  Synthetic oligonucleotide
gcacgtgtcaatattcagaatcaacaggactactcga

SEQ ID NO: 15904 - DNA, 35 bp, Artificial Sequence
  Synthetic oligonucleotide
gcatgtgtggggttgttgaattctggggtacgctc

SEQ ID NO: 15905 - DNA, 35 bp, Artificial Sequence
  Synthetic oligonucleotide
gccggagatacccgttcgtggggtccgcgtagcat

SEQ ID NO: 15906 - DNA, 35 bp, Artificial Sequence
  Synthetic oligonucleotide
gctccgtagtgttaccgagttgcgatcacagcacg

SEQ ID NO: 15907 - DNA, 38 bp, Artificial Sequence
  Synthetic oligonucleotide
gtagtagcggtctggtcaagggttggaaggtcatatga

SEQ ID NO: 15908 - DNA, 36 bp, Artificial Sequence
  Synthetic oligonucleotide
gtccaccccggcgtagaaagccctcgtaatcgcgga

SEQ ID NO: 15909 - DNA, 38 bp, Artificial Sequence
  Synthetic oligonucleotide
gttccattgccaggaccttggaaacaccgacatcctga

SEQ ID NO: 15910 - DNA, 35 bp, Artificial Sequence
  Synthetic oligonucleotide
tagcctctcggatttcacgaaaaaacgtggcacga

SEQ ID NO: 15911 - DNA, 35 bp, Artificial Sequence
  Synthetic oligonucleotide
tatgaaacgcacccagaaagaggtagtttaagtct

SEQ ID NO: 15912 - DNA, 38 bp, Artificial Sequence
  Synthetic oligonucleotide
tatggtgagcccagcgaaatcaaagcctgtagttgtga

SEQ ID NO: 15913 - DNA, 35 bp, Artificial Sequence
  Synthetic oligonucleotide
tctcgataccgggatcaagtgcgagtgacgcattg

SEQ ID NO: 15914 - DNA, 37 bp, Artificial Sequence
  Synthetic oligonucleotide
tctgggtttcgagccactaggtatgcaatgcatgaga

SEQ ID NO: 15915 - DNA, 37 bp, Artificial Sequence
  Synthetic oligonucleotide
tgatcgaaggctcagggcgcctctcttaactagtgga

SEQ ID NO: 15916 - DNA, 35 bp, Artificial Sequence
  Synthetic oligonucleotide
tgtggttatcgaaacccaaatcaaatgtgctgctg

SEQ ID NO: 15917 - DNA, 37 bp, Artificial Sequence
  Synthetic oligonucleotide
ttagatcaaggtgggaattaaaaacttcgtagcgtga

SEQ ID NO: 15918 - DNA, 37 bp, Artificial Sequence
  Synthetic oligonucleotide
ttggcacaagtaatgttgtttggaaagcgtagtaaga

SEQ ID NO: 15919 - DNA, 38 bp, Artificial Sequence
  Synthetic oligonucleotide
gatagcctcacgccatggtatggggagaatgcacatga

SEQ ID NO: 15920 - DNA, 35 bp, Artificial Sequence
  Synthetic oligonucleotide
gccctggccggtcttgtcagactagggcgaggtga

SEQ ID NO: 15921 - DNA, 36 bp, Artificial Sequence
  Synthetic oligonucleotide
gggaaacggatacacatgcaagtacagcatgtcgga

SEQ ID NO: 15922 - DNA, 36 bp, Artificial Sequence
  Synthetic oligonucleotide
ggggtcatcacccactggcaatgcaagacactctga

SEQ ID NO: 15923 - DNA, 36 bp, Artificial Sequence
  Synthetic oligonucleotide
ttcactcagcccgtcatgggtcgaatcagtaagaaa

SEQ ID NO: 15924 - DNA, 38 bp, Artificial Sequence
  Synthetic oligonucleotide
ttctagagcgcgcaagaattgactgccagtgccattga

SEQ ID NO: 15925 - DNA, 36 bp, Artificial Sequence
  Synthetic oligonucleotide
aacccctgacctcatgacctgacttccatgtcgaga

SEQ ID NO: 15926 - DNA, 36 bp, Artificial Sequence
  Synthetic oligonucleotide
aagtgcttgctgggaagggtgaacactcttgggaca

SEQ ID NO: 15927 - DNA, 36 bp, Artificial Sequence
  Synthetic oligonucleotide
actgccatagccgccggtatgtcgtggtaggtttaa

SEQ ID NO: 15928 - DNA, 35 bp, Artificial Sequence
  Synthetic oligonucleotide
gaacatgtcacagggaagggattctccggctttca

SEQ ID NO: 15929 - DNA, 36 bp, Artificial Sequence
  Synthetic oligonucleotide
gagttgacaactgcagaccggtttgtaaaactgata

SEQ ID NO: 15930 - DNA, 38 bp, Artificial Sequence
  Synthetic oligonucleotide
gcgccacggtaaatgttgataagcacactagcttctga

SEQ ID NO: 15931 - DNA, 35 bp, Artificial Sequence
  Synthetic oligonucleotide
gctccagttcacggagtagggccagtttaacgcga

SEQ ID NO: 15932 - DNA, 36 bp, Artificial Sequence
  Synthetic oligonucleotide
tacccaaattagcagtcatgagatagagttccttta

SEQ ID NO: 15933 - DNA, 37 bp, Artificial Sequence
  Synthetic oligonucleotide
tccgtacttaggatctatgatcgaacatactgaggga

SEQ ID NO: 15934 - DNA, 36 bp, Artificial Sequence
  Synthetic oligonucleotide
tcggtgaacaaacgtgtgagtatgcttccattttaa

SEQ ID NO: 15935 - DNA, 37 bp, Artificial Sequence
  Synthetic oligonucleotide
tacacctgcgctgcagtgagtagggtcgttacacgga

SEQ ID NO: 15936 - DNA, 36 bp, Artificial Sequence
  Synthetic oligonucleotide
tcatacgcaccgccactttacggtacatgagccgta

SEQ ID NO: 15937 - DNA, 37 bp, Artificial Sequence
  Synthetic oligonucleotide
acactctgcaccatgaggggcgcttagcagtccgtga

SEQ ID NO: 15938 - DNA, 36 bp, Artificial Sequence
  Synthetic oligonucleotide
ggaacgtactctttacttaggtgacgttgcgcacaa

SEQ ID NO: 15939 - DNA, 37 bp, Artificial Sequence
  Synthetic oligonucleotide
aaaagtctgcatacaactttttattgagatcctccga

SEQ ID NO: 15940 - DNA, 37 bp, Artificial Sequence
  Synthetic oligonucleotide
aaacgcaacatggcatgcgtgttttgtaaccgaatga

SEQ ID NO: 15941 - DNA, 38 bp, Artificial Sequence
  Synthetic oligonucleotide
aacaggaacggtgtttgctagtgtatgtcacaaattga

SEQ ID NO: 15942 - DNA, 35 bp, Artificial Sequence
  Synthetic oligonucleotide
aacatcattgggactaaagccatatcagcctcttc

SEQ ID NO: 15943 - DNA, 38 bp, Artificial Sequence
  Synthetic oligonucleotide
aaggtactgtggatgtctaggctcgagataacacttga

SEQ ID NO: 15944 - DNA, 37 bp, Artificial Sequence
  Synthetic oligonucleotide
acaacggggggtgataactcatgggtggtaacttcga

SEQ ID NO: 15945 - DNA, 36 bp, Artificial Sequence
  Synthetic oligonucleotide
acagtatgcgtaacgatgagttcaatgctagcttta

SEQ ID NO: 15946 - DNA, 35 bp, Artificial Sequence
  Synthetic oligonucleotide
accaagttggtgcgacagcaagtactacgagcgag

SEQ ID NO: 15947 - DNA, 37 bp, Artificial Sequence
  Synthetic oligonucleotide
accagcagaattgggcacgagtatggttatttcctga

SEQ ID NO: 15948 - DNA, 36 bp, Artificial Sequence
  Synthetic oligonucleotide
accatacgtgacttgtcgtgttgtattgctggttaa

SEQ ID NO: 15949 - DNA, 35 bp, Artificial Sequence
  Synthetic oligonucleotide
accatgaattatgtgcaaggacgcgaagcggagtt

SEQ ID NO: 15950 - DNA, 35 bp, Artificial Sequence
  Synthetic oligonucleotide
acctaggcttgcttatcccagcgggacggacgaaa

SEQ ID NO: 15951 - DNA, 37 bp, Artificial Sequence
  Synthetic oligonucleotide
acctgcacacaaccagtacccgacccgagccaatcga

SEQ ID NO: 15952 - DNA, 36 bp, Artificial Sequence
  Synthetic oligonucleotide
acgaaatacacttcgccttagtcgataacgacgcta

SEQ ID NO: 15953 - DNA, 37 bp, Artificial Sequence
  Synthetic oligonucleotide
acgaacttaccaggaagtgggcggttctctgtatgga

SEQ ID NO: 15954 - DNA, 36 bp, Artificial Sequence
  Synthetic oligonucleotide
acgagtcattggggaagggtgatggtttgaaaggga

SEQ ID NO: 15955 - DNA, 37 bp, Artificial Sequence
  Synthetic oligonucleotide
acgcgttatacaccgcgtcattgcgtagacggttaga

SEQ ID NO: 15956 - DNA, 34 bp, Artificial Sequence
  Synthetic oligonucleotide
acgcgttctcgactatactctgaggcctgggacg

SEQ ID NO: 15957 - DNA, 36 bp, Artificial Sequence
  Synthetic oligonucleotide
acggggagtcaatcatgtacgtagatggcccggcta

SEQ ID NO: 15958 - DNA, 37 bp, Artificial Sequence
  Synthetic oligonucleotide
acggttgaaaccgggtacctatgtgggtcagatttga

SEQ ID NO: 15959 - DNA, 35 bp, Artificial Sequence
  Synthetic oligonucleotide
acgtgcgagctgccagttggcactcactgaccaac

SEQ ID NO: 15960 - DNA, 38 bp, Artificial Sequence
  Synthetic oligonucleotide
actcctgaggttcttcggtggtactgataaggatctga

SEQ ID NO: 15961 - DNA, 36 bp, Artificial Sequence
  Synthetic oligonucleotide
agacaatctgatcatagatcatgattgacgcgctga

SEQ ID NO: 15962 - DNA, 38 bp, Artificial Sequence
  Synthetic oligonucleotide
agactgacgtctatatggtggttaggcccttgagatga

SEQ ID NO: 15963 - DNA, 35 bp, Artificial Sequence
  Synthetic oligonucleotide
agactgcaccctggtcgtgattcggacacagccaa

SEQ ID NO: 15964 - DNA, 36 bp, Artificial Sequence
  Synthetic oligonucleotide
agccccgaggcaagagaattacccggtaagttcata

SEQ ID NO: 15965 - DNA, 37 bp, Artificial Sequence
  Synthetic oligonucleotide
agcgctttgaaccatgcagttatcttgtagctcaaga

SEQ ID NO: 15966 - DNA, 35 bp, Artificial Sequence
  Synthetic oligonucleotide
agcggcgcgcggcctgccgggactatcatcggagc

SEQ ID NO: 15967 - DNA, 38 bp, Artificial Sequence
  Synthetic oligonucleotide
aggggggagtgcaggatcctgggtggtgaaagaattga

SEQ ID NO: 15968 - DNA, 37 bp, Artificial Sequence
  Synthetic oligonucleotide
aggttaagaagggaactctttcgccgatgaactgtga

SEQ ID NO: 15969 - DNA, 37 bp, Artificial Sequence
  Synthetic oligonucleotide
agttcaaagaggagagttcagaggcaggcctctggga

SEQ ID NO: 15970 - DNA, 37 bp, Artificial Sequence
  Synthetic oligonucleotide
ataccacggcaccgcagtctctagggtggacccagga

SEQ ID NO: 15971 - DNA, 35 bp, Artificial Sequence
  Synthetic oligonucleotide
ataggcacagcagagtggagataagccgaaggagc

SEQ ID NO: 15972 - DNA, 38 bp, Artificial Sequence
  Synthetic oligonucleotide
atagtcagataacagctcgtgagataacacgggcgtga

SEQ ID NO: 15973 - DNA, 35 bp, Artificial Sequence
  Synthetic oligonucleotide
atcaacccaagtccaactgtacggaaggagatctc

SEQ ID NO: 15974 - DNA, 35 bp, Artificial Sequence
  Synthetic oligonucleotide
atcctgaatcgtgactgatcgttgcggtgatgcgc

SEQ ID NO: 15975 - DNA, 36 bp, Artificial Sequence
  Synthetic oligonucleotide
atgaacgttctcggtggtttgtcaatgaatcatgga

SEQ ID NO: 15976 - DNA, 38 bp, Artificial Sequence
  Synthetic oligonucleotide
atgccttaacgcgacacttaattaatgtaggcctgtga

SEQ ID NO: 15977 - DNA, 38 bp, Artificial Sequence
  Synthetic oligonucleotide
atgggtgctttgtcccgcgcttaccagactatggctga

SEQ ID NO: 15978 - DNA, 35 bp, Artificial Sequence
  Synthetic oligonucleotide
attggtaaaatgtggcttcagacatggcacgcaaa

SEQ ID NO: 15979 - DNA, 38 bp, Artificial Sequence
  Synthetic oligonucleotide
attgtcctcagccggtgccccataattgaagaacctga

SEQ ID NO: 15980 - DNA, 35 bp, Artificial Sequence
  Synthetic oligonucleotide
attgtggggggccgcttttgtcccgtactgataga

SEQ ID NO: 15981 - DNA, 35 bp, Artificial Sequence
  Synthetic oligonucleotide
atttaaaagtgcgctacgtaaaagacgtctaagtt

SEQ ID NO: 15982 - DNA, 37 bp, Artificial Sequence
  Synthetic oligonucleotide
atttcagcactggatggcgccttaggttaggcatgga

SEQ ID NO: 15983 - DNA, 36 bp, Artificial Sequence
  Synthetic oligonucleotide
caatggacaaatctgttagggtctaataggagcaca

SEQ ID NO: 15984 - DNA, 35 bp, Artificial Sequence
  Synthetic oligonucleotide
cataaccccccaagagtggacggatggtgacggtc

SEQ ID NO: 15985 - DNA, 35 bp, Artificial Sequence
  Synthetic oligonucleotide
cccgtcctaaggctctatgggagaagcggagagct

SEQ ID NO: 15986 - DNA, 38 bp, Artificial Sequence
  Synthetic oligonucleotide
ccgaacacgaccggtgtaccatcgcttcctccctccga

SEQ ID NO: 15987 - DNA, 38 bp, Artificial Sequence
  Synthetic oligonucleotide
cgaccggttgcaacggtcggcgaaatgtctaatgttga

SEQ ID NO: 15988 - DNA, 35 bp, Artificial Sequence
  Synthetic oligonucleotide
cgacgtggaggctctgagaaatcgaactggcagtc

SEQ ID NO: 15989 - DNA, 36 bp, Artificial Sequence
  Synthetic oligonucleotide
cgcggctttcgatacgttaaattatgcctgccgtga

SEQ ID NO: 15990 - DNA, 36 bp, Artificial Sequence
  Synthetic oligonucleotide
ctaggttatacacaagtgtaacgaaaaagtccagaa

SEQ ID NO: 15991 - DNA, 35 bp, Artificial Sequence
  Synthetic oligonucleotide
ctcactgataacacccgttattgggtagacggagc

SEQ ID NO: 15992 - DNA, 35 bp, Artificial Sequence
  Synthetic oligonucleotide
gaaaatctgcagaatcgcggcattaggttcactgt

SEQ ID NO: 15993 - DNA, 35 bp, Artificial Sequence
  Synthetic oligonucleotide
gaaacggatccggtggtagccagagcttatactcc

SEQ ID NO: 15994 - DNA, 37 bp, Artificial Sequence
  Synthetic oligonucleotide
gaatgcgtgcacggtaaatacttttagagtcacgtga

SEQ ID NO: 15995 - DNA, 36 bp, Artificial Sequence
  Synthetic oligonucleotide
gaatgtgtaacgaaatggtaaagaaggatactataa

SEQ ID NO: 15996 - DNA, 37 bp, Artificial Sequence
  Synthetic oligonucleotide
gacaccttctacagaagtcccgaacgtttgtacagga

SEQ ID NO: 15997 - DNA, 37 bp, Artificial Sequence
  Synthetic oligonucleotide
gacccgcgtggtacacgtttggtcggtcaattattga

SEQ ID NO: 15998 - DNA, 38 bp, Artificial Sequence
  Synthetic oligonucleotide
gacgcacgggtaagtaagatctgatacgggaattatga

SEQ ID NO: 15999 - DNA, 37 bp, Artificial Sequence
  Synthetic oligonucleotide
gacgttgtgcaagctcgactgcgaggggggagaacga

SEQ ID NO: 16000 - DNA, 37 bp, Artificial Sequence
  Synthetic oligonucleotide
gactttaggcataggaagacttaagagacgtcgtcga

SEQ ID NO: 16001 - DNA, 35 bp, Artificial Sequence
  Synthetic oligonucleotide
gaggccccggactggtctctgcaaaaatagtgtac

SEQ ID NO: 16002 - DNA, 35 bp, Artificial Sequence
  Synthetic oligonucleotide
gagtggttcaggctgctactgaagttcactttgcc

SEQ ID NO: 16003 - DNA, 37 bp, Artificial Sequence
  Synthetic oligonucleotide
gcaaatatagtcggggtaagttcactttgtgccagga

SEQ ID NO: 16004 - DNA, 36 bp, Artificial Sequence
  Synthetic oligonucleotide
gcaactttgctccgagtggtgtcccgtttggggata

SEQ ID NO: 16005 - DNA, 38 bp, Artificial Sequence
  Synthetic oligonucleotide
gcactgctagtcgcacattagtgattgcattgatctga

SEQ ID NO: 16006 - DNA, 37 bp, Artificial Sequence
  Synthetic oligonucleotide
gcacttcgcgactatggatgggcttactgcttactga

SEQ ID NO: 16007 - DNA, 38 bp, Artificial Sequence
  Synthetic oligonucleotide
gccatgtgggaggtcgtgatctctcggtccagatatga

SEQ ID NO: 16008 - DNA, 35 bp, Artificial Sequence
  Synthetic oligonucleotide
gccccccgactagtattatgcttgggagctatagt

SEQ ID NO: 16009 - DNA, 37 bp, Artificial Sequence
  Synthetic oligonucleotide
gctcagatcggaaacgattttctagagagcacagtga

SEQ ID NO: 16010 - DNA, 35 bp, Artificial Sequence
  Synthetic oligonucleotide
gctcgctagatgccagaaccgcacggtacgatggg

SEQ ID NO: 16011 - DNA, 35 bp, Artificial Sequence
  Synthetic oligonucleotide
gctcttgctgtgtcatgtacctatgaaataggcaa

SEQ ID NO: 16012 - DNA, 38 bp, Artificial Sequence
  Synthetic oligonucleotide
gctgccatggggagcaggagtaaaatgcagacggttga

SEQ ID NO: 16013 - DNA, 38 bp, Artificial Sequence
  Synthetic oligonucleotide
gctgtgacactctaaagttcagtacgtgccggtaatga

SEQ ID NO: 16014 - DNA, 38 bp, Artificial Sequence
  Synthetic oligonucleotide
ggaccaggctgtccatcccgtacgtattagtcctgtga

SEQ ID NO: 16015 - DNA, 37 bp, Artificial Sequence
  Synthetic oligonucleotide
ggacccaggaactcgcggaacgtgaggtgcgttctga

SEQ ID NO: 16016 - DNA, 38 bp, Artificial Sequence
  Synthetic oligonucleotide
ggaggtagtttttgatgcctaggtggtatagcccatga

SEQ ID NO: 16017 - DNA, 37 bp, Artificial Sequence
  Synthetic oligonucleotide
ggatgcagtttgggtcactgacccacggaggtagaga

SEQ ID NO: 16018 - DNA, 36 bp, Artificial Sequence
  Synthetic oligonucleotide
gggtccagttcggtcacgtcatattagcattaggca

SEQ ID NO: 16019 - DNA, 36 bp, Artificial Sequence
  Synthetic oligonucleotide
ggtcaggtaatacttggttcagccgagggtaacgaa

SEQ ID NO: 16020 - DNA, 38 bp, Artificial Sequence
  Synthetic oligonucleotide
ggtcatgtatgtgaaaaatgcttctgacatcaggctga

SEQ ID NO: 16021 - DNA, 38 bp, Artificial Sequence
  Synthetic oligonucleotide
ggtcgttcgatcgtaatcacgtaaatgaagcatcttga

SEQ ID NO: 16022 - DNA, 35 bp, Artificial Sequence
  Synthetic oligonucleotide
gtccatcagactaagaacgcgcgcactgtgtatca

SEQ ID NO: 16023 - DNA, 36 bp, Artificial Sequence
  Synthetic oligonucleotide
gtcccatcgtaactggtttcagaggtagtaaggtca

SEQ ID NO: 16024 - DNA, 35 bp, Artificial Sequence
  Synthetic oligonucleotide
gtccctaagtctaaaggcgaaaaacgtcattttcg

SEQ ID NO: 16025 - DNA, 38 bp, Artificial Sequence
  Synthetic oligonucleotide
gtccttttaccggacgtaccagtgaccccatctgttga

SEQ ID NO: 16026 - DNA, 36 bp, Artificial Sequence
  Synthetic oligonucleotide
gtgacggtacccctggtcacgtataatgggagctgg

SEQ ID NO: 16027 - DNA, 38 bp, Artificial Sequence
  Synthetic oligonucleotide
gtgggttagtttcttcaatagaactcaggcactcgtga

SEQ ID NO: 16028 - DNA, 35 bp, Artificial Sequence
  Synthetic oligonucleotide
taaactgacgtacggcttataatccttgctcaccg

SEQ ID NO: 16029 - DNA, 36 bp, Artificial Sequence
  Synthetic oligonucleotide
taaagttaggtggaccactgctcacgtgtgacacaa

SEQ ID NO: 16030 - DNA, 35 bp, Artificial Sequence
  Synthetic oligonucleotide
taacatcgtcgccgacgttgttttctcggagtgac

SEQ ID NO: 16031 - DNA, 36 bp, Artificial Sequence
  Synthetic oligonucleotide
tacattgcgttgaaatgataaggggtctgttcgtga

SEQ ID NO: 16032 - DNA, 38 bp, Artificial Sequence
  Synthetic oligonucleotide
tacgcgcaccttgggtaccgtaattatgatggtgttga

SEQ ID NO: 16033 - DNA, 38 bp, Artificial Sequence
  Synthetic oligonucleotide
tacgcgtactcgttggtagagcaagtaatagggggtga

SEQ ID NO: 16034 - DNA, 37 bp, Artificial Sequence
  Synthetic oligonucleotide
taggcttctagcacgttcactagaattcacattcaga

SEQ ID NO: 16035 - DNA, 37 bp, Artificial Sequence
  Synthetic oligonucleotide
tagtaccccagctcgacctggaagaacaaattctgga

SEQ ID NO: 16036 - DNA, 35 bp, Artificial Sequence
  Synthetic oligonucleotide
tagtctctttggctaaagccagctacacgtatttg

SEQ ID NO: 16037 - DNA, 35 bp, Artificial Sequence
  Synthetic oligonucleotide
tatctctagagaacgaagagttctgtcaagcgttg

SEQ ID NO: 16038 - DNA, 37 bp, Artificial Sequence
  Synthetic oligonucleotide
tcaaatcgtcatagagatgtcagaataatttgtatga

SEQ ID NO: 16039 - DNA, 37 bp, Artificial Sequence
  Synthetic oligonucleotide
tcaatgggaatctggcaatgtagtcaggtatgttaga

SEQ ID NO: 16040 - DNA, 36 bp, Artificial Sequence
  Synthetic oligonucleotide
tcagagcggatctagacgcccttcgcaattggatga

SEQ ID NO: 16041 - DNA, 38 bp, Artificial Sequence
  Synthetic oligonucleotide
tcatcatggagcaatgcgccacgccaatacgtaagtga

SEQ ID NO: 16042 - DNA, 38 bp, Artificial Sequence
  Synthetic oligonucleotide
tccgggttgttcgtggatgttcaaagctcaatgggtga

SEQ ID NO: 16043 - DNA, 35 bp, Artificial Sequence
  Synthetic oligonucleotide
tcgagaggaggggcataatattttcgtcgccagac

SEQ ID NO: 16044 - DNA, 38 bp, Artificial Sequence
  Synthetic oligonucleotide
tctagcgacgtactcgcatcttgtcgtggatcaaatga

SEQ ID NO: 16045 - DNA, 36 bp, Artificial Sequence
  Synthetic oligonucleotide
tgatcaaaacattgggaaggaggatggtgcccccca

SEQ ID NO: 16046 - DNA, 38 bp, Artificial Sequence
  Synthetic oligonucleotide
tgctgtgcggagtctgtaaaagccccactagcacgtga

SEQ ID NO: 16047 - DNA, 37 bp, Artificial Sequence
  Synthetic oligonucleotide
tgggtccaggcttcgttaggctttattcgggtgacga

SEQ ID NO: 16048 - DNA, 35 bp, Artificial Sequence
  Synthetic oligonucleotide
tgtaacaaatgttaacgaactctgcattggcgact

SEQ ID NO: 16049 - DNA, 38 bp, Artificial Sequence
  Synthetic oligonucleotide
tgtaacgtgtgtcatcctcagacgacacccggatgtga

SEQ ID NO: 16050 - DNA, 36 bp, Artificial Sequence
  Synthetic oligonucleotide
tgtagtccgcatggatctcgagcgtggccgtaagta

SEQ ID NO: 16051 - DNA, 38 bp, Artificial Sequence
  Synthetic oligonucleotide
tgtcattccaggtgatttggtgctcgaatgtgccatga

SEQ ID NO: 16052 - DNA, 35 bp, Artificial Sequence
  Synthetic oligonucleotide
tgttgccggtgaaccattgtactcgttccaagggt

SEQ ID NO: 16053 - DNA, 37 bp, Artificial Sequence
  Synthetic oligonucleotide
ttacgtatcgtatgttatcgattgtgtattattccga

SEQ ID NO: 16054 - DNA, 35 bp, Artificial Sequence
  Synthetic oligonucleotide
ttcgggatttacatgcgacgaacgtgtcatgcgga

SEQ ID NO: 16055 - DNA, 36 bp, Artificial Sequence
  Synthetic oligonucleotide
ttggacattagtgtcgtaaagctggtttgttctaga

SEQ ID NO: 16056 - DNA, 38 bp, Artificial Sequence
  Synthetic oligonucleotide
ttgtattagcctccgctctatcatggttaaagtgctga

SEQ ID NO: 16057 - DNA, 37 bp, Artificial Sequence
  Synthetic oligonucleotide
ttgttgggcaaatgagcttgttcgctcagttctgtga

SEQ ID NO: 16058 - DNA, 38 bp, Artificial Sequence
  Synthetic oligonucleotide
tttaatgtcatgctgggcaaaggcccacgttacactga

SEQ ID NO: 16059 - DNA, 38 bp, Artificial Sequence
  Synthetic oligonucleotide
tttcgtatctggtcttgtcaaatgcctattaccattga

SEQ ID NO: 16060 - DNA, 37 bp, Artificial Sequence
  Synthetic oligonucleotide
tttgagcgcgatctcaagaggtcgcgagcttgcccga

SEQ ID NO: 16061 - DNA, 36 bp, Artificial Sequence
  Synthetic oligonucleotide
aaacgtgccgagtgctggcgaaccgtgctgtataaa

SEQ ID NO: 16062 - DNA, 35 bp, Artificial Sequence
  Synthetic oligonucleotide
aaagagtccataacgactacttacggtcattagtc

SEQ ID NO: 16063 - DNA, 36 bp, Artificial Sequence
  Synthetic oligonucleotide
aaagtggctctgactaaaagctgtaaaaggtggtta

SEQ ID NO: 16064 - DNA, 37 bp, Artificial Sequence
  Synthetic oligonucleotide
aaagttggtcagtgaagagattaaaaattccccccga

SEQ ID NO: 16065 - DNA, 38 bp, Artificial Sequence
  Synthetic oligonucleotide
aagcgaagacgagctgagcggtgacaagggggaaatga

SEQ ID NO: 16066 - DNA, 37 bp, Artificial Sequence
  Synthetic oligonucleotide
aatgggggatatcagaggatggtctctcacacactga

SEQ ID NO: 16067 - DNA, 37 bp, Artificial Sequence
  Synthetic oligonucleotide
accatatttgtacttaagtcatgccaaaggtcacgga

SEQ ID NO: 16068 - DNA, 38 bp, Artificial Sequence
  Synthetic oligonucleotide
actacgtcggtgcaagcaatcaaccgtagatatcttga

SEQ ID NO: 16069 - DNA, 37 bp, Artificial Sequence
  Synthetic oligonucleotide
actagcgggtaagagggggagcattctttatcagaga

SEQ ID NO: 16070 - DNA, 35 bp, Artificial Sequence
  Synthetic oligonucleotide
actggagtcagaagctctatgcaagttagtaggcg

SEQ ID NO: 16071 - DNA, 36 bp, Artificial Sequence
  Synthetic oligonucleotide
agaaccacgcagatgtcgtgtggtttggcctctcga

SEQ ID NO: 16072 - DNA, 37 bp, Artificial Sequence
  Synthetic oligonucleotide
agaaggcctcgccatacacaatatagtctaagtggga

SEQ ID NO: 16073 - DNA, 35 bp, Artificial Sequence
  Synthetic oligonucleotide
agaccttttcaggggtcttgggctggagtgtaaca

SEQ ID NO: 16074 - DNA, 38 bp, Artificial Sequence
  Synthetic oligonucleotide
agcctcaacgcgatggtcattgtccagctgcaaccaga

SEQ ID NO: 16075 - DNA, 35 bp, Artificial Sequence
  Synthetic oligonucleotide
agctataccgttgcgccgtttggtcgcatagggag

SEQ ID NO: 16076 - DNA, 37 bp, Artificial Sequence
  Synthetic oligonucleotide
agcttagatgatgttcatctagcagtaccggagtcga

SEQ ID NO: 16077 - DNA, 35 bp, Artificial Sequence
  Synthetic oligonucleotide
aggagagcttttggatcgtaatgagggtagtctac

SEQ ID NO: 16078 - DNA, 35 bp, Artificial Sequence
  Synthetic oligonucleotide
atccccccggctgatcggcacgttagttgtcgttg

SEQ ID NO: 16079 - DNA, 35 bp, Artificial Sequence
  Synthetic oligonucleotide
atgagtgcactcctttcgttagctttgtaggcggt

SEQ ID NO: 16080 - DNA, 35 bp, Artificial Sequence
  Synthetic oligonucleotide
caacttagggtgaacctgttgtcgaacgtgacttt

SEQ ID NO: 16081 - DNA, 36 bp, Artificial Sequence
  Synthetic oligonucleotide
cccacccaacgagctgctccagctaaaggggacgta

SEQ ID NO: 16082 - DNA, 36 bp, Artificial Sequence
  Synthetic oligonucleotide
ccgcaaccgcttatcgctccctgcagaagggggtta

SEQ ID NO: 16083 - DNA, 38 bp, Artificial Sequence
  Synthetic oligonucleotide
ctagtcgagaaggctccccggccgtagaattgtaatga

SEQ ID NO: 16084 - DNA, 37 bp, Artificial Sequence
  Synthetic oligonucleotide
ctgaggaaatgccggtttattcctcaggcgactacga

SEQ ID NO: 16085 - DNA, 35 bp, Artificial Sequence
  Synthetic oligonucleotide
gacctagaccgagtatgttaataccgtgctgtgct

SEQ ID NO: 16086 - DNA, 35 bp, Artificial Sequence
  Synthetic oligonucleotide
gactctataataatccgttcaggtttcggtgtcac

SEQ ID NO: 16087 - DNA, 35 bp, Artificial Sequence
  Synthetic oligonucleotide
gagcttgtctgaaatctgcgggagaccatatacga

SEQ ID NO: 16088 - DNA, 36 bp, Artificial Sequence
  Synthetic oligonucleotide
gatccgggtggattgtcatggagaggacgtccagga

SEQ ID NO: 16089 - DNA, 37 bp, Artificial Sequence
  Synthetic oligonucleotide
gattccgttagcgagtcaagtcataatgagctgcgga

SEQ ID NO: 16090 - DNA, 38 bp, Artificial Sequence
  Synthetic oligonucleotide
gatttagaggtgaatcgtgggaatcggctacttcttga

SEQ ID NO: 16091 - DNA, 36 bp, Artificial Sequence
  Synthetic oligonucleotide
gcaagggtttgactcggatcgcattcaactccctca

SEQ ID NO: 16092 - DNA, 37 bp, Artificial Sequence
  Synthetic oligonucleotide
gccaggatacgtgcaccgtccatggcacgtggggcga

SEQ ID NO: 16093 - DNA, 38 bp, Artificial Sequence
  Synthetic oligonucleotide
gcgaacgtcactcagtcctgtacgattgtacggtgtga

SEQ ID NO: 16094 - DNA, 37 bp, Artificial Sequence
  Synthetic oligonucleotide
gcgaccatcgtagggagcacctatccgcagttcttga

SEQ ID NO: 16095 - DNA, 35 bp, Artificial Sequence
  Synthetic oligonucleotide
gcgcttcgcacacagtactcgatattgcgttaccc

SEQ ID NO: 16096 - DNA, 36 bp, Artificial Sequence
  Synthetic oligonucleotide
gcggagcaattggcataaggagatgccttgaacgga

SEQ ID NO: 16097 - DNA, 35 bp, Artificial Sequence
  Synthetic oligonucleotide
gctcaggaattgacgcacgttaactacatgcgata

SEQ ID NO: 16098 - DNA, 36 bp, Artificial Sequence
  Synthetic oligonucleotide
gtaactcaagagggaatcccgggctgtgattaaaca

SEQ ID NO: 16099 - DNA, 35 bp, Artificial Sequence
  Synthetic oligonucleotide
gtagtagagcagggatttcacttgtggtaggccat

SEQ ID NO: 16100 - DNA, 38 bp, Artificial Sequence
  Synthetic oligonucleotide
gtgaactggacatgcgactgacatatagcggtcaatga

SEQ ID NO: 16101 - DNA, 37 bp, Artificial Sequence
  Synthetic oligonucleotide
gtgcgactcttgcagtaagactgggtttcgcaaggga

SEQ ID NO: 16102 - DNA, 35 bp, Artificial Sequence
  Synthetic oligonucleotide
gtgcgctcatcattgttatacacgaatacaatcag

SEQ ID NO: 16103 - DNA, 36 bp, Artificial Sequence
  Synthetic oligonucleotide
gtgctgaagggcttggtggtcaatattctttgagga

SEQ ID NO: 16104 - DNA, 35 bp, Artificial Sequence
  Synthetic oligonucleotide
gtgtggcgccggctcagtccgcgttaatgagtatg

SEQ ID NO: 16105 - DNA, 37 bp, Artificial Sequence
  Synthetic oligonucleotide
taacgtaggcccaagcctcattagctgacaatgtaga

SEQ ID NO: 16106 - DNA, 38 bp, Artificial Sequence
  Synthetic oligonucleotide
tacgcatttcaacgggagtcgtgttatgagtgctctga

SEQ ID NO: 16107 - DNA, 36 bp, Artificial Sequence
  Synthetic oligonucleotide
tatataggatcagtatgattctgcaaacaaacgata

SEQ ID NO: 16108 - DNA, 35 bp, Artificial Sequence
  Synthetic oligonucleotide
tcaatagtcagatcatatcccacgcaccgcccata

SEQ ID NO: 16109 - DNA, 38 bp, Artificial Sequence
  Synthetic oligonucleotide
tcgacgtcactggagttaaaccggtcgacccgccttga

SEQ ID NO: 16110 - DNA, 35 bp, Artificial Sequence
  Synthetic oligonucleotide
tcgtattccagatcggccgattagtttcggtaaac

SEQ ID NO: 16111 - DNA, 37 bp, Artificial Sequence
  Synthetic oligonucleotide
tgaccagaagggtcatctattggcggttgttgtgcga

SEQ ID NO: 16112 - DNA, 37 bp, Artificial Sequence
  Synthetic oligonucleotide
tgattcaccatcacgcgtattgctcgttcccgagcga

SEQ ID NO: 16113 - DNA, 35 bp, Artificial Sequence
  Synthetic oligonucleotide
tggatcgagggaggctaccgaaggctccgtcgcac

SEQ ID NO: 16114 - DNA, 37 bp, Artificial Sequence
  Synthetic oligonucleotide
tgggacggacgtttgctgcagttgcgctttattaaga

SEQ ID NO: 16115 - DNA, 37 bp, Artificial Sequence
  Synthetic oligonucleotide
tgtggcgagacatgggttagtggtaaaagtcacttga

SEQ ID NO: 16116 - DNA, 38 bp, Artificial Sequence
  Synthetic oligonucleotide
ttcgcgcggccctatagtggtttatgctatagttgtga

SEQ ID NO: 16117 - DNA, 38 bp, Artificial Sequence
  Synthetic oligonucleotide
ttgttacacacggaatgttatggggggcttagaagtga

SEQ ID NO: 16118 - DNA, 36 bp, Artificial Sequence
  Synthetic oligonucleotide
ttttacgaacaaacatgattccggctccggatcgta

SEQ ID NO: 16119 - DNA, 38 bp, Artificial Sequence
  Synthetic oligonucleotide
gggtcctgacaccttttaggtttcgggtatgttactga

SEQ ID NO: 16120 - DNA, 38 bp, Artificial Sequence
  Synthetic oligonucleotide
tagtgggccgagtgaagtcaccttaggacagttcatga

SEQ ID NO: 16121 - DNA, 38 bp, Artificial Sequence
  Synthetic oligonucleotide
acgcctaaggaagactagtgcactgttgtcgggcatga

SEQ ID NO: 16122 - DNA, 36 bp, Artificial Sequence
  Synthetic oligonucleotide
agagggttggctggcgaaacatgtcccctcgccgta

SEQ ID NO: 16123 - DNA, 36 bp, Artificial Sequence
  Synthetic oligonucleotide
agctaatgaacgtacgttggaccggttctattgcga

SEQ ID NO: 16124 - DNA, 37 bp, Artificial Sequence
  Synthetic oligonucleotide
caaccgtccgtccctaggagaactgtgagggggagga

SEQ ID NO: 16125 - DNA, 38 bp, Artificial Sequence
  Synthetic oligonucleotide
cagtcgtatctaattcgggtgtatcactgtattgctga

SEQ ID NO: 16126 - DNA, 35 bp, Artificial Sequence
  Synthetic oligonucleotide
ccagacacacctactcgatgactgggtagctaccg

SEQ ID NO: 16127 - DNA, 37 bp, Artificial Sequence
  Synthetic oligonucleotide
ctccgggccgacaccactgtgaattggccagggagta

SEQ ID NO: 16128 - DNA, 37 bp, Artificial Sequence
  Synthetic oligonucleotide
gacaagcttccgttcctgtgaatcgtgtggttttgga

SEQ ID NO: 16129 - DNA, 35 bp, Artificial Sequence
  Synthetic oligonucleotide
gacctgccttgcctaatatatcacggtcagatccc

SEQ ID NO: 16130 - DNA, 36 bp, Artificial Sequence
  Synthetic oligonucleotide
gacgcccgtgagtgcagagctccacgcggtggctga

SEQ ID NO: 16131 - DNA, 35 bp, Artificial Sequence
  Synthetic oligonucleotide
gtagtgactgacgccgctacatagcgtcgcttcga

SEQ ID NO: 16132 - DNA, 35 bp, Artificial Sequence
  Synthetic oligonucleotide
gtctggaccggccgtgacctcacatccctactcgt

SEQ ID NO: 16133 - DNA, 37 bp, Artificial Sequence
  Synthetic oligonucleotide
taaagtagcgcgttaacaagtccctcggacttggcga

SEQ ID NO: 16134 - DNA, 36 bp, Artificial Sequence
  Synthetic oligonucleotide
taacgaagtagtcctagtagggaagagatcagcgaa

SEQ ID NO: 16135 - DNA, 36 bp, Artificial Sequence
  Synthetic oligonucleotide
tacatctttcaagaatggaaagttcgcgtgacgcaa

SEQ ID NO: 16136 - DNA, 35 bp, Artificial Sequence
  Synthetic oligonucleotide
tagggttgtggagttcctggtagatgccttaatgg

SEQ ID NO: 16137 - DNA, 35 bp, Artificial Sequence
  Synthetic oligonucleotide
tgcacttcgcgctcgatgtcacggccactgcgcga

SEQ ID NO: 16138 - DNA, 37 bp, Artificial Sequence
  Synthetic oligonucleotide
ttggaacgtggtgaagagcataaaaaggaggctctga

SEQ ID NO: 16139 - DNA, 38 bp, Artificial Sequence
  Synthetic oligonucleotide
aacgcgcctggcacagggtatcgacgcccacgaaatga

SEQ ID NO: 16140 - DNA, 37 bp, Artificial Sequence
  Synthetic oligonucleotide
aggggactgaaggctagtggtttaagatagggtaaga

SEQ ID NO: 16141 - DNA, 37 bp, Artificial Sequence
  Synthetic oligonucleotide
gagcccgcgtggcgacagtctttgtcttgtgtttgga

SEQ ID NO: 16142 - DNA, 37 bp, Artificial Sequence
  Synthetic oligonucleotide
atctgatcaggcctccattgtatttacacctgtgaga

SEQ ID NO: 16143 - DNA, 38 bp, Artificial Sequence
  Synthetic oligonucleotide
atggacatagtcccagtgcatgtaatcgtaatcactga

SEQ ID NO: 16144 - DNA, 35 bp, Artificial Sequence
  Synthetic oligonucleotide
cccccgatatccaaacgtatgctggggtagtccgc

SEQ ID NO: 16145 - DNA, 37 bp, Artificial Sequence
  Synthetic oligonucleotide
gaagcgagacacagatcatggtgtggttgcgcttcga

SEQ ID NO: 16146 - DNA, 38 bp, Artificial Sequence
  Synthetic oligonucleotide
gccgggagttttgccaaaattgacaccgggcgtactga

SEQ ID NO: 16147 - DNA, 37 bp, Artificial Sequence
  Synthetic oligonucleotide
tagtcctgtccaagctctatgtgtgggtggatgccga

SEQ ID NO: 16148 - DNA, 35 bp, Artificial Sequence
  Synthetic oligonucleotide
tcaaagtgagtcggaacttagtgttctgactttta

SEQ ID NO: 16149 - DNA, 37 bp, Artificial Sequence
  Synthetic oligonucleotide
tccgtgcccacgatttaagagcactgctggtcaggga

SEQ ID NO: 16150 - DNA, 36 bp, Artificial Sequence
  Synthetic oligonucleotide
ttcaagaaccgggtcgcaacatcggaacgggcctta

SEQ ID NO: 16151 - DNA, 38 bp, Artificial Sequence
  Synthetic oligonucleotide
ttacgcctgagggtaatacggctaaggtaaagtgctga

SEQ ID NO: 16152 - DNA, 35 bp, Artificial Sequence
  Synthetic oligonucleotide
agcatggagataggaagtctacgaatgtggctatg

SEQ ID NO: 16153 - DNA, 37 bp, Artificial Sequence
  Synthetic oligonucleotide
gctacagcatggactcaagatcgttaggttttgtcga

SEQ ID NO: 16154 - DNA, 38 bp, Artificial Sequence
  Synthetic oligonucleotide
gaagggcgtctaccgtcatgtgttaaattatgtcgtga

SEQ ID NO: 16155 - DNA, 38 bp, Artificial Sequence
  Synthetic oligonucleotide
gcatagccttaccgaggcgcgtgtaagtttttctatga

SEQ ID NO: 16156 - DNA, 38 bp, Artificial Sequence
  Synthetic oligonucleotide
ggtcaaacgcgacacgagggagagggtacggattgtga

SEQ ID NO: 16157 - DNA, 35 bp, Artificial Sequence
  Synthetic oligonucleotide
catgagacctccccgcgaatcacacactcagtctg

SEQ ID NO: 16158 - DNA, 35 bp, Artificial Sequence
  Synthetic oligonucleotide
atgcagtcaaaatgaattgatattcccgatgcgtg

SEQ ID NO: 16159 - DNA, 38 bp, Artificial Sequence
  Synthetic oligonucleotide
gaatggggcggcacgtcccgagatcatgtttaacgtga

SEQ ID NO: 16160 - DNA, 36 bp, Artificial Sequence
  Synthetic oligonucleotide
gactgtcactgactatacacggattagtagggcgca

SEQ ID NO: 16161 - DNA, 36 bp, Artificial Sequence
  Synthetic oligonucleotide
gcaaagagagcacggatttctcgcgtgctacgccga

SEQ ID NO: 16162 - DNA, 37 bp, Artificial Sequence
  Synthetic oligonucleotide
gccggaaaacgtgacgcagtatgatgggatgtggaga

SEQ ID NO: 16163 - DNA, 35 bp, Artificial Sequence
  Synthetic oligonucleotide
taacacacaaaggctacccatctgcgtacaggtcc

SEQ ID NO: 16164 - DNA, 38 bp, Artificial Sequence
  Synthetic oligonucleotide
taacgtcctcctcgtgtttgacaggtgttaaactctga

SEQ ID NO: 16165 - DNA, 37 bp, Artificial Sequence
  Synthetic oligonucleotide
tgagcgtgttcttcgtcaaagaatgagtggtgtagga

SEQ ID NO: 16166 - DNA, 36 bp, Artificial Sequence
  Synthetic oligonucleotide
tgttaagggcaatgcgcgcttaaagaggtacggaga

SEQ ID NO: 16167 - DNA, 35 bp, Artificial Sequence
  Synthetic oligonucleotide
ttaagaaggctcgggatgaggccaaggtgttcgta

SEQ ID NO: 16168 - DNA, 36 bp, Artificial Sequence
  Synthetic oligonucleotide
aaaagtcgcgatacggcatatccgtattgaggccca

SEQ ID NO: 16169 - DNA, 36 bp, Artificial Sequence
  Synthetic oligonucleotide
aacccgggcccgtgggttgattgtctgctgagcgga

SEQ ID NO: 16170 - DNA, 36 bp, Artificial Sequence
  Synthetic oligonucleotide
aacgaaagtacagagggggcctcatgctacgggaga

SEQ ID NO: 16171 - DNA, 38 bp, Artificial Sequence
  Synthetic oligonucleotide
aacggtcgtgcttctctcgactatgttctcttgtctga

SEQ ID NO: 16172 - DNA, 38 bp, Artificial Sequence
  Synthetic oligonucleotide
aactgggtgggtggtacttcagggtagggtacatttga

SEQ ID NO: 16173 - DNA, 36 bp, Artificial Sequence
  Synthetic oligonucleotide
aactgtagtcatatatgcgttaggtgcggggcgcga

SEQ ID NO: 16174 - DNA, 38 bp, Artificial Sequence
  Synthetic oligonucleotide
aacttgctagggggataggtaaaagaagcagcctatga

SEQ ID NO: 16175 - DNA, 36 bp, Artificial Sequence
  Synthetic oligonucleotide
aagactgcaacaatgtgaaataagccgtagcttgta

SEQ ID NO: 16176 - DNA, 37 bp, Artificial Sequence
  Synthetic oligonucleotide
aagattgagagggtcaatagcgtgctgtcggaagaga

SEQ ID NO: 16177 - DNA, 35 bp, Artificial Sequence
  Synthetic oligonucleotide
aagcacggaccctattaaagatgttgaacgtcgtt

SEQ ID NO: 16178 - DNA, 36 bp, Artificial Sequence
  Synthetic oligonucleotide
aagcctggattggctcgagccttaattttgttcgta

SEQ ID NO: 16179 - DNA, 37 bp, Artificial Sequence
  Synthetic oligonucleotide
aagggattacgggcaagctgcactggtctggcacaga

SEQ ID NO: 16180 - DNA, 37 bp, Artificial Sequence
  Synthetic oligonucleotide
aatcaacgtaccacctcggtatagttgacatgctaga

SEQ ID NO: 16181 - DNA, 38 bp, Artificial Sequence
  Synthetic oligonucleotide
aatcgtgtgaggttcgtctccagactgtcttaacgtga

SEQ ID NO: 16182 - DNA, 36 bp, Artificial Sequence
  Synthetic oligonucleotide
aatgtgaggttcctctagaggatcttggatttacta

SEQ ID NO: 16183 - DNA, 36 bp, Artificial Sequence
  Synthetic oligonucleotide
acaggacttgggataggcactgctacggcctggtca

SEQ ID NO: 16184 - DNA, 37 bp, Artificial Sequence
  Synthetic oligonucleotide
accctcgggatatatgggaaacttcatagattggtga

SEQ ID NO: 16185 - DNA, 38 bp, Artificial Sequence
  Synthetic oligonucleotide
accggccaccactcaagtgggtatattgacagttatga

SEQ ID NO: 16186 - DNA, 36 bp, Artificial Sequence
  Synthetic oligonucleotide
acgtcatggatggatgattttcaatggtacgctaca

SEQ ID NO: 16187 - DNA, 36 bp, Artificial Sequence
  Synthetic oligonucleotide
actagccaggaacggcaaacttaattgatcagtgaa

SEQ ID NO: 16188 - DNA, 37 bp, Artificial Sequence
  Synthetic oligonucleotide
acttccgagttggatggtgggaagagttgattgctga

SEQ ID NO: 16189 - DNA, 35 bp, Artificial Sequence
  Synthetic oligonucleotide
agacgctgttccggttatgtggcgaggggacaacg

SEQ ID NO: 16190 - DNA, 35 bp, Artificial Sequence
  Synthetic oligonucleotide
agagggtgtgggcgttgaattgtggttagatgtgc

SEQ ID NO: 16191 - DNA, 36 bp, Artificial Sequence
  Synthetic oligonucleotide
agattggaagctatggcggaacacgatatggctgta

SEQ ID NO: 16192 - DNA, 34 bp, Artificial Sequence
  Synthetic oligonucleotide
agccgggacatacccgagttgccattgacacagg

SEQ ID NO: 16193 - DNA, 35 bp, Artificial Sequence
  Synthetic oligonucleotide
agctcactggatcgatttcggtccaggagtgtgga

SEQ ID NO: 16194 - DNA, 36 bp, Artificial Sequence
  Synthetic oligonucleotide
aggggtcgcggataaagacccttgaacgtgacagga

SEQ ID NO: 16195 - DNA, 37 bp, Artificial Sequence
  Synthetic oligonucleotide
agtcgagcggtccgtcactggtcacctaaacagaaga

SEQ ID NO: 16196 - DNA, 37 bp, Artificial Sequence
  Synthetic oligonucleotide
agttgaacttgggtcatgatcaacaagcgcggttgga

SEQ ID NO: 16197 - DNA, 37 bp, Artificial Sequence
  Synthetic oligonucleotide
agttttgcccggggtacctgcctccgggactgtgaga

SEQ ID NO: 16198 - DNA, 35 bp, Artificial Sequence
  Synthetic oligonucleotide
atacatgccggggggtgggggattgattttatgtc

SEQ ID NO: 16199 - DNA, 38 bp, Artificial Sequence
  Synthetic oligonucleotide
atcatacgactaaatgtccaaggttggggtccgtctga

SEQ ID NO: 16200 - DNA, 36 bp, Artificial Sequence
  Synthetic oligonucleotide
atcattcccgtaaagatggcacacgatagacgagca

SEQ ID NO: 16201 - DNA, 35 bp, Artificial Sequence
  Synthetic oligonucleotide
atccacctattaggtgcatcacactcttgagagtc

SEQ ID NO: 16202 - DNA, 35 bp, Artificial Sequence
  Synthetic oligonucleotide
atcccatgcgcgaaggggtgcatacgttaagactg

SEQ ID NO: 16203 - DNA, 36 bp, Artificial Sequence
  Synthetic oligonucleotide
atcccggatatatacctcaagacatggttcgtttga

SEQ ID NO: 16204 - DNA, 38 bp, Artificial Sequence
  Synthetic oligonucleotide
atctgggtcatgcattaataagagctcttatctagtga

SEQ ID NO: 16205 - DNA, 38 bp, Artificial Sequence
  Synthetic oligonucleotide
atgacttcggccaaaacatccggcagacccttgtttga

SEQ ID NO: 16206 - DNA, 36 bp, Artificial Sequence
  Synthetic oligonucleotide
atgagataacggcacgccgccggtcaactgtgaaga

SEQ ID NO: 16207 - DNA, 37 bp, Artificial Sequence
  Synthetic oligonucleotide
atgatttaggatccctatagttggcctatgggacgga

SEQ ID NO: 16208 - DNA, 38 bp, Artificial Sequence
  Synthetic oligonucleotide
atgtgactcggtttgtggcaccgacgggtttatgctga

SEQ ID NO: 16209 - DNA, 37 bp, Artificial Sequence
  Synthetic oligonucleotide
cacgacaagcgactttggagcaattgtcgaaaccgga

SEQ ID NO: 16210 - DNA, 35 bp, Artificial Sequence
  Synthetic oligonucleotide
catcatatcgaaccgctgtcaacggtaaagttaag

SEQ ID NO: 16211 - DNA, 36 bp, Artificial Sequence
  Synthetic oligonucleotide
catgatatctcagaggatggctggagaatgtaagta

SEQ ID NO: 16212 - DNA, 36 bp, Artificial Sequence
  Synthetic oligonucleotide
cctccacaggcttctgcattactgtgggggccggga

SEQ ID NO: 16213 - DNA, 34 bp, Artificial Sequence
  Synthetic oligonucleotide
cgcgcagaaggaacaatgagtttcgcgtgcagga

SEQ ID NO: 16214 - DNA, 35 bp, Artificial Sequence
  Synthetic oligonucleotide
ctcgggtctggcatgacagggggagggttatttac

SEQ ID NO: 16215 - DNA, 37 bp, Artificial Sequence
  Synthetic oligonucleotide
ctgacgcactgcctagtcatgtgacacgtgtctacga

SEQ ID NO: 16216 - DNA, 35 bp, Artificial Sequence
  Synthetic oligonucleotide
gactacgtctttctgggggtcatgaggttattata

SEQ ID NO: 16217 - DNA, 38 bp, Artificial Sequence
  Synthetic oligonucleotide
gactccatgcttttcgcgatagttgatagtccgtctga

SEQ ID NO: 16218 - DNA, 36 bp, Artificial Sequence
  Synthetic oligonucleotide
gagcgaatcttcgaaagcgaaacacaccggatcgta

SEQ ID NO: 16219 - DNA, 35 bp, Artificial Sequence
  Synthetic oligonucleotide
gaggaatgtgaggcacggtatagaaccggctgatc

SEQ ID NO: 16220 - DNA, 35 bp, Artificial Sequence
  Synthetic oligonucleotide
gaggatgtctcgcagtccgacctttgttgtggggt

SEQ ID NO: 16221 - DNA, 38 bp, Artificial Sequence
  Synthetic oligonucleotide
gaggggattagtcgttaatgggctctcgtagttcttga

SEQ ID NO: 16222 - DNA, 38 bp, Artificial Sequence
  Synthetic oligonucleotide
gagtaccgatagtacttgcatattggatctcgttctga

SEQ ID NO: 16223 - DNA, 37 bp, Artificial Sequence
  Synthetic oligonucleotide
gagtacgtccactggtatgtctcttcggaccagagga

SEQ ID NO: 16224 - DNA, 37 bp, Artificial Sequence
  Synthetic oligonucleotide
gataaaattgttaggtcgtggccactccgaaagtcga

SEQ ID NO: 16225 - DNA, 35 bp, Artificial Sequence
  Synthetic oligonucleotide
gcaaagcggagcgttgtccagttggttctggtata

SEQ ID NO: 16226 - DNA, 37 bp, Artificial Sequence
  Synthetic oligonucleotide
gcaacttggaaagaaaaaacgaaacgtcactcgttga

SEQ ID NO: 16227 - DNA, 38 bp, Artificial Sequence
  Synthetic oligonucleotide
gccagtcactgtcgaaggggtggaactcgaccggatga

SEQ ID NO: 16228 - DNA, 36 bp, Artificial Sequence
  Synthetic oligonucleotide
gccgcgggttactacatccccgagattcaactgcaa

SEQ ID NO: 16229 - DNA, 38 bp, Artificial Sequence
  Synthetic oligonucleotide
gccgttctaagtttcacaattcggactagtcatgatga

SEQ ID NO: 16230 - DNA, 38 bp, Artificial Sequence
  Synthetic oligonucleotide
gcctacagaacctggcccgtggaggcactagtttttga

SEQ ID NO: 16231 - DNA, 36 bp, Artificial Sequence
  Synthetic oligonucleotide
gcctgtgccacgttgggccgtcgcaatctgggtaga

SEQ ID NO: 16232 - DNA, 35 bp, Artificial Sequence
  Synthetic oligonucleotide
gcgacaacgatctgtaagattggagctctgctcag

SEQ ID NO: 16233 - DNA, 37 bp, Artificial Sequence
  Synthetic oligonucleotide
gcgactgacgtcgaacggacagattgaatgcgcgcga

SEQ ID NO: 16234 - DNA, 36 bp, Artificial Sequence
  Synthetic oligonucleotide
gcgcacccttgcagcctggaactcccgaaactcaga

SEQ ID NO: 16235 - DNA, 36 bp, Artificial Sequence
  Synthetic oligonucleotide
gcgcttagcacgacataactgccgcggagacttgaa

SEQ ID NO: 16236 - DNA, 36 bp, Artificial Sequence
  Synthetic oligonucleotide
gcgttatagcgcgttggttatgtcttatggagtaga

SEQ ID NO: 16237 - DNA, 35 bp, Artificial Sequence
  Synthetic oligonucleotide
gctataactggaatccttgaggggtcaatgattga

SEQ ID NO: 16238 - DNA, 35 bp, Artificial Sequence
  Synthetic oligonucleotide
gctcaagactatcgttgaagacggggcaatttgtc

SEQ ID NO: 16239 - DNA, 35 bp, Artificial Sequence
  Synthetic oligonucleotide
gctcagctcatgtagagcctgggatctatcggccc

SEQ ID NO: 16240 - DNA, 36 bp, Artificial Sequence
  Synthetic oligonucleotide
gctctgttaggagagatgtctggagactactcagga

SEQ ID NO: 16241 - DNA, 35 bp, Artificial Sequence
  Synthetic oligonucleotide
gctgcactcggttaggtcgcaaactgggaatcctg

SEQ ID NO: 16242 - DNA, 38 bp, Artificial Sequence
  Synthetic oligonucleotide
gctgctcacgttattacgggattccaacattaatatga

SEQ ID NO: 16243 - DNA, 35 bp, Artificial Sequence
  Synthetic oligonucleotide
gctgggaccccacctcgggaatgcaatccgtgcac

SEQ ID NO: 16244 - DNA, 36 bp, Artificial Sequence
  Synthetic oligonucleotide
ggagaaacgatgaaatcgaacgattcgacactacga

SEQ ID NO: 16245 - DNA, 36 bp, Artificial Sequence
  Synthetic oligonucleotide
gggacgctcactgcggttaaatcgacgcgccgcaca

SEQ ID NO: 16246 - DNA, 35 bp, Artificial Sequence
  Synthetic oligonucleotide
gggtcgacgatgatccgtttccaatatggctcatc

SEQ ID NO: 16247 - DNA, 35 bp, Artificial Sequence
  Synthetic oligonucleotide
gggtgtgccaattcggcatccacgatctaacaact

SEQ ID NO: 16248 - DNA, 35 bp, Artificial Sequence
  Synthetic oligonucleotide
ggtaagtaatcggacacggttggaccggagttttg

SEQ ID NO: 16249 - DNA, 38 bp, Artificial Sequence
  Synthetic oligonucleotide
ggtagttacgtggacgaaatgagcttaatgatatatga

SEQ ID NO: 16250 - DNA, 37 bp, Artificial Sequence
  Synthetic oligonucleotide
ggtatcaaaaatttgttccgagaagtgtcgtgcggga

SEQ ID NO: 16251 - DNA, 35 bp, Artificial Sequence
  Synthetic oligonucleotide
ggtcggtacgcccccctgacctgcgatacctgctg

SEQ ID NO: 16252 - DNA, 35 bp, Artificial Sequence
  Synthetic oligonucleotide
ggtctggaaacatgacttcaaggggttgtggcaac

SEQ ID NO: 16253 - DNA, 36 bp, Artificial Sequence
  Synthetic oligonucleotide
ggtggtactgtttcatagtacaaataatattggaga

SEQ ID NO: 16254 - DNA, 35 bp, Artificial Sequence
  Synthetic oligonucleotide
ggttctctccgagcaggagcacggctaatgaagta

SEQ ID NO: 16255 - DNA, 35 bp, Artificial Sequence
  Synthetic oligonucleotide
ggttctgatagatgtaacctgaaatccctgtgact

SEQ ID NO: 16256 - DNA, 37 bp, Artificial Sequence
  Synthetic oligonucleotide
ggttgctgacacgagctttgtaaagctgtataactga

SEQ ID NO: 16257 - DNA, 36 bp, Artificial Sequence
  Synthetic oligonucleotide
gtagtcgtgccgcgggggcaagtatatagctaccta

SEQ ID NO: 16258 - DNA, 36 bp, Artificial Sequence
  Synthetic oligonucleotide
gtcctcacggtggcactcaagttataaggtttcgta

SEQ ID NO: 16259 - DNA, 37 bp, Artificial Sequence
  Synthetic oligonucleotide
gtgagtgagtgatgtttaacgtagtaccaagtcgaga

SEQ ID NO: 16260 - DNA, 37 bp, Artificial Sequence
  Synthetic oligonucleotide
gtggcttcatagtgtggagattgtgaggtcgccatga

SEQ ID NO: 16261 - DNA, 36 bp, Artificial Sequence
  Synthetic oligonucleotide
gtggggcccaagtaaaatgtgcgctaagttacgaga

SEQ ID NO: 16262 - DNA, 35 bp, Artificial Sequence
  Synthetic oligonucleotide
gtggtaaattactcttcgggaggcgattccgcaga

SEQ ID NO: 16263 - DNA, 38 bp, Artificial Sequence
  Synthetic oligonucleotide
gttccaccggtctgggccacgtacgttggaaagtttga

SEQ ID NO: 16264 - DNA, 35 bp, Artificial Sequence
  Synthetic oligonucleotide
gttctgacgtggttcatctaggcgctccaccttag

SEQ ID NO: 16265 - DNA, 37 bp, Artificial Sequence
  Synthetic oligonucleotide
gttggactgacgttgaaaacatctgtaaacgaagtga

SEQ ID NO: 16266 - DNA, 35 bp, Artificial Sequence
  Synthetic oligonucleotide
gttgggcccccttccgtttcgggttctgtaatagt

SEQ ID NO: 16267 - DNA, 37 bp, Artificial Sequence
  Synthetic oligonucleotide
taaagggctagcgacctatttacgagtacgcaaggga

SEQ ID NO: 16268 - DNA, 37 bp, Artificial Sequence
  Synthetic oligonucleotide
taactggcttttgcgtaggccctagtttaagggttga

SEQ ID NO: 16269 - DNA, 36 bp, Artificial Sequence
  Synthetic oligonucleotide
tacgagaagtactgtagataagcctaggtcaagcca

SEQ ID NO: 16270 - DNA, 38 bp, Artificial Sequence
  Synthetic oligonucleotide
tagcatactctcatgtcattccatgtcagtccttgtga

SEQ ID NO: 16271 - DNA, 36 bp, Artificial Sequence
  Synthetic oligonucleotide
tagccctagcgcttgcagtctggtttttcgaactaa

SEQ ID NO: 16272 - DNA, 38 bp, Artificial Sequence
  Synthetic oligonucleotide
tatagcccacgagagatagtttctccggttgtctctga

SEQ ID NO: 16273 - DNA, 37 bp, Artificial Sequence
  Synthetic oligonucleotide
tatcacatttgacacgtgcgtaagtccgccgaaatga

SEQ ID NO: 16274 - DNA, 36 bp, Artificial Sequence
  Synthetic oligonucleotide
tatgagcacagcctctcccgaccttgaattgacgca

SEQ ID NO: 16275 - DNA, 36 bp, Artificial Sequence
  Synthetic oligonucleotide
tcacgaacgcaccgagacgcttaacagacaggtcta

SEQ ID NO: 16276 - DNA, 35 bp, Artificial Sequence
  Synthetic oligonucleotide
tcatcctccaagttatgttggtagagctttagtcc

SEQ ID NO: 16277 - DNA, 36 bp, Artificial Sequence
  Synthetic oligonucleotide
tcatgcgagactcgtaacaagggtgcacgaacaaaa

SEQ ID NO: 16278 - DNA, 35 bp, Artificial Sequence
  Synthetic oligonucleotide
tcatggctaaggccgttcccaaacgtgcattcgcg

SEQ ID NO: 16279 - DNA, 36 bp, Artificial Sequence
  Synthetic oligonucleotide
tccaatttcgcttctcgacaggttaagagaacgtaa

SEQ ID NO: 16280 - DNA, 36 bp, Artificial Sequence
  Synthetic oligonucleotide
tccctacctaaagcgtgcaggaagtctttgtcgcga

SEQ ID NO: 16281 - DNA, 37 bp, Artificial Sequence
  Synthetic oligonucleotide
tcctctcctccaaagttttgtcagcatgcggggacga

SEQ ID NO: 16282 - DNA, 37 bp, Artificial Sequence
  Synthetic oligonucleotide
tcgaatgggaaaactagacttgggatgtagtaacgga

SEQ ID NO: 16283 - DNA, 37 bp, Artificial Sequence
  Synthetic oligonucleotide
tcgtagtctcacccgcaggggaggtttgttggctaga

SEQ ID NO: 16284 - DNA, 35 bp, Artificial Sequence
  Synthetic oligonucleotide
tcgtgaaacagccagtgggccactggccgaacgtc

SEQ ID NO: 16285 - DNA, 35 bp, Artificial Sequence
  Synthetic oligonucleotide
tctaacgtacacaaagcctcgccttcagaagggct

SEQ ID NO: 16286 - DNA, 37 bp, Artificial Sequence
  Synthetic oligonucleotide
tctccgttccaggttggtcttaggagacggttggtga

SEQ ID NO: 16287 - DNA, 38 bp, Artificial Sequence
  Synthetic oligonucleotide
tctcggtgtctactttaggaaattgttaggtccggtga

SEQ ID NO: 16288 - DNA, 37 bp, Artificial Sequence
  Synthetic oligonucleotide
tgaagccagatactagaagtgcctagacagatacgga

SEQ ID NO: 16289 - DNA, 35 bp, Artificial Sequence
  Synthetic oligonucleotide
tgaataacgtatatatggtttatttactatagacc

SEQ ID NO: 16290 - DNA, 35 bp, Artificial Sequence
  Synthetic oligonucleotide
tgaccttgtcataagggcctttgcgtacaaacgtt

SEQ ID NO: 16291 - DNA, 38 bp, Artificial Sequence
  Synthetic oligonucleotide
tgagaaccggggcccggacgtgattatagtaggaatga

SEQ ID NO: 16292 - DNA, 35 bp, Artificial Sequence
  Synthetic oligonucleotide
tgcctgcaccatgactcgagcgaccagttagtgtt

SEQ ID NO: 16293 - DNA, 38 bp, Artificial Sequence
  Synthetic oligonucleotide
tgcgttggaacggagcagagaactttgtctttcgctga

SEQ ID NO: 16294 - DNA, 36 bp, Artificial Sequence
  Synthetic oligonucleotide
tggtaatccttcagtcactaggggtcatggagggaa

SEQ ID NO: 16295 - DNA, 37 bp, Artificial Sequence
  Synthetic oligonucleotide
tgtcacccgggttgtaaacctttagccatcttgtgga

SEQ ID NO: 16296 - DNA, 37 bp, Artificial Sequence
  Synthetic oligonucleotide
tgtgggattaaatagtgatttcgggcaagcaacttga

SEQ ID NO: 16297 - DNA, 35 bp, Artificial Sequence
  Synthetic oligonucleotide
ttaaccggcaagcctagagattgctctgatccgta

SEQ ID NO: 16298 - DNA, 36 bp, Artificial Sequence
  Synthetic oligonucleotide
ttaaccgttcaacgaaatagcgttcagtccgacaca

SEQ ID NO: 16299 - DNA, 36 bp, Artificial Sequence
  Synthetic oligonucleotide
ttaagagagcctgtttttaaatggtcaaagtccgca

SEQ ID NO: 16300 - DNA, 36 bp, Artificial Sequence
  Synthetic oligonucleotide
ttcaagccaaactgcgctacttggcataagaacgta

SEQ ID NO: 16301 - DNA, 36 bp, Artificial Sequence
  Synthetic oligonucleotide
ttccacaccgaagtgggctgccggccgaagatttga

SEQ ID NO: 16302 - DNA, 38 bp, Artificial Sequence
  Synthetic oligonucleotide
ttcgatccggtccccaggatcactccgccgcaaaatga

SEQ ID NO: 16303 - DNA, 35 bp, Artificial Sequence
  Synthetic oligonucleotide
ttcgtacggagggttacatagaatgacatgcgtgt

SEQ ID NO: 16304 - DNA, 36 bp, Artificial Sequence
  Synthetic oligonucleotide
ttgaccgctaagctagagcgatgacgttcgactgca

SEQ ID NO: 16305 - DNA, 35 bp, Artificial Sequence
  Synthetic oligonucleotide
ttgagacggaaaaacgtcgcgactgttggtacctg

SEQ ID NO: 16306 - DNA, 36 bp, Artificial Sequence
  Synthetic oligonucleotide
ttgaggactaggactaggtacacccgccgatgcgga

SEQ ID NO: 16307 - DNA, 37 bp, Artificial Sequence
  Synthetic oligonucleotide
ttgagtttgtgtagggatcgccattaacgtgttcaga

SEQ ID NO: 16308 - DNA, 35 bp, Artificial Sequence
  Synthetic oligonucleotide
ttgatcgttgagcgaggtctcattcccgagtattc

SEQ ID NO: 16309 - DNA, 37 bp, Artificial Sequence
  Synthetic oligonucleotide
ttgccacggaaagtagtagataatgtatacgacttga

SEQ ID NO: 16310 - DNA, 36 bp, Artificial Sequence
  Synthetic oligonucleotide
ttgcttggctttttcgctgtaatcgactgtaaggca

SEQ ID NO: 16311 - DNA, 37 bp, Artificial Sequence
  Synthetic oligonucleotide
ttgtcgaggggcggaccgtactaggtgcacgactaga

SEQ ID NO: 16312 - DNA, 37 bp, Artificial Sequence
  Synthetic oligonucleotide
tttgagggttcagggcctttgagacatttgtgtctga

SEQ ID NO: 16313 - DNA, 38 bp, Artificial Sequence
  Synthetic oligonucleotide
ttagagcaaattcgtcgaatggaacaaatacggaatga

SEQ ID NO: 16314 - DNA, 36 bp, Artificial Sequence
  Synthetic oligonucleotide
ggtagtccacagtgatatggacaactatccccgtga

SEQ ID NO: 16315 - DNA, 36 bp, Artificial Sequence
  Synthetic oligonucleotide
taacgcgctgccaattggtggcccgagctgatacga

SEQ ID NO: 16316 - DNA, 35 bp, Artificial Sequence
  Synthetic oligonucleotide
aaccgctgtcagtccatggaacgggttcatgtccg

SEQ ID NO: 16317 - DNA, 36 bp, Artificial Sequence
  Synthetic oligonucleotide
gcaataagatggagtatatgcctgtgaattgccgta

SEQ ID NO: 16318 - DNA, 36 bp, Artificial Sequence
  Synthetic oligonucleotide
acatgttagggtgtaggcggtaaaattttcctggta

SEQ ID NO: 16319 - DNA, 35 bp, Artificial Sequence
  Synthetic oligonucleotide
agcgcacataggcgatcgcattcgtgtcccacgta

SEQ ID NO: 16320 - DNA, 37 bp, Artificial Sequence
  Synthetic oligonucleotide
agtcggttacgtaactctgctgttcatgagaccacga

SEQ ID NO: 16321 - DNA, 35 bp, Artificial Sequence
  Synthetic oligonucleotide
atgtatgagtcctgcgtggcacctcgctataggct

SEQ ID NO: 16322 - DNA, 36 bp, Artificial Sequence
  Synthetic oligonucleotide
ccagaacgtttcgttgggccttaaaggctcggggta

SEQ ID NO: 16323 - DNA, 36 bp, Artificial Sequence
  Synthetic oligonucleotide
cgtgttccgggcgttgccaggccgcgctccgtctgt

SEQ ID NO: 16324 - DNA, 36 bp, Artificial Sequence
  Synthetic oligonucleotide
gaaacaactgcatcgtttatcggggagacattacga

SEQ ID NO: 16325 - DNA, 38 bp, Artificial Sequence
  Synthetic oligonucleotide
gactcgtgacggaactcctgagccattggctggagtga

SEQ ID NO: 16326 - DNA, 35 bp, Artificial Sequence
  Synthetic oligonucleotide
gagacgcactaggatagatactatgcctcgatcga

SEQ ID NO: 16327 - DNA, 36 bp, Artificial Sequence
  Synthetic oligonucleotide
gctccccctgagtacagaggatcataaaggctgcaa

SEQ ID NO: 16328 - DNA, 37 bp, Artificial Sequence
  Synthetic oligonucleotide
gtaccgggaatctccagatcccgccctctcaagctga

SEQ ID NO: 16329 - DNA, 37 bp, Artificial Sequence
  Synthetic oligonucleotide
gtatagcctttacccgacggggcttaggaccagagga

SEQ ID NO: 16330 - DNA, 37 bp, Artificial Sequence
  Synthetic oligonucleotide
gttacggtcgctgagtgttatattccggccagactga

SEQ ID NO: 16331 - DNA, 38 bp, Artificial Sequence
  Synthetic oligonucleotide
taaggagaccattcctggtgctaattaagctccactga

SEQ ID NO: 16332 - DNA, 35 bp, Artificial Sequence
  Synthetic oligonucleotide
tatccaacgtccagcctaggcattattttgcatta

SEQ ID NO: 16333 - DNA, 35 bp, Artificial Sequence
  Synthetic oligonucleotide
tttatggatccgctgcaggtctcacacccttgttt

SEQ ID NO: 16334 - DNA, 36 bp, Artificial Sequence
  Synthetic oligonucleotide
aacgactgctgatgacgtttcagtccccccccgaaa

SEQ ID NO: 16335 - DNA, 36 bp, Artificial Sequence
  Synthetic oligonucleotide
aacgcgggtactaaggcgtcatcgattagtagcaca

SEQ ID NO: 16336 - DNA, 36 bp, Artificial Sequence
  Synthetic oligonucleotide
aagccatcaggctcagtacggtggagttcgtgcgga

SEQ ID NO: 16337 - DNA, 36 bp, Artificial Sequence
  Synthetic oligonucleotide
acaacaagagacctgtatgtaatgctcatgttgcca

SEQ ID NO: 16338 - DNA, 38 bp, Artificial Sequence
  Synthetic oligonucleotide
actcggtccgtgtttattgcgttagttcaacgttttga

SEQ ID NO: 16339 - DNA, 38 bp, Artificial Sequence
  Synthetic oligonucleotide
agtgcacatgacagtatagaggctgtcggatatgttga

SEQ ID NO: 16340 - DNA, 35 bp, Artificial Sequence
  Synthetic oligonucleotide
atgtcatttccgagcgcggagtgaaatgcgtacga

SEQ ID NO: 16341 - DNA, 35 bp, Artificial Sequence
  Synthetic oligonucleotide
ccagtttcatgggttatgctcatcttagatgtggc

SEQ ID NO: 16342 - DNA, 38 bp, Artificial Sequence
  Synthetic oligonucleotide
gagtagggacgcggggagaaggtacttccatgttatga

SEQ ID NO: 16343 - DNA, 37 bp, Artificial Sequence
  Synthetic oligonucleotide
gagttgtggcacatcgacaggattatccgtcttcaga

SEQ ID NO: 16344 - DNA, 35 bp, Artificial Sequence
  Synthetic oligonucleotide
gccaggctcaggctaaagttaagcaagcccgggta

SEQ ID NO: 16345 - DNA, 36 bp, Artificial Sequence
  Synthetic oligonucleotide
gctgtgacgtaagattagattattcgggtatgccta

SEQ ID NO: 16346 - DNA, 35 bp, Artificial Sequence
  Synthetic oligonucleotide
gctttcatgggaggtttgacttccgtgaagcacag

SEQ ID NO: 16347 - DNA, 35 bp, Artificial Sequence
  Synthetic oligonucleotide
gtaaaagcctaggactctgttaccgttctgggctt

SEQ ID NO: 16348 - DNA, 38 bp, Artificial Sequence
  Synthetic oligonucleotide
gtaagaggtaggagcaacttttaactagtgcctgatga

SEQ ID NO: 16349 - DNA, 38 bp, Artificial Sequence
  Synthetic oligonucleotide
gtctccgggcccggctcgacattcctctggcaagttga

SEQ ID NO: 16350 - DNA, 35 bp, Artificial Sequence
  Synthetic oligonucleotide
gtgttcggacacagccccgcgaaaaagaatattga

SEQ ID NO: 16351 - DNA, 36 bp, Artificial Sequence
  Synthetic oligonucleotide
gttcacgggagagctgatagttagatcggccagtaa

SEQ ID NO: 16352 - DNA, 36 bp, Artificial Sequence
  Synthetic oligonucleotide
tacgcatttacgctttattcgctatgaaatagttga

SEQ ID NO: 16353 - DNA, 35 bp, Artificial Sequence
  Synthetic oligonucleotide
tagcaacccacttcgtaacatgggtcttgaggtgt

SEQ ID NO: 16354 - DNA, 36 bp, Artificial Sequence
  Synthetic oligonucleotide
tagccggcttagctggcgacagcttgtaacgtttga

SEQ ID NO: 16355 - DNA, 35 bp, Artificial Sequence
  Synthetic oligonucleotide
tctagcaaccacgcaagcttccattagacccggtc

SEQ ID NO: 16356 - DNA, 36 bp, Artificial Sequence
  Synthetic oligonucleotide
tctgcaacggtcgcttttgtgaagggtacttgcata

SEQ ID NO: 16357 - DNA, 36 bp, Artificial Sequence
  Synthetic oligonucleotide
tgccggtgctcgaggttccgagaagcggcgtacata

SEQ ID NO: 16358 - DNA, 37 bp, Artificial Sequence
  Synthetic oligonucleotide
tgcgcgggcgtttcggagtaataataattggtcatga

SEQ ID NO: 16359 - DNA, 35 bp, Artificial Sequence
  Synthetic oligonucleotide
tgggtcctgagccggattaaatgaaggtccttgtg

SEQ ID NO: 16360 - DNA, 38 bp, Artificial Sequence
  Synthetic oligonucleotide
tgtactaacaagcagtatgatagtcaatcagtgcatga

SEQ ID NO: 16361 - DNA, 38 bp, Artificial Sequence
  Synthetic oligonucleotide
ttgtatgcagggtggccgtgcttggcattgaatgttga

SEQ ID NO: 16362 - DNA, 38 bp, Artificial Sequence
  Synthetic oligonucleotide
ttgtcccgccaaccaacgtcttcggtgatgaagggtga

SEQ ID NO: 16363 - DNA, 36 bp, Artificial Sequence
  Synthetic oligonucleotide
tttctccatcctatcagtgacatgcattacgtaata

SEQ ID NO: 16364 - DNA, 35 bp, Artificial Sequence
  Synthetic oligonucleotide
taatgcatcaccggacaggccttgttggcgaccgg

SEQ ID NO: 16365 - DNA, 35 bp, Artificial Sequence
  Synthetic oligonucleotide
agcataccgctatcatacccttagagacgacgtag

SEQ ID NO: 16366 - DNA, 36 bp, Artificial Sequence
  Synthetic oligonucleotide
gatctatcaacgggtacaattgactgctaacgctca

SEQ ID NO: 16367 - DNA, 38 bp, Artificial Sequence
  Synthetic oligonucleotide
tgaccaccgtacttgaagcagttaccgggctagcttga

SEQ ID NO: 16368 - DNA, 37 bp, Artificial Sequence
  Synthetic oligonucleotide
aaacgatcacgcaaccgtcattggttacgggcgccga

SEQ ID NO: 16369 - DNA, 35 bp, Artificial Sequence
  Synthetic oligonucleotide
aacagattccacggatcgtgagatcggtactatta

SEQ ID NO: 16370 - DNA, 37 bp, Artificial Sequence
  Synthetic oligonucleotide
aagctgtagatttcactgttttcgcaagatggacgga

SEQ ID NO: 16371 - DNA, 35 bp, Artificial Sequence
  Synthetic oligonucleotide
aaggaacgctagtcattgtctagggttagtattta

SEQ ID NO: 16372 - DNA, 35 bp, Artificial Sequence
  Synthetic oligonucleotide
acaccgatgtatcactcgcttggccgtccaaggtc

SEQ ID NO: 16373 - DNA, 35 bp, Artificial Sequence
  Synthetic oligonucleotide
acaggagttcacagtcctaactaagattcggaaag

SEQ ID NO: 16374 - DNA, 35 bp, Artificial Sequence
  Synthetic oligonucleotide
acattagctcgactacaagtattatacaggctggt

SEQ ID NO: 16375 - DNA, 35 bp, Artificial Sequence
  Synthetic oligonucleotide
acccatggcgtggggcgaggtccgtggcgacctgt

SEQ ID NO: 16376 - DNA, 36 bp, Artificial Sequence
  Synthetic oligonucleotide
acccggacttgagcgagtcataaatgtaggttcata

SEQ ID NO: 16377 - DNA, 38 bp, Artificial Sequence
  Synthetic oligonucleotide
accttgggggtgttgtcatggggctttacgagacttga

SEQ ID NO: 16378 - DNA, 35 bp, Artificial Sequence
  Synthetic oligonucleotide
acgatatctcgacttgcgacccgctaaggcgctag

SEQ ID NO: 16379 - DNA, 36 bp, Artificial Sequence
  Synthetic oligonucleotide
acgcattgtgagatctagtatgggtataggcccata

SEQ ID NO: 16380 - DNA, 37 bp, Artificial Sequence
  Synthetic oligonucleotide
actctgaggtgcgagaatgtcctaataaagggataga

SEQ ID NO: 16381 - DNA, 35 bp, Artificial Sequence
  Synthetic oligonucleotide
acttgtgggtgatgtggtctactggctattaagat

SEQ ID NO: 16382 - DNA, 38 bp, Artificial Sequence
  Synthetic oligonucleotide
agacttgtaggtttatgcagtcctatattcgattttga

SEQ ID NO: 16383 - DNA, 36 bp, Artificial Sequence
  Synthetic oligonucleotide
agagtcgcaacagattctacgtctggcaatgtacta

SEQ ID NO: 16384 - DNA, 38 bp, Artificial Sequence
  Synthetic oligonucleotide
aggaacgacgagataagccaggcggtttgcatcgttga

SEQ ID NO: 16385 - DNA, 38 bp, Artificial Sequence
  Synthetic oligonucleotide
agttagtccggtagacttctataaggtcctggttttga

SEQ ID NO: 16386 - DNA, 36 bp, Artificial Sequence
  Synthetic oligonucleotide
atcccgcttcttgcaggaattgactaagcagtcaaa

SEQ ID NO: 16387 - DNA, 38 bp, Artificial Sequence
  Synthetic oligonucleotide
atggcctgctgggcattacagaattggatgtttcctga

SEQ ID NO: 16388 - DNA, 37 bp, Artificial Sequence
  Synthetic oligonucleotide
attactgcgatgactcccgttgggatctttcacgcga

SEQ ID NO: 16389 - DNA, 35 bp, Artificial Sequence
  Synthetic oligonucleotide
catcgagttatcataacgtgttgcactgtctgttt

SEQ ID NO: 16390 - DNA, 35 bp, Artificial Sequence
  Synthetic oligonucleotide
ccaaacctacgcggctgtacactgcagtcgctgaa

SEQ ID NO: 16391 - DNA, 36 bp, Artificial Sequence
  Synthetic oligonucleotide
cccacggggcaaaagtgacacataaccgtttatcga

SEQ ID NO: 16392 - DNA, 35 bp, Artificial Sequence
  Synthetic oligonucleotide
cccctcacagggaagttctatttacagtcatggat

SEQ ID NO: 16393 - DNA, 35 bp, Artificial Sequence
  Synthetic oligonucleotide
ccctacgtggtcggttctacaaaggttaatagctg

SEQ ID NO: 16394 - DNA, 36 bp, Artificial Sequence
  Synthetic oligonucleotide
cctgacacggtctagtactcaggttggctcatggta

SEQ ID NO: 16395 - DNA, 37 bp, Artificial Sequence
  Synthetic oligonucleotide
cgatccctggagctgccagggagaaagaagtaactga

SEQ ID NO: 16396 - DNA, 35 bp, Artificial Sequence
  Synthetic oligonucleotide
cggtacatttctggctaaagtgcgactcagtttct

SEQ ID NO: 16397 - DNA, 37 bp, Artificial Sequence
  Synthetic oligonucleotide
gaaacctgcaatagatttttcgccgtgcatatggtga

SEQ ID NO: 16398 - DNA, 37 bp, Artificial Sequence
  Synthetic oligonucleotide
gaccccagtcagattagcctctggaaatggaaggaga

SEQ ID NO: 16399 - DNA, 36 bp, Artificial Sequence
  Synthetic oligonucleotide
gacctgatccggtcgcgcacagcggggtaggtgtaa

SEQ ID NO: 16400 - DNA, 36 bp, Artificial Sequence
  Synthetic oligonucleotide
gagagcacatgtatgcgagagaaacgtcaagcggta

SEQ ID NO: 16401 - DNA, 35 bp, Artificial Sequence
  Synthetic oligonucleotide
gagcccaatgtggggcagtcaactactgtatcttt

SEQ ID NO: 16402 - DNA, 36 bp, Artificial Sequence
  Synthetic oligonucleotide
gagcgcacgtagcttgaaggcgccgtaggaacgaaa

SEQ ID NO: 16403 - DNA, 35 bp, Artificial Sequence
  Synthetic oligonucleotide
gagcggagaattcagtacgagcgtgtaacacatgg

SEQ ID NO: 16404 - DNA, 37 bp, Artificial Sequence
  Synthetic oligonucleotide
gaggttcatagcattgtaattagtgaaaggtacggga

SEQ ID NO: 16405 - DNA, 37 bp, Artificial Sequence
  Synthetic oligonucleotide
gattggtagaatgcagaaatgtggacttcgggatcga

SEQ ID NO: 16406 - DNA, 37 bp, Artificial Sequence
  Synthetic oligonucleotide
gcaactctgccgagagtgcatcggtgatggggctcga

SEQ ID NO: 16407 - DNA, 37 bp, Artificial Sequence
  Synthetic oligonucleotide
gcaagagacagtggtacgatctagattgtcggagaga

SEQ ID NO: 16408 - DNA, 38 bp, Artificial Sequence
  Synthetic oligonucleotide
gcatccagcaagatatcatcccttatggacgttactga

SEQ ID NO: 16409 - DNA, 35 bp, Artificial Sequence
  Synthetic oligonucleotide
gccagggcttaggttaaggtggaatatatgcgtat

SEQ ID NO: 16410 - DNA, 38 bp, Artificial Sequence
  Synthetic oligonucleotide
gccgattcggctcttcattgtttcatgatcggacgtga

SEQ ID NO: 16411 - DNA, 37 bp, Artificial Sequence
  Synthetic oligonucleotide
gcctgtataaatgaattcagtgatggtgcagttacga

SEQ ID NO: 16412 - DNA, 36 bp, Artificial Sequence
  Synthetic oligonucleotide
gcgcctcgaacgagctcagaagtcccgccctaagta

SEQ ID NO: 16413 - DNA, 37 bp, Artificial Sequence
  Synthetic oligonucleotide
gcgctatgttgggcgtccccgttccctaccggttaga

SEQ ID NO: 16414 - DNA, 36 bp, Artificial Sequence
  Synthetic oligonucleotide
gctactatgtcgagtcctagtgtcacggcgcacgaa

SEQ ID NO: 16415 - DNA, 36 bp, Artificial Sequence
  Synthetic oligonucleotide
ggaacggaccatgcctataggtaacaatcggtaata

SEQ ID NO: 16416 - DNA, 38 bp, Artificial Sequence
  Synthetic oligonucleotide
ggaccatacctgcgaaggaggtacgactgactccgtga

SEQ ID NO: 16417 - DNA, 35 bp, Artificial Sequence
  Synthetic oligonucleotide
ggccgtggatgacctgcaactactatgacaaccaa

SEQ ID NO: 16418 - DNA, 36 bp, Artificial Sequence
  Synthetic oligonucleotide
gggaagcatattttttccctaggtctcagaatgtca

SEQ ID NO: 16419 - DNA, 37 bp, Artificial Sequence
  Synthetic oligonucleotide
ggtgttccgttggacttaaggaacagttttggtgcga

SEQ ID NO: 16420 - DNA, 36 bp, Artificial Sequence
  Synthetic oligonucleotide
gtacacctgtgggaagtcgatagttgggggacagaa

SEQ ID NO: 16421 - DNA, 37 bp, Artificial Sequence
  Synthetic oligonucleotide
gtacggtctttactagattggaatgccacggggacga

SEQ ID NO: 16422 - DNA, 37 bp, Artificial Sequence
  Synthetic oligonucleotide
gtagcttctctgttacgcacggaaccgcttgggttga

SEQ ID NO: 16423 - DNA, 37 bp, Artificial Sequence
  Synthetic oligonucleotide
gtaggctgacggagggatctccgctgcctgtgtgtga

SEQ ID NO: 16424 - DNA, 35 bp, Artificial Sequence
  Synthetic oligonucleotide
gtctgttttgtagtcccgcgtcctgaagatattat

SEQ ID NO: 16425 - DNA, 36 bp, Artificial Sequence
  Synthetic oligonucleotide
gtgggagaagtttgggacaccagattctctgaggca

SEQ ID NO: 16426 - DNA, 36 bp, Artificial Sequence
  Synthetic oligonucleotide
gtgggttgcttatgtggatgttgtgtttatttcgga

SEQ ID NO: 16427 - DNA, 37 bp, Artificial Sequence
  Synthetic oligonucleotide
gtgtctatgtcgttcgagtacagaacagccttgtaga

SEQ ID NO: 16428 - DNA, 36 bp, Artificial Sequence
  Synthetic oligonucleotide
gttagcttaaggtgcatattttacacctgggtaaca

SEQ ID NO: 16429 - DNA, 35 bp, Artificial Sequence
  Synthetic oligonucleotide
taaagagcgaattctagttgggttattgtaagggc

SEQ ID NO: 16430 - DNA, 37 bp, Artificial Sequence
  Synthetic oligonucleotide
tacacgtgcaggaagtcgtttcgaagagaaggggaga

SEQ ID NO: 16431 - DNA, 38 bp, Artificial Sequence
  Synthetic oligonucleotide
tactctgcgcctgattatatttcgtatggctctagtga

SEQ ID NO: 16432 - DNA, 36 bp, Artificial Sequence
  Synthetic oligonucleotide
tatctgcactgaggaacgtatggtcagccagcgggg

SEQ ID NO: 16433 - DNA, 35 bp, Artificial Sequence
  Synthetic oligonucleotide
tcagggctagaacgactatgttcactaaatatggt

SEQ ID NO: 16434 - DNA, 36 bp, Artificial Sequence
  Synthetic oligonucleotide
tccgcacaataacgttacaatgatgtgtacataaaa

SEQ ID NO: 16435 - DNA, 37 bp, Artificial Sequence
  Synthetic oligonucleotide
tccgggggtggtgtagtcctagaaaatggaatgagga

SEQ ID NO: 16436 - DNA, 36 bp, Artificial Sequence
  Synthetic oligonucleotide
tcgtttaaaagccctgcctgggtggaaatgatagta

SEQ ID NO: 16437 - DNA, 35 bp, Artificial Sequence
  Synthetic oligonucleotide
tctaacgctttaaagatcgggtaaggactctctcg

SEQ ID NO: 16438 - DNA, 35 bp, Artificial Sequence
  Synthetic oligonucleotide
tgaaaactaagacgcttcaaggactcagctctccg

SEQ ID NO: 16439 - DNA, 34 bp, Artificial Sequence
  Synthetic oligonucleotide
tgacccccgagtccaagcagagatgcgtgagtta

SEQ ID NO: 16440 - DNA, 35 bp, Artificial Sequence
  Synthetic oligonucleotide
tgccttagttaggtgtagcgatggggcaaggtctg

SEQ ID NO: 16441 - DNA, 34 bp, Artificial Sequence
  Synthetic oligonucleotide
ttaatggacggtggttgagctgaagggtactggt

SEQ ID NO: 16442 - DNA, 35 bp, Artificial Sequence
  Synthetic oligonucleotide
ttcaggcactctatcgtctggatgaaagcaaatta

SEQ ID NO: 16443 - DNA, 36 bp, Artificial Sequence
  Synthetic oligonucleotide
ttggaggattaaacgttgggttgcttagcgagtgta

SEQ ID NO: 16444 - DNA, 35 bp, Artificial Sequence
  Synthetic oligonucleotide
tttgcggagtggatagctcacccaaatgtggaccg

SEQ ID NO: 16445 - DNA, 37 bp, Artificial Sequence
  Synthetic oligonucleotide
gagcgactgcaagcttcttgactgttcgtataaagga

SEQ ID NO: 16446 - DNA, 37 bp, Artificial Sequence
  Synthetic oligonucleotide
ggacccaggaaaggcctgcagtttgtcgaacacggga

SEQ ID NO: 16447 - DNA, 36 bp, Artificial Sequence
  Synthetic oligonucleotide
acatcagtacgttatttcgatgcgtacctgtccgaa

SEQ ID NO: 16448 - DNA, 36 bp, Artificial Sequence
  Synthetic oligonucleotide
attaaatccatggacatcgtatcccgtgttgggata

SEQ ID NO: 16449 - DNA, 37 bp, Artificial Sequence
  Synthetic oligonucleotide
ggcgtaagcctgatgggtacgccgtgccgccttaaga

SEQ ID NO: 16450 - DNA, 37 bp, Artificial Sequence
  Synthetic oligonucleotide
taccacggccagaaggaggcgatggtcacttactgga

SEQ ID NO: 16451 - DNA, 38 bp, Artificial Sequence
  Synthetic oligonucleotide
agggaatggatatatgcgggttgcctcgcaaacggtga

SEQ ID NO: 16452 - DNA, 36 bp, Artificial Sequence
  Synthetic oligonucleotide
tatctctgcgagaaccgtctgaccaactaggctgga

SEQ ID NO: 16453 - DNA, 38 bp, Artificial Sequence
  Synthetic oligonucleotide
gaccacgtgcgtagggtacatactgtgcactgctttga

SEQ ID NO: 16454 - DNA, 35 bp, Artificial Sequence
  Synthetic oligonucleotide
tttggacaatgaggacgataagtggttggtcgcga

SEQ ID NO: 16455 - DNA, 35 bp, Artificial Sequence
  Synthetic oligonucleotide
aatcgggaggagttcaccgaacgtaataactttgt

SEQ ID NO: 16456 - DNA, 36 bp, Artificial Sequence
  Synthetic oligonucleotide
atagcacagtactgtagttctttgccaaagggatga

SEQ ID NO: 16457 - DNA, 35 bp, Artificial Sequence
  Synthetic oligonucleotide
attaaccgtacagtgggggtatccggtaggttagc

SEQ ID NO: 16458 - DNA, 36 bp, Artificial Sequence
  Synthetic oligonucleotide
gacgtgaccttgatgttcttaatcgcttacctcata

SEQ ID NO: 16459 - DNA, 36 bp, Artificial Sequence
  Synthetic oligonucleotide
gtcagcctggcgaccgattcaaaattcagggttgca

SEQ ID NO: 16460 - DNA, 36 bp, Artificial Sequence
  Synthetic oligonucleotide
gtgatctcaacacgattcgcttaggctccgtctaaa

SEQ ID NO: 16461 - DNA, 38 bp, Artificial Sequence
  Synthetic oligonucleotide
taacagtgaaacggaggaaacacgtactggtagtgtga

SEQ ID NO: 16462 - DNA, 35 bp, Artificial Sequence
  Synthetic oligonucleotide
tatctagtagtcaggagggcattaggttcctctat

SEQ ID NO: 16463 - DNA, 37 bp, Artificial Sequence
  Synthetic oligonucleotide
tcggtggatgacaattgcgataaccaaagtcgccgga

SEQ ID NO: 16464 - DNA, 35 bp, Artificial Sequence
  Synthetic oligonucleotide
tctcccgagcgttataacggtgaagcaagtgagta

SEQ ID NO: 16465 - DNA, 36 bp, Artificial Sequence
  Synthetic oligonucleotide
ttgcacggagaaccttgcgtgtcaagtgttaggcta

SEQ ID NO: 16466 - DNA, 35 bp, Artificial Sequence
  Synthetic oligonucleotide
aacggtaaataggtcccacctaagccgtgcgtgag

SEQ ID NO: 16467 - DNA, 36 bp, Artificial Sequence
  Synthetic oligonucleotide
aagtgccgtcctacgtacgtgtgggtaaaagtgcga

SEQ ID NO: 16468 - DNA, 35 bp, Artificial Sequence
  Synthetic oligonucleotide
acgtccgtcatgcagaccacaccggcccaacggga

SEQ ID NO: 16469 - DNA, 37 bp, Artificial Sequence
  Synthetic oligonucleotide
aaaaatcgaataggcatgcatgattctcatggggcga

SEQ ID NO: 16470 - DNA, 36 bp, Artificial Sequence
  Synthetic oligonucleotide
aaactatactcatgcggaactttcttggacttggaa

SEQ ID NO: 16471 - DNA, 37 bp, Artificial Sequence
  Synthetic oligonucleotide
aacactagccttgagattggggtgttaagcgtgctga

SEQ ID NO: 16472 - DNA, 37 bp, Artificial Sequence
  Synthetic oligonucleotide
aagaccacggggtcttcccccctagttgcatgtgtga

SEQ ID NO: 16473 - DNA, 36 bp, Artificial Sequence
  Synthetic oligonucleotide
aagacgcatagcctccttactctactgtatagacta

SEQ ID NO: 16474 - DNA, 36 bp, Artificial Sequence
  Synthetic oligonucleotide
aaggggggttgatatcatgctaattagtctggagca

SEQ ID NO: 16475 - DNA, 36 bp, Artificial Sequence
  Synthetic oligonucleotide
aataggaagagcattagcgcggctgatggaatttaa

SEQ ID NO: 16476 - DNA, 37 bp, Artificial Sequence
  Synthetic oligonucleotide
acccggaacggaactatttgcgatggtctgaaggaga

SEQ ID NO: 16477 - DNA, 38 bp, Artificial Sequence
  Synthetic oligonucleotide
acgacggagctgttgtgagctgaaactaatggtgttga

SEQ ID NO: 16478 - DNA, 36 bp, Artificial Sequence
  Synthetic oligonucleotide
acgactaggggaagtgtactcggaccagcaccaata

SEQ ID NO: 16479 - DNA, 38 bp, Artificial Sequence
  Synthetic oligonucleotide
actgccactggtcatcgagaccccctgtgagtttttga

SEQ ID NO: 16480 - DNA, 36 bp, Artificial Sequence
  Synthetic oligonucleotide
agatgcgtgccttaggagtaggcattgtgtttctga

SEQ ID NO: 16481 - DNA, 37 bp, Artificial Sequence
  Synthetic oligonucleotide
agcagataatttgtgatccagcgacgttttagctaga

SEQ ID NO: 16482 - DNA, 36 bp, Artificial Sequence
  Synthetic oligonucleotide
agcatagcaaggtataaccactactgcgtgggacta

SEQ ID NO: 16483 - DNA, 35 bp, Artificial Sequence
  Synthetic oligonucleotide
agtttgacaaggtgtacccgatactccctcaggga

SEQ ID NO: 16484 - DNA, 38 bp, Artificial Sequence
  Synthetic oligonucleotide
attgcaaggaattggtatgggtcataagtgggcgttga

SEQ ID NO: 16485 - DNA, 35 bp, Artificial Sequence
  Synthetic oligonucleotide
attgcgtgctagaacgtacgggaagatatgtagga

SEQ ID NO: 16486 - DNA, 35 bp, Artificial Sequence
  Synthetic oligonucleotide
ccaaactggtttcaaatcgatcggtggatgtgttg

SEQ ID NO: 16487 - DNA, 35 bp, Artificial Sequence
  Synthetic oligonucleotide
cttgctagtatggtccctgtgtaggaatagacagg

SEQ ID NO: 16488 - DNA, 38 bp, Artificial Sequence
  Synthetic oligonucleotide
gacatacatgccacggagtatcacgtaggtgtatctga

SEQ ID NO: 16489 - DNA, 37 bp, Artificial Sequence
  Synthetic oligonucleotide
gacgaagtcatcgaatgtggcactgttagcatgtaga

SEQ ID NO: 16490 - DNA, 36 bp, Artificial Sequence
  Synthetic oligonucleotide
gatcgggcactggagttaatggtgacgcaccagtta

SEQ ID NO: 16491 - DNA, 38 bp, Artificial Sequence
  Synthetic oligonucleotide
gattgggtggcttgacagcaattaagagcatcaattga

SEQ ID NO: 16492 - DNA, 35 bp, Artificial Sequence
  Synthetic oligonucleotide
gcaacatatttgcgcaagtaactgtatcaatgtga

SEQ ID NO: 16493 - DNA, 37 bp, Artificial Sequence
  Synthetic oligonucleotide
gcatggggtagagtgaaaatcagcgcccatgccgtga

SEQ ID NO: 16494 - DNA, 36 bp, Artificial Sequence
  Synthetic oligonucleotide
gccgtggtatcaccctagccccacacatgcacagga

SEQ ID NO: 16495 - DNA, 37 bp, Artificial Sequence
  Synthetic oligonucleotide
ggggatgggcgcgaatgccacaaagcgtgtcagggga

SEQ ID NO: 16496 - DNA, 33 bp, Artificial Sequence
  Synthetic oligonucleotide
ggtcacagcgggacgggtcgcctcattgcaccg

SEQ ID NO: 16497 - DNA, 37 bp, Artificial Sequence
  Synthetic oligonucleotide
gtagcaccatgggaattattggccagacgtgactaga

SEQ ID NO: 16498 - DNA, 36 bp, Artificial Sequence
  Synthetic oligonucleotide
gtcaaactctgagaaagtatcaggtttttaaacgga

SEQ ID NO: 16499 - DNA, 38 bp, Artificial Sequence
  Synthetic oligonucleotide
gtcaggatacatgccactaactttcagcacggatatga

SEQ ID NO: 16500 - DNA, 36 bp, Artificial Sequence
  Synthetic oligonucleotide
gtccgcccacctcgtgagcttgaagtgtttggggaa

SEQ ID NO: 16501 - DNA, 37 bp, Artificial Sequence
  Synthetic oligonucleotide
tataagtccagcacttacgatagggaggaggtaggga

SEQ ID NO: 16502 - DNA, 36 bp, Artificial Sequence
  Synthetic oligonucleotide
tatcgtactcaacgttggaagaagtggtgtagtgga

SEQ ID NO: 16503 - DNA, 35 bp, Artificial Sequence
  Synthetic oligonucleotide
tcctcgtaacaacgggtccgaacgagttaaaacag

SEQ ID NO: 16504 - DNA, 38 bp, Artificial Sequence
  Synthetic oligonucleotide
tgaaaaggcgcaggcaaaatcgggagagggttccttga

SEQ ID NO: 16505 - DNA, 38 bp, Artificial Sequence
  Synthetic oligonucleotide
tgattcggatttgacccaaacgattgtccgtcgtctga

SEQ ID NO: 16506 - DNA, 37 bp, Artificial Sequence
  Synthetic oligonucleotide
ttagtcatgggagctattgctatatgagagagtgcga

SEQ ID NO: 16507 - DNA, 38 bp, Artificial Sequence
  Synthetic oligonucleotide
ttcgcgatactgccacttagtaaacaacataacgctga

SEQ ID NO: 16508 - DNA, 36 bp, Artificial Sequence
  Synthetic oligonucleotide
accatgcaatgatagtctcttaccggacgtagagca

SEQ ID NO: 16509 - DNA, 37 bp, Artificial Sequence
  Synthetic oligonucleotide
ttccacgccacggaggggtggtattgccttccaagga

SEQ ID NO: 16510 - DNA, 38 bp, Artificial Sequence
  Synthetic oligonucleotide
ttgggcctctagcgaaagcggtcgacaagtaaggctga

SEQ ID NO: 16511 - DNA, 36 bp, Artificial Sequence
  Synthetic oligonucleotide
aacagcgcaaatgccggtcatgtgtaccgtctcgta

SEQ ID NO: 16512 - DNA, 36 bp, Artificial Sequence
  Synthetic oligonucleotide
aaccccccttcgagatgtggaatcttgtgcgagaaa

SEQ ID NO: 16513 - DNA, 37 bp, Artificial Sequence
  Synthetic oligonucleotide
aaccgagtcagtctgccccacatatacggaaaggcga

SEQ ID NO: 16514 - DNA, 38 bp, Artificial Sequence
  Synthetic oligonucleotide
aacggatccagcaaggagtagtcgccgcttgtccgtga

SEQ ID NO: 16515 - DNA, 36 bp, Artificial Sequence
  Synthetic oligonucleotide
aacggttccactgatgttgcgttcatgggggtttca

SEQ ID NO: 16516 - DNA, 38 bp, Artificial Sequence
  Synthetic oligonucleotide
aactccggcttatggacggccacgtcatggggtactga

SEQ ID NO: 16517 - DNA, 38 bp, Artificial Sequence
  Synthetic oligonucleotide
aaggctggctatgcctcattgcagggcacaacaactga

SEQ ID NO: 16518 - DNA, 35 bp, Artificial Sequence
  Synthetic oligonucleotide
aataacgtaccctgtcaggggcgataaactttgtc

SEQ ID NO: 16519 - DNA, 38 bp, Artificial Sequence
  Synthetic oligonucleotide
acggtggtcgctggactgactagccgtataattgttga

SEQ ID NO: 16520 - DNA, 37 bp, Artificial Sequence
  Synthetic oligonucleotide
acggtttcaaaagacgtcgatcagtctggaatgcgga

SEQ ID NO: 16521 - DNA, 36 bp, Artificial Sequence
  Synthetic oligonucleotide
agaccgcagctgggcttcagacgcggtctatgggta

SEQ ID NO: 16522 - DNA, 37 bp, Artificial Sequence
  Synthetic oligonucleotide
agctcgctagaaaatcccggtcttagaactagccgga

SEQ ID NO: 16523 - DNA, 36 bp, Artificial Sequence
  Synthetic oligonucleotide
atagggccggcctgaagataaagcgattgctgcgca

SEQ ID NO: 16524 - DNA, 36 bp, Artificial Sequence
  Synthetic oligonucleotide
atatgggtgatggctctctagtagatcccagcataa

SEQ ID NO: 16525 - DNA, 36 bp, Artificial Sequence
  Synthetic oligonucleotide
atcgggtctcattgcctgaatttacccgtattcata

SEQ ID NO: 16526 - DNA, 36 bp, Artificial Sequence
  Synthetic oligonucleotide
attacggggtgcggagcaatgccgatactgactcca

SEQ ID NO: 16527 - DNA, 38 bp, Artificial Sequence
  Synthetic oligonucleotide
atttcccccgcgacgagagccaggatgtgggcgtttga

SEQ ID NO: 16528 - DNA, 37 bp, Artificial Sequence
  Synthetic oligonucleotide
ccacgttaggcggtttcggctatatattggtggtaga

SEQ ID NO: 16529 - DNA, 38 bp, Artificial Sequence
  Synthetic oligonucleotide
gacaacaagaacgatgtaaagcgctcgaacatgcttga

SEQ ID NO: 16530 - DNA, 35 bp, Artificial Sequence
  Synthetic oligonucleotide
gagcaagcccgggtgcagaacatcctgtagggata

SEQ ID NO: 16531 - DNA, 38 bp, Artificial Sequence
  Synthetic oligonucleotide
gagcaaggaacctgttatgggagcgaagtctacactga

SEQ ID NO: 16532 - DNA, 36 bp, Artificial Sequence
  Synthetic oligonucleotide
gagtcgtgccttaagccgacaggctcatccgtcgta

SEQ ID NO: 16533 - DNA, 36 bp, Artificial Sequence
  Synthetic oligonucleotide
gagtctgggctaccggatcggtcgctgtaaaaaaaa

SEQ ID NO: 16534 - DNA, 37 bp, Artificial Sequence
  Synthetic oligonucleotide
gagttgcgtactgcttgggcaagtatgattctagcga

SEQ ID NO: 16535 - DNA, 37 bp, Artificial Sequence
  Synthetic oligonucleotide
gatacgaagagtcacgcgccccccggctaggttctga

SEQ ID NO: 16536 - DNA, 37 bp, Artificial Sequence
  Synthetic oligonucleotide
gccaggtaaaattggaacgtggggccacattccggga

SEQ ID NO: 16537 - DNA, 38 bp, Artificial Sequence
  Synthetic oligonucleotide
gccgccgacagttacgttgacatggtagacgtgcttga

SEQ ID NO: 16538 - DNA, 36 bp, Artificial Sequence
  Synthetic oligonucleotide
gccttacctcccagaatgtatatgaagattagacca

SEQ ID NO: 16539 - DNA, 37 bp, Artificial Sequence
  Synthetic oligonucleotide
gcgcctacacgggcaaatggatggtgcactatacgga

SEQ ID NO: 16540 - DNA, 38 bp, Artificial Sequence
  Synthetic oligonucleotide
ggactacagaaagtggtcggtaccagagtgagaactga

SEQ ID NO: 16541 - DNA, 35 bp, Artificial Sequence
  Synthetic oligonucleotide
ggagttgggaaatcgaccttaacggactggccggc

SEQ ID NO: 16542 - DNA, 34 bp, Artificial Sequence
  Synthetic oligonucleotide
ggtgggcccgcacggacactgtcactgagctgaa

SEQ ID NO: 16543 - DNA, 35 bp, Artificial Sequence
  Synthetic oligonucleotide
ggtttcgatcctgcacgccatgaaggagtgcttac

SEQ ID NO: 16544 - DNA, 36 bp, Artificial Sequence
  Synthetic oligonucleotide
gtagttccgggggttagatttgttcacgccgtgcaa

SEQ ID NO: 16545 - DNA, 38 bp, Artificial Sequence
  Synthetic oligonucleotide
gtatgggccttcggagaagcaacaagtacggtttatga

SEQ ID NO: 16546 - DNA, 36 bp, Artificial Sequence
  Synthetic oligonucleotide
gtcctgtacttcagataacataggattggtaccgga

SEQ ID NO: 16547 - DNA, 37 bp, Artificial Sequence
  Synthetic oligonucleotide
gtgggagaggagttgggatctcacttatggtttttga

SEQ ID NO: 16548 - DNA, 38 bp, Artificial Sequence
  Synthetic oligonucleotide
gtgtagttaagggcgaatcgatatcgtctcgttggtga

SEQ ID NO: 16549 - DNA, 38 bp, Artificial Sequence
  Synthetic oligonucleotide
gtgtgtgcgatcgtagcactccactgaaacataggtga

SEQ ID NO: 16550 - DNA, 35 bp, Artificial Sequence
  Synthetic oligonucleotide
taacctgaggatgcagttatggggtaaaacgcgac

SEQ ID NO: 16551 - DNA, 37 bp, Artificial Sequence
  Synthetic oligonucleotide
taagatgacttgcgggatgagtatacgaaccgtacga

SEQ ID NO: 16552 - DNA, 38 bp, Artificial Sequence
  Synthetic oligonucleotide
tagagtgggagcatggtgaaccgtctcacaatgtatga

SEQ ID NO: 16553 - DNA, 38 bp, Artificial Sequence
  Synthetic oligonucleotide
tagccgttccattgttttaggattccctcccactctga

SEQ ID NO: 16554 - DNA, 36 bp, Artificial Sequence
  Synthetic oligonucleotide
tatcgaactgtgcatcaccgttcagcaagggcgaaa

SEQ ID NO: 16555 - DNA, 35 bp, Artificial Sequence
  Synthetic oligonucleotide
tatgtgggtcgaccggcatacgctagttaggaacg

SEQ ID NO: 16556 - DNA, 35 bp, Artificial Sequence
  Synthetic oligonucleotide
tccaccatgagatggctacacaggaccgttaaaag

SEQ ID NO: 16557 - DNA, 35 bp, Artificial Sequence
  Synthetic oligonucleotide
tccagggctagcacgtctccatgttaagtagtaga

SEQ ID NO: 16558 - DNA, 35 bp, Artificial Sequence
  Synthetic oligonucleotide
tcgaaacactcaccggtttattgtaacgcttaaag

SEQ ID NO: 16559 - DNA, 38 bp, Artificial Sequence
  Synthetic oligonucleotide
tcgaggtagaggattgggagcgaacgactgagacttga

SEQ ID NO: 16560 - DNA, 35 bp, Artificial Sequence
  Synthetic oligonucleotide
tcttgcgaactggcaacttatagcgcttttcatct

SEQ ID NO: 16561 - DNA, 37 bp, Artificial Sequence
  Synthetic oligonucleotide
tgaggttcccaccgaccgtgtacagttgcgggtctga

SEQ ID NO: 16562 - DNA, 36 bp, Artificial Sequence
  Synthetic oligonucleotide
tgtctcgtctcggagcgtgttagtagatatcgctta

SEQ ID NO: 16563 - DNA, 35 bp, Artificial Sequence
  Synthetic oligonucleotide
ttggaaacgagcacgaactaaaatcggtcgtttga

SEQ ID NO: 16564 - DNA, 36 bp, Artificial Sequence
  Synthetic oligonucleotide
ttgggggtcacgatggtctacgcacaccaaatggta

SEQ ID NO: 16565 - DNA, 35 bp, Artificial Sequence
  Synthetic oligonucleotide
ttttgtactggcattgagcggctacgattattgag

SEQ ID NO: 16566 - DNA, 35 bp, Artificial Sequence
  Synthetic oligonucleotide
ttcggacctgctattgtttccctccactaaacttg

SEQ ID NO: 16567 - DNA, 38 bp, Artificial Sequence
  Synthetic oligonucleotide
accgtaaagttggtgctgtccggtcgtgaatagcgtga

SEQ ID NO: 16568 - DNA, 37 bp, Artificial Sequence
  Synthetic oligonucleotide
acgaacctggtcctgaacgtcgcattcggtggggaga

SEQ ID NO: 16569 - DNA, 37 bp, Artificial Sequence
  Synthetic oligonucleotide
agaacaacgctatttgtttgagggaaggctataatga

SEQ ID NO: 16570 - DNA, 38 bp, Artificial Sequence
  Synthetic oligonucleotide
agtgaccgtacttatgactccgtgcacagaattcatga

SEQ ID NO: 16571 - DNA, 37 bp, Artificial Sequence
  Synthetic oligonucleotide
gagtccatactgagggatacagtgagtgtggtaacga

SEQ ID NO: 16572 - DNA, 35 bp, Artificial Sequence
  Synthetic oligonucleotide
gcaggtacgctctgcggtgacgagccaggacgata

SEQ ID NO: 16573 - DNA, 36 bp, Artificial Sequence
  Synthetic oligonucleotide
gcgcgaactacttaggagaatgcgtcgcgctaggta

SEQ ID NO: 16574 - DNA, 38 bp, Artificial Sequence
  Synthetic oligonucleotide
gtcaatccgcgcacatgctaaaccaacctcgctggtga

SEQ ID NO: 16575 - DNA, 36 bp, Artificial Sequence
  Synthetic oligonucleotide
gtcctatatcgacaatgtgcgtgtgcacgcttacga

SEQ ID NO: 16576 - DNA, 37 bp, Artificial Sequence
  Synthetic oligonucleotide
taaatgaatagtacatgaaccgcgccctttctggaga

SEQ ID NO: 16577 - DNA, 37 bp, Artificial Sequence
  Synthetic oligonucleotide
taggttccagtacgtttactgcccctgcgaggaggga

SEQ ID NO: 16578 - DNA, 38 bp, Artificial Sequence
  Synthetic oligonucleotide
ttaaaatgactgcggaacgggtctagttatacagctga

SEQ ID NO: 16579 - DNA, 38 bp, Artificial Sequence
  Synthetic oligonucleotide
atcaccgaactagtcggtcaggctggctatgatcatga

SEQ ID NO: 16580 - DNA, 35 bp, Artificial Sequence
  Synthetic oligonucleotide
gccaagggggtactggggttacaatgaatggccca

SEQ ID NO: 16581 - DNA, 38 bp, Artificial Sequence
  Synthetic oligonucleotide
gtgactcataactcagaattgggtaatggcatccatga

SEQ ID NO: 16582 - DNA, 35 bp, Artificial Sequence
  Synthetic oligonucleotide
gactggacgacatgcatatttggaacagaccgttg

SEQ ID NO: 16583 - DNA, 35 bp, Artificial Sequence
  Synthetic oligonucleotide
gtcgtctgacgaccagacccgaccaacgtgagctc

SEQ ID NO: 16584 - DNA, 36 bp, Artificial Sequence
  Synthetic oligonucleotide
tacatcttgcatgtatcgggagtgggttatctgcta

SEQ ID NO: 16585 - DNA, 37 bp, Artificial Sequence
  Synthetic oligonucleotide
tctactcagctgcaggggggattagcagttcttttga

SEQ ID NO: 16586 - DNA, 35 bp, Artificial Sequence
  Synthetic oligonucleotide
aactgcgggtatgacctgtacagcgacaaccggtc

SEQ ID NO: 16587 - DNA, 37 bp, Artificial Sequence
  Synthetic oligonucleotide
acgcataccaggtgtaggtaattttgacgacttgtga

SEQ ID NO: 16588 - DNA, 37 bp, Artificial Sequence
  Synthetic oligonucleotide
acgccatctaagcaagaggcacacagctagctgccga

SEQ ID NO: 16589 - DNA, 36 bp, Artificial Sequence
  Synthetic oligonucleotide
acttggcgcaatttagagaatagcgatatgatcaca

SEQ ID NO: 16590 - DNA, 35 bp, Artificial Sequence
  Synthetic oligonucleotide
atgacctagtaagtggatcatcgagtgtatcctct

SEQ ID NO: 16591 - DNA, 37 bp, Artificial Sequence
  Synthetic oligonucleotide
attgaatacagtcatactaagtgtaacacgacgccga

SEQ ID NO: 16592 - DNA, 36 bp, Artificial Sequence
  Synthetic oligonucleotide
gacctacttcgacggtgcatcaggattgatagggga

SEQ ID NO: 16593 - DNA, 37 bp, Artificial Sequence
  Synthetic oligonucleotide
gacttatgtactaatcagcgacacgtacttgcatgga

SEQ ID NO: 16594 - DNA, 35 bp, Artificial Sequence
  Synthetic oligonucleotide
gatacgcagcatgccgtagataaatgtagcagaca

SEQ ID NO: 16595 - DNA, 35 bp, Artificial Sequence
  Synthetic oligonucleotide
gcaaagtcggggtaaccgtgcggggcgtggttgct

SEQ ID NO: 16596 - DNA, 36 bp, Artificial Sequence
  Synthetic oligonucleotide
gccatacgtactcgtctgtgcgtgccattaaagtca

SEQ ID NO: 16597 - DNA, 36 bp, Artificial Sequence
  Synthetic oligonucleotide
gcctattcggtactgcttaggagtgctgtgttataa

SEQ ID NO: 16598 - DNA, 35 bp, Artificial Sequence
  Synthetic oligonucleotide
gtccaacgatacggctaggactacagggctcgacc

SEQ ID NO: 16599 - DNA, 38 bp, Artificial Sequence
  Synthetic oligonucleotide
gtccagggactaaaggagcgcgtcatggaaccttttga

SEQ ID NO: 16600 - DNA, 36 bp, Artificial Sequence
  Synthetic oligonucleotide
gtggggacgaaggatttgaccaatcctctgttggaa

SEQ ID NO: 16601 - DNA, 35 bp, Artificial Sequence
  Synthetic oligonucleotide
taattaaagcaccgtgcaattagcgtaaattggtt

SEQ ID NO: 16602 - DNA, 37 bp, Artificial Sequence
  Synthetic oligonucleotide
tccgactggccaaatgagcaacatatatggggggaga

SEQ ID NO: 16603 - DNA, 36 bp, Artificial Sequence
  Synthetic oligonucleotide
tctttacacaccaatttagttgtgtacaagaaccta

SEQ ID NO: 16604 - DNA, 37 bp, Artificial Sequence
  Synthetic oligonucleotide
tgacacaccgtcgtcgtcaccctgcaacttgctggga

SEQ ID NO: 16605 - DNA, 36 bp, Artificial Sequence
  Synthetic oligonucleotide
tgagtaacggaagatgttaccgagcgccagttgcca

SEQ ID NO: 16606 - DNA, 37 bp, Artificial Sequence
  Synthetic oligonucleotide
tgggttcgaggcactcaatgcgaaccgtgattccaga

SEQ ID NO: 16607 - DNA, 35 bp, Artificial Sequence
  Synthetic oligonucleotide
ttcttccttgtgtaccgtccaacggactggtagtg

SEQ ID NO: 16608 - DNA, 38 bp, Artificial Sequence
  Synthetic oligonucleotide
ttttgggtctaatgatttgtatagtgtgcagtctgtga

SEQ ID NO: 16609 - DNA, 35 bp, Artificial Sequence
  Synthetic oligonucleotide
gattgccaagattgtgatggtaggtgagcattttg

SEQ ID NO: 16610 - DNA, 38 bp, Artificial Sequence
  Synthetic oligonucleotide
tgtgatgcgacacgtacgtgcgccatgggttgccatga

SEQ ID NO: 16611 - DNA, 37 bp, Artificial Sequence
  Synthetic oligonucleotide
agcacggaggggggatatcaggtatgggatggtacga

SEQ ID NO: 16612 - DNA, 35 bp, Artificial Sequence
  Synthetic oligonucleotide
gtgccacggcgcttgttgtgctatcggttcccacc

SEQ ID NO: 16613 - DNA, 37 bp, Artificial Sequence
  Synthetic oligonucleotide
aacggatacacaaccgacggctgaagttggatacgga

SEQ ID NO: 16614 - DNA, 35 bp, Artificial Sequence
  Synthetic oligonucleotide
aatcgcgagtaccgtagaggaacgtactagccatc

SEQ ID NO: 16615 - DNA, 35 bp, Artificial Sequence
  Synthetic oligonucleotide
agaagacgcactgagggtcatggggatgattgatt

SEQ ID NO: 16616 - DNA, 36 bp, Artificial Sequence
  Synthetic oligonucleotide
agacggtgaattatccggaccaagatttatgtctaa

SEQ ID NO: 16617 - DNA, 35 bp, Artificial Sequence
  Synthetic oligonucleotide
agtcactatgatcagtgggggggtttggcgtctcg

SEQ ID NO: 16618 - DNA, 37 bp, Artificial Sequence
  Synthetic oligonucleotide
atggattacgacttgaagtcatctggtcacattatga

SEQ ID NO: 16619 - DNA, 35 bp, Artificial Sequence
  Synthetic oligonucleotide
attgtacgtacgcatgtcgcaagtggtacaacgga

SEQ ID NO: 16620 - DNA, 35 bp, Artificial Sequence
  Synthetic oligonucleotide
caacgtacccgctctgtccagtttcgtttatactt

SEQ ID NO: 16621 - DNA, 36 bp, Artificial Sequence
  Synthetic oligonucleotide
tccgcgtaaaggtgatacggcgtctagcctattaga

SEQ ID NO: 16622 - DNA, 35 bp, Artificial Sequence
  Synthetic oligonucleotide
ttctgagtcgcctcagttgtgtgtggtttatcttc

SEQ ID NO: 16623 - DNA, 35 bp, Artificial Sequence
  Synthetic oligonucleotide
agaagggacgcagttagctcagctattataaaggg

SEQ ID NO: 16624 - DNA, 37 bp, Artificial Sequence
  Synthetic oligonucleotide
ggattgctttatcgcgtgggaactagactgagggcga

SEQ ID NO: 16625 - DNA, 36 bp, Artificial Sequence
  Synthetic oligonucleotide
aagaccgggcgtctgggaaaaggacgatcggcccca

SEQ ID NO: 16626 - DNA, 38 bp, Artificial Sequence
  Synthetic oligonucleotide
aataaacaagcgcacgacgggacgttcttatagagtga

SEQ ID NO: 16627 - DNA, 36 bp, Artificial Sequence
  Synthetic oligonucleotide
aatgtgagcgatgtgctcaggccaaaagctggcgga

SEQ ID NO: 16628 - DNA, 36 bp, Artificial Sequence
  Synthetic oligonucleotide
acaaagtcgtggaacgccggggttctatggcccgga

SEQ ID NO: 16629 - DNA, 38 bp, Artificial Sequence
  Synthetic oligonucleotide
acaggtaggacggttacaaaagtttgttccgctgctga

SEQ ID NO: 16630 - DNA, 36 bp, Artificial Sequence
  Synthetic oligonucleotide
accgtttcgatgtcgattgtatggagtgtcgctata

SEQ ID NO: 16631 - DNA, 37 bp, Artificial Sequence
  Synthetic oligonucleotide
acgcgaaactaatccgtcagtgttcgtaaacgcgaga

SEQ ID NO: 16632 - DNA, 35 bp, Artificial Sequence
  Synthetic oligonucleotide
acgtatcggtgtatctcgtcataattcgcaagcca

SEQ ID NO: 16633 - DNA, 37 bp, Artificial Sequence
  Synthetic oligonucleotide
agacccgtgaccctcgaccgagcctcctctctgagga

SEQ ID NO: 16634 - DNA, 36 bp, Artificial Sequence
  Synthetic oligonucleotide
agatagaggccctaggcgtacgaagttttcgggaca

SEQ ID NO: 16635 - DNA, 37 bp, Artificial Sequence
  Synthetic oligonucleotide
agtcctgcacatatacgtagtactgccgagtaattga

SEQ ID NO: 16636 - DNA, 37 bp, Artificial Sequence
  Synthetic oligonucleotide
agtcgactcaatcgtggttagctatgttggactccga

SEQ ID NO: 16637 - DNA, 36 bp, Artificial Sequence
  Synthetic oligonucleotide
atgacgtacaaagtaactaaactgtgtgtctaggaa

SEQ ID NO: 16638 - DNA, 36 bp, Artificial Sequence
  Synthetic oligonucleotide
atggggaaagcgagggcttttagtagaagcatagga

SEQ ID NO: 16639 - DNA, 38 bp, Artificial Sequence
  Synthetic oligonucleotide
atggtcagatagcgcatcatgctcggaaccacagatga

SEQ ID NO: 16640 - DNA, 35 bp, Artificial Sequence
  Synthetic oligonucleotide
atttccctccgacatatagctaagcgtctgcgaat

SEQ ID NO: 16641 - DNA, 36 bp, Artificial Sequence
  Synthetic oligonucleotide
atttgatcaggattagtagagcactatccggacgga

SEQ ID NO: 16642 - DNA, 37 bp, Artificial Sequence
  Synthetic oligonucleotide
atttgcattggtcgccgatatcactaggacatcagga

SEQ ID NO: 16643 - DNA, 35 bp, Artificial Sequence
  Synthetic oligonucleotide
atttgggaggcctcatgtttatatgtatgagagga

SEQ ID NO: 16644 - DNA, 31 bp, Artificial Sequence
  Synthetic oligonucleotide
catgaaccatcatgtttgtaatgtataaaga

SEQ ID NO: 16645 - DNA, 38 bp, Artificial Sequence
  Synthetic oligonucleotide
ccttcacaattatgggacatgatgacccgggacgttga

SEQ ID NO: 16646 - DNA, 35 bp, Artificial Sequence
  Synthetic oligonucleotide
cggttcttgcgccgagtggaggactacaccccccg

SEQ ID NO: 16647 - DNA, 35 bp, Artificial Sequence
  Synthetic oligonucleotide
ctcgggcccaaggggtatctggatatactgcttca

SEQ ID NO: 16648 - DNA, 38 bp, Artificial Sequence
  Synthetic oligonucleotide
gaaaaatggtcctgtagattgtttcggtgggtgtctga

SEQ ID NO: 16649 - DNA, 38 bp, Artificial Sequence
  Synthetic oligonucleotide
gactacagcagtctgcaaggaaccacaggtatttttga

SEQ ID NO: 16650 - DNA, 37 bp, Artificial Sequence
  Synthetic oligonucleotide
gagcagttctgcattgggaggttcaggtcaagggcga

SEQ ID NO: 16651 - DNA, 35 bp, Artificial Sequence
  Synthetic oligonucleotide
gagcccccggcccggtaagtgatcagtgtagcaag

SEQ ID NO: 16652 - DNA, 36 bp, Artificial Sequence
  Synthetic oligonucleotide
gccggatccgccgataggatcctcggtgcggaaata

SEQ ID NO: 16653 - DNA, 36 bp, Artificial Sequence
  Synthetic oligonucleotide
gctctccggaacacctctaggtattcgcgatgttaa

SEQ ID NO: 16654 - DNA, 37 bp, Artificial Sequence
  Synthetic oligonucleotide
gctggacgaaagcccgcagttcgaaaagggtaccaga

SEQ ID NO: 16655 - DNA, 37 bp, Artificial Sequence
  Synthetic oligonucleotide
ggaagagcgacgttatcaaacagggaggcaaagttga

SEQ ID NO: 16656 - DNA, 35 bp, Artificial Sequence
  Synthetic oligonucleotide
ggatcaccggggccacggtgcaagttttggattag

SEQ ID NO: 16657 - DNA, 36 bp, Artificial Sequence
  Synthetic oligonucleotide
ggattccttggcacaagatcatcaccatcctgtgga

SEQ ID NO: 16658 - DNA, 35 bp, Artificial Sequence
  Synthetic oligonucleotide
gtactccctgggacatcattgcggttttgaatatc

SEQ ID NO: 16659 - DNA, 38 bp, Artificial Sequence
  Synthetic oligonucleotide
gtagacggacgcggactgaacacggtggttacgggtga

SEQ ID NO: 16660 - DNA, 38 bp, Artificial Sequence
  Synthetic oligonucleotide
gtagttgcagaagcccagcggtagttatcgggcaatga

SEQ ID NO: 16661 - DNA, 35 bp, Artificial Sequence
  Synthetic oligonucleotide
gtcataagttgaatggctaggtttgaaccccgcaa

SEQ ID NO: 16662 - DNA, 37 bp, Artificial Sequence
  Synthetic oligonucleotide
gtctcgagcgcaggttcgtttaaaaagacaaatcgga

SEQ ID NO: 16663 - DNA, 36 bp, Artificial Sequence
  Synthetic oligonucleotide
gttcgtagtgttgggggctagattgagtacgtgata

SEQ ID NO: 16664 - DNA, 36 bp, Artificial Sequence
  Synthetic oligonucleotide
tacgctttgtcgtgaggggaccaaggggtttgtcta

SEQ ID NO: 16665 - DNA, 35 bp, Artificial Sequence
  Synthetic oligonucleotide
taggtagcccatcccgagcgtagggcatagctgtg

SEQ ID NO: 16666 - DNA, 35 bp, Artificial Sequence
  Synthetic oligonucleotide
tagtgattgccaccgacccccgctgtatgatctac

SEQ ID NO: 16667 - DNA, 35 bp, Artificial Sequence
  Synthetic oligonucleotide
tatgaagtcatgagtaactgaaattgctgagtgcg

SEQ ID NO: 16668 - DNA, 37 bp, Artificial Sequence
  Synthetic oligonucleotide
tcacgggcaaaatggtggtttccgtacatgacaagga

SEQ ID NO: 16669 - DNA, 35 bp, Artificial Sequence
  Synthetic oligonucleotide
tgagtgacacataactggtggcaatctctttaaga

SEQ ID NO: 16670 - DNA, 37 bp, Artificial Sequence
  Synthetic oligonucleotide
tgatagaggttgaaggcagaatgacaggcaccgatga

SEQ ID NO: 16671 - DNA, 38 bp, Artificial Sequence
  Synthetic oligonucleotide
tgcaagagaggtcccgcgaggcacggggcttatggtga

SEQ ID NO: 16672 - DNA, 37 bp, Artificial Sequence
  Synthetic oligonucleotide
tgtcaagcatggcagaatctcctggtaacaggactga

SEQ ID NO: 16673 - DNA, 38 bp, Artificial Sequence
  Synthetic oligonucleotide
tgtgaacgaatggttgcaccgcgccaagtagtgcctga

SEQ ID NO: 16674 - DNA, 38 bp, Artificial Sequence
  Synthetic oligonucleotide
tgttggaagcacgaagctgcgggggtcaaaacgggtga

SEQ ID NO: 16675 - DNA, 36 bp, Artificial Sequence
  Synthetic oligonucleotide
ttaaaaactctgaccggacttcagttgtgacgccca

SEQ ID NO: 16676 - DNA, 35 bp, Artificial Sequence
  Synthetic oligonucleotide
ttaagaccggatccatcgcgaatggcaggatatct

SEQ ID NO: 16677 - DNA, 35 bp, Artificial Sequence
  Synthetic oligonucleotide
ttcggagggaaaccgttaacgtcacattatcttgg

SEQ ID NO: 16678 - DNA, 38 bp, Artificial Sequence
  Synthetic oligonucleotide
tttaagcgttccgggaatagcgcccaggtggcatatga

SEQ ID NO: 16679 - DNA, 37 bp, Artificial Sequence
  Synthetic oligonucleotide
tttctcgtccgatttcggagaaacgtggcgaggaaga

SEQ ID NO: 16680 - DNA, 36 bp, Artificial Sequence
  Synthetic oligonucleotide
acagtccatggacattgcttcatccgctaggaagga

SEQ ID NO: 16681 - DNA, 37 bp, Artificial Sequence
  Synthetic oligonucleotide
agtgagggtcatggtagatagggctcatcatttgaga

SEQ ID NO: 16682 - DNA, 37 bp, Artificial Sequence
  Synthetic oligonucleotide
gaaacatagagttgggtggtgtggaacgacgacgcga

SEQ ID NO: 16683 - DNA, 35 bp, Artificial Sequence
  Synthetic oligonucleotide
accataacgtctacctctggtacttcacaaagggc

SEQ ID NO: 16684 - DNA, 35 bp, Artificial Sequence
  Synthetic oligonucleotide
acgaggctgtcgatgacgcgtttgtaatgcttggg

SEQ ID NO: 16685 - DNA, 38 bp, Artificial Sequence
  Synthetic oligonucleotide
agctccgggcccaaagcggggatgcggagctatcatga

SEQ ID NO: 16686 - DNA, 37 bp, Artificial Sequence
  Synthetic oligonucleotide
gagcaacaacgctctgttgacctttagtttcagtcga

SEQ ID NO: 16687 - DNA, 37 bp, Artificial Sequence
  Synthetic oligonucleotide
gctctcggcttactggggggaacgcctacgttactga

SEQ ID NO: 16688 - DNA, 37 bp, Artificial Sequence
  Synthetic oligonucleotide
ttcacacgacaacatcgtacaaccgactgtactatga

SEQ ID NO: 16689 - DNA, 37 bp, Artificial Sequence
  Synthetic oligonucleotide
agggaagtaatgtgttgacgttgcagacatacgagga

SEQ ID NO: 16690 - DNA, 36 bp, Artificial Sequence
  Synthetic oligonucleotide
agggcgttagccattacatacgtcctaaatgggtga

SEQ ID NO: 16691 - DNA, 36 bp, Artificial Sequence
  Synthetic oligonucleotide
agtcatagtcggaaactattcgaggcgcggggggga

SEQ ID NO: 16692 - DNA, 37 bp, Artificial Sequence
  Synthetic oligonucleotide
atcattgtcttggaacttcggttggatgtgccctaga

SEQ ID NO: 16693 - DNA, 38 bp, Artificial Sequence
  Synthetic oligonucleotide
atccgcgtgaatattatcacagagtaggtctccgttga

SEQ ID NO: 16694 - DNA, 36 bp, Artificial Sequence
  Synthetic oligonucleotide
gaatgggctcctcactaaacgggacgtacaatcgga

SEQ ID NO: 16695 - DNA, 38 bp, Artificial Sequence
  Synthetic oligonucleotide
gaggaaagatatgtccggctaaagtatcgggatactga

SEQ ID NO: 16696 - DNA, 38 bp, Artificial Sequence
  Synthetic oligonucleotide
gcacccaatactgagtggtgcagtccgatgatagttga

SEQ ID NO: 16697 - DNA, 37 bp, Artificial Sequence
  Synthetic oligonucleotide
gcgaccttatgtgggttgctgattaacggtcccgtga

SEQ ID NO: 16698 - DNA, 38 bp, Artificial Sequence
  Synthetic oligonucleotide
gctgttgtagggtgttatcgcggggaatggtgtattga

SEQ ID NO: 16699 - DNA, 35 bp, Artificial Sequence
  Synthetic oligonucleotide
ggaacatggttccacggagcatgcattgagttttg

SEQ ID NO: 16700 - DNA, 37 bp, Artificial Sequence
  Synthetic oligonucleotide
gtatcggagagaagagattgaagccctccgttcgcga

SEQ ID NO: 16701 - DNA, 37 bp, Artificial Sequence
  Synthetic oligonucleotide
gtccctgccactagctttaaggggtttcgtgtgctga

SEQ ID NO: 16702 - DNA, 35 bp, Artificial Sequence
  Synthetic oligonucleotide
gtgaaaatgtacgacctgtcatggaatgaagctga

SEQ ID NO: 16703 - DNA, 38 bp, Artificial Sequence
  Synthetic oligonucleotide
gtgacatcgaccgttaggatcgcggagaactctactga

SEQ ID NO: 16704 - DNA, 36 bp, Artificial Sequence
  Synthetic oligonucleotide
gtgactggagagctaaaggtctgccaaccgctcgca

SEQ ID NO: 16705 - DNA, 38 bp, Artificial Sequence
  Synthetic oligonucleotide
tgtacagcactaaagacagcgcggtgaggacccgttga

SEQ ID NO: 16706 - DNA, 35 bp, Artificial Sequence
  Synthetic oligonucleotide
tgtcacaaggacatcgagaaacggtcgatgccaag

SEQ ID NO: 16707 - DNA, 35 bp, Artificial Sequence
  Synthetic oligonucleotide
ttggtgattgtgcaccgttgacgctcggggtatgt

SEQ ID NO: 16708 - DNA, 37 bp, Artificial Sequence
  Synthetic oligonucleotide
gctgacgcactgccaaggtttgtgcttctttaagaga

SEQ ID NO: 16709 - DNA, 38 bp, Artificial Sequence
  Synthetic oligonucleotide
gctcattgccaattatgcaatagtcgatgccgaactga

SEQ ID NO: 16710 - DNA, 36 bp, Artificial Sequence
  Synthetic oligonucleotide
ggagtcctgcggagcgcaaaccatgatggatacaga

SEQ ID NO: 16711 - DNA, 37 bp, Artificial Sequence
  Synthetic oligonucleotide
ggcgagtcaataaacggcgtttcattgcacaggacga

SEQ ID NO: 16712 - DNA, 38 bp, Artificial Sequence
  Synthetic oligonucleotide
gagtacaggcaaggatgagatggaagtagttctactga

SEQ ID NO: 16713 - DNA, 38 bp, Artificial Sequence
  Synthetic oligonucleotide
atcgtaactgcagggactggcggtatcatttagtatga

SEQ ID NO: 16714 - DNA, 36 bp, Artificial Sequence
  Synthetic oligonucleotide
aagttccgcccaacgtcaaagcaaaaatgtccgaca

SEQ ID NO: 16715 - DNA, 37 bp, Artificial Sequence
  Synthetic oligonucleotide
aataacgctctttaggtatattacagtggactctcga

SEQ ID NO: 16716 - DNA, 38 bp, Artificial Sequence
  Synthetic oligonucleotide
aattggagctgatcatcgtaaggctagaccgccagtga

SEQ ID NO: 16717 - DNA, 36 bp, Artificial Sequence
  Synthetic oligonucleotide
acgcacccaaggacttcgtatctgggttgggtacta

SEQ ID NO: 16718 - DNA, 36 bp, Artificial Sequence
  Synthetic oligonucleotide
agacggaccgcatcccgagatacgtgcatagtgtaa

SEQ ID NO: 16719 - DNA, 36 bp, Artificial Sequence
  Synthetic oligonucleotide
agcacgagaaggtggtaccgcagttttgtacgggga

SEQ ID NO: 16720 - DNA, 36 bp, Artificial Sequence
  Synthetic oligonucleotide
agcagatccagttgcaggggtcgcacgtggggcgta

SEQ ID NO: 16721 - DNA, 37 bp, Artificial Sequence
  Synthetic oligonucleotide
agtcgcgtcggacggaatcgcgaccaagcctgcgtga

SEQ ID NO: 16722 - DNA, 35 bp, Artificial Sequence
  Synthetic oligonucleotide
agtgaaggcgcgagttcagtatgaccgtagcttcc

SEQ ID NO: 16723 - DNA, 36 bp, Artificial Sequence
  Synthetic oligonucleotide
atccggtgtaccatgtagtacgtgcatgtgttctca

SEQ ID NO: 16724 - DNA, 36 bp, Artificial Sequence
  Synthetic oligonucleotide
catgcacacatttatcaagatggagagcctctggta

SEQ ID NO: 16725 - DNA, 36 bp, Artificial Sequence
  Synthetic oligonucleotide
cccataggtcgccgcattcatgaggagtctttatga

SEQ ID NO: 16726 - DNA, 35 bp, Artificial Sequence
  Synthetic oligonucleotide
cctttgcgcaagccctctgactctcattgccagtg

SEQ ID NO: 16727 - DNA, 35 bp, Artificial Sequence
  Synthetic oligonucleotide
ctcacgacgtcgcgcatgagcaagcacagacagga

SEQ ID NO: 16728 - DNA, 38 bp, Artificial Sequence
  Synthetic oligonucleotide
cttcgaggagcccttaggctcgtctcctagtatgctga

SEQ ID NO: 16729 - DNA, 35 bp, Artificial Sequence
  Synthetic oligonucleotide
gacaatacgtatttatgagcgttgctccgacgcgg

SEQ ID NO: 16730 - DNA, 35 bp, Artificial Sequence
  Synthetic oligonucleotide
gcaattaggatgaagcggaaggtctcagtcattct

SEQ ID NO: 16731 - DNA, 36 bp, Artificial Sequence
  Synthetic oligonucleotide
gcgtaggtacgtatcagatttgcgactctggaggga

SEQ ID NO: 16732 - DNA, 35 bp, Artificial Sequence
  Synthetic oligonucleotide
gggggacctcacattgtcaccaaatgacctgtgga

SEQ ID NO: 16733 - DNA, 37 bp, Artificial Sequence
  Synthetic oligonucleotide
ggtaaggccatactgtggctaatccttttcaatggga

SEQ ID NO: 16734 - DNA, 36 bp, Artificial Sequence
  Synthetic oligonucleotide
gtacctaggtggctgttcaacactgatagcattgta

SEQ ID NO: 16735 - DNA, 35 bp, Artificial Sequence
  Synthetic oligonucleotide
gtcagaatgcacacgtaccagcttgcaaggattgc

SEQ ID NO: 16736 - DNA, 35 bp, Artificial Sequence
  Synthetic oligonucleotide
gtgcgtagcaggatgtattgatgcaggccacccgg

SEQ ID NO: 16737 - DNA, 35 bp, Artificial Sequence
  Synthetic oligonucleotide
gtgggaagctgctatatgagtatgcgaattccagg

SEQ ID NO: 16738 - DNA, 36 bp, Artificial Sequence
  Synthetic oligonucleotide
gtggtgactccaagagaggcatatcgccctatctca

SEQ ID NO: 16739 - DNA, 37 bp, Artificial Sequence
  Synthetic oligonucleotide
taaagaccgtagtaggtgcaaagttattgatgtgtga

SEQ ID NO: 16740 - DNA, 38 bp, Artificial Sequence
  Synthetic oligonucleotide
tacctccgagatcgttgctaagtggtcatcgagattga

SEQ ID NO: 16741 - DNA, 35 bp, Artificial Sequence
  Synthetic oligonucleotide
tagcattcgcttggggtggaaatgggaaaaaatcc

SEQ ID NO: 16742 - DNA, 38 bp, Artificial Sequence
  Synthetic oligonucleotide
tcaccgctaatgggtcgggtaaaaatgctgacatatga

SEQ ID NO: 16743 - DNA, 35 bp, Artificial Sequence
  Synthetic oligonucleotide
tcagtctcggtgttaatctagattcgagacgcctt

SEQ ID NO: 16744 - DNA, 38 bp, Artificial Sequence
  Synthetic oligonucleotide
tcctaagaagcattgtagatgtcctgaaggaagtttga

SEQ ID NO: 16745 - DNA, 38 bp, Artificial Sequence
  Synthetic oligonucleotide
tcgacggtactgcggcatgtgggtaataaattgtatga

SEQ ID NO: 16746 - DNA, 36 bp, Artificial Sequence
  Synthetic oligonucleotide
tctagctagctctaccgtgcaacaccagccaagaaa

SEQ ID NO: 16747 - DNA, 38 bp, Artificial Sequence
  Synthetic oligonucleotide
tgtacgttggcaaatagcacaaatggttctgggggtga

SEQ ID NO: 16748 - DNA, 36 bp, Artificial Sequence
  Synthetic oligonucleotide
tgtgtcgttcgctggataagtcgagggctacctata

SEQ ID NO: 16749 - DNA, 37 bp, Artificial Sequence
  Synthetic oligonucleotide
ttagggctatgcggcataacttaaggcccttatggga

SEQ ID NO: 16750 - DNA, 35 bp, Artificial Sequence
  Synthetic oligonucleotide
gccactcacgtgaacataacacgggggctcggtta

SEQ ID NO: 16751 - DNA, 35 bp, Artificial Sequence
  Synthetic oligonucleotide
attcctggacagggatatagcctcgagtcatggtt

SEQ ID NO: 16752 - DNA, 38 bp, Artificial Sequence
  Synthetic oligonucleotide
tcgagctccctaggtcatgatgggaaagtcggttatga

SEQ ID NO: 16753 - DNA, 35 bp, Artificial Sequence
  Synthetic oligonucleotide
aacgacctggtctcagacgggagggttggctataa

SEQ ID NO: 16754 - DNA, 36 bp, Artificial Sequence
  Synthetic oligonucleotide
atatggcgctctcagccgaacggacgtgctaatcaa

SEQ ID NO: 16755 - DNA, 37 bp, Artificial Sequence
  Synthetic oligonucleotide
gaacgtgatgctaccgtggggtagatggctagagcga

SEQ ID NO: 16756 - DNA, 36 bp, Artificial Sequence
  Synthetic oligonucleotide
gatacttggggaaatgtatttacgaagcattcataa

SEQ ID NO: 16757 - DNA, 37 bp, Artificial Sequence
  Synthetic oligonucleotide
gatgttcgtctaccttgtccatgcttggcggtctgga

SEQ ID NO: 16758 - DNA, 35 bp, Artificial Sequence
  Synthetic oligonucleotide
gcttaaatagcacgggccgtttctcgtgatccggt

SEQ ID NO: 16759 - DNA, 36 bp, Artificial Sequence
  Synthetic oligonucleotide
gtgcagttgaaagtgattttcgactctctgggttta

SEQ ID NO: 16760 - DNA, 36 bp, Artificial Sequence
  Synthetic oligonucleotide
taacatgttccagatttctcctgcttcgggtcggta

SEQ ID NO: 16761 - DNA, 35 bp, Artificial Sequence
  Synthetic oligonucleotide
taccgggtaaggggtaaactcatcggcgtttgagg

SEQ ID NO: 16762 - DNA, 35 bp, Artificial Sequence
  Synthetic oligonucleotide
tagaaagaccgggtcttgtctgcagtcctgtatac

SEQ ID NO: 16763 - DNA, 35 bp, Artificial Sequence
  Synthetic oligonucleotide
tatcaatttcagaattggttaagtatgtaagttgt

SEQ ID NO: 16764 - DNA, 37 bp, Artificial Sequence
  Synthetic oligonucleotide
tcatgcgaggctgtccaagtgaccgagactgacatga

SEQ ID NO: 16765 - DNA, 37 bp, Artificial Sequence
  Synthetic oligonucleotide
tcccgcataagatttcattaaaagcaaggaactacga

SEQ ID NO: 16766 - DNA, 36 bp, Artificial Sequence
  Synthetic oligonucleotide
tgaatcctgcggggggccattcagagaaggtcctga

SEQ ID NO: 16767 - DNA, 37 bp, Artificial Sequence
  Synthetic oligonucleotide
tgacccgggttctatatgttatgaagcgatggttaga

SEQ ID NO: 16768 - DNA, 38 bp, Artificial Sequence
  Synthetic oligonucleotide
ttagagcagtctcaatggggtagccgtgaagtacttga

SEQ ID NO: 16769 - DNA, 37 bp, Artificial Sequence
  Synthetic oligonucleotide
ttccaaaagtatactgcagtccctgctggtttattga

SEQ ID NO: 16770 - DNA, 36 bp, Artificial Sequence
  Synthetic oligonucleotide
atgctccgacgagttaactacagttgtcgagacgta

SEQ ID NO: 16771 - DNA, 35 bp, Artificial Sequence
  Synthetic oligonucleotide
gctgcacacgtttaatgatagcgcgttcatcgggg

SEQ ID NO: 16772 - DNA, 38 bp, Artificial Sequence
  Synthetic oligonucleotide
atggggttgtattccggaatgtggcaccgtaatggtga

SEQ ID NO: 16773 - DNA, 37 bp, Artificial Sequence
  Synthetic oligonucleotide
gggagccgcatccttatcgccatgctgaatgaggaga

SEQ ID NO: 16774 - DNA, 35 bp, Artificial Sequence
  Synthetic oligonucleotide
tgtaccatattgcattgctaggtgttcctacgacc

SEQ ID NO: 16775 - DNA, 38 bp, Artificial Sequence
  Synthetic oligonucleotide
atagcacaagtacgaatcgccgggaagcaaggtattga

SEQ ID NO: 16776 - DNA, 36 bp, Artificial Sequence
  Synthetic oligonucleotide
gttgttcgattgaggtggtatgactagtggaaacga

SEQ ID NO: 16777 - DNA, 35 bp, Artificial Sequence
  Synthetic oligonucleotide
tgaccccggggattcagccttgcttttttcgcaaa

SEQ ID NO: 16778 - DNA, 35 bp, Artificial Sequence
  Synthetic oligonucleotide
aacctcatgaaatgggcgcagtcagggatgcgtcc

SEQ ID NO: 16779 - DNA, 36 bp, Artificial Sequence
  Synthetic oligonucleotide
tcttcacacgcgcaatgcgacgagattacgacgcta

SEQ ID NO: 16780 - DNA, 37 bp, Artificial Sequence
  Synthetic oligonucleotide
atagtcatggcctaggctagcaggaacagtagttgga

SEQ ID NO: 16781 - DNA, 37 bp, Artificial Sequence
  Synthetic oligonucleotide
tcgcctgcgaacgtgctgtatccgccgggctccccga

SEQ ID NO: 16782 - DNA, 38 bp, Artificial Sequence
  Synthetic oligonucleotide
cctgctgtaacatgataacgtggtgtgtaatgggatga

SEQ ID NO: 16783 - DNA, 35 bp, Artificial Sequence
  Synthetic oligonucleotide
cctggtgtattgtagttaagtaatggaccccccgc

SEQ ID NO: 16784 - DNA, 36 bp, Artificial Sequence
  Synthetic oligonucleotide
gaccccgacaccgtattgcgacttatgactaagcaa

SEQ ID NO: 16785 - DNA, 38 bp, Artificial Sequence
  Synthetic oligonucleotide
gcagtttgcgaggtaatatgggacgttaagcctgttga

SEQ ID NO: 16786 - DNA, 35 bp, Artificial Sequence
  Synthetic oligonucleotide
gcgtcttgcattaatcaagttccggggttgtaata

SEQ ID NO: 16787 - DNA, 35 bp, Artificial Sequence
  Synthetic oligonucleotide
ggaagagcagatcatgagtgttttaggtgggagca

SEQ ID NO: 16788 - DNA, 38 bp, Artificial Sequence
  Synthetic oligonucleotide
gtaacgttcgtgtctgcaggtgcgcaaaagctgggtga

SEQ ID NO: 16789 - DNA, 37 bp, Artificial Sequence
  Synthetic oligonucleotide
taaactacggccaagtccgcaggtgcatgcactcgga

SEQ ID NO: 16790 - DNA, 36 bp, Artificial Sequence
  Synthetic oligonucleotide
taattagaggtcgagatcaggatggggccgtctgca

SEQ ID NO: 16791 - DNA, 36 bp, Artificial Sequence
  Synthetic oligonucleotide
tgataattgcagttgtgggggatggatacttcagga

SEQ ID NO: 16792 - DNA, 36 bp, Artificial Sequence
  Synthetic oligonucleotide
aaacagaaccaggtgggagctgtcatactgcaccga

SEQ ID NO: 16793 - DNA, 37 bp, Artificial Sequence
  Synthetic oligonucleotide
aaacatgtaggcccgccccgccgttcgtctacgccga

SEQ ID NO: 16794 - DNA, 35 bp, Artificial Sequence
  Synthetic oligonucleotide
aaatggaagatggctaccgccccgtgctgaaccct

SEQ ID NO: 16795 - DNA, 37 bp, Artificial Sequence
  Synthetic oligonucleotide
aacgtatgtatatgcagaggcgtcgtctcgactgtga

SEQ ID NO: 16796 - DNA, 36 bp, Artificial Sequence
  Synthetic oligonucleotide
aacgtattaacctgaatctacattaacgtcgtacaa

SEQ ID NO: 16797 - DNA, 36 bp, Artificial Sequence
  Synthetic oligonucleotide
aagagatctattcggatcttccataaggtagaccta

SEQ ID NO: 16798 - DNA, 37 bp, Artificial Sequence
  Synthetic oligonucleotide
aagctaacacctcgaccgtttacgatctgatctccga

SEQ ID NO: 16799 - DNA, 37 bp, Artificial Sequence
  Synthetic oligonucleotide
aaggattggtgagtgcatgttgtggattcgggtgaga

SEQ ID NO: 16800 - DNA, 37 bp, Artificial Sequence
  Synthetic oligonucleotide
aagtccagaacgcaactgtcacgtacggcgtgggcga

SEQ ID NO: 16801 - DNA, 36 bp, Artificial Sequence
  Synthetic oligonucleotide
aatagcgatgctccagtagtcttactaattggtata

SEQ ID NO: 16802 - DNA, 35 bp, Artificial Sequence
  Synthetic oligonucleotide
aatctccgagtacaggattcaaagctcaacggttc

SEQ ID NO: 16803 - DNA, 37 bp, Artificial Sequence
  Synthetic oligonucleotide
aatgtcggtccacgtttgacgtgaggcccaggtagga

SEQ ID NO: 16804 - DNA, 37 bp, Artificial Sequence
  Synthetic oligonucleotide
aattcgggtttaggtaaataggttagcgaactgcaga

SEQ ID NO: 16805 - DNA, 36 bp, Artificial Sequence
  Synthetic oligonucleotide
acacccatgggctaagcagttgctttcatgcgtcta

SEQ ID NO: 16806 - DNA, 36 bp, Artificial Sequence
  Synthetic oligonucleotide
acataggacgattattgctttgcgtgggtcgagcca

SEQ ID NO: 16807 - DNA, 36 bp, Artificial Sequence
  Synthetic oligonucleotide
acccacttggtcttacagggcggagggacatgttaa

SEQ ID NO: 16808 - DNA, 36 bp, Artificial Sequence
  Synthetic oligonucleotide
accggtttacacatagtaagtgtagatccgctcgga

SEQ ID NO: 16809 - DNA, 35 bp, Artificial Sequence
  Synthetic oligonucleotide
acctgatcttgccttataccatggcggtttagccg

SEQ ID NO: 16810 - DNA, 36 bp, Artificial Sequence
  Synthetic oligonucleotide
acctttactcgactgacatttataggcacatacgga

SEQ ID NO: 16811 - DNA, 36 bp, Artificial Sequence
  Synthetic oligonucleotide
acgagctgcattgtgcttaggaggggcacgagcgta

SEQ ID NO: 16812 - DNA, 35 bp, Artificial Sequence
  Synthetic oligonucleotide
acgtattgggtctcttgctgtaggcttacatgtgt

SEQ ID NO: 16813 - DNA, 38 bp, Artificial Sequence
  Synthetic oligonucleotide
actacggggctgttgtaaatgcccctgtgctacaatga

SEQ ID NO: 16814 - DNA, 37 bp, Artificial Sequence
  Synthetic oligonucleotide
actggatgcaatgagcatgcagtcgcacttgggaaga

SEQ ID NO: 16815 - DNA, 36 bp, Artificial Sequence
  Synthetic oligonucleotide
agacatggaataacgtcaactgctaagcatctttga

SEQ ID NO: 16816 - DNA, 36 bp, Artificial Sequence
  Synthetic oligonucleotide
agatggccatatgtccgggacttgatttttcggcta

SEQ ID NO: 16817 - DNA, 35 bp, Artificial Sequence
  Synthetic oligonucleotide
agggaatcagaacagatatgctcattgcccacgag

SEQ ID NO: 16818 - DNA, 38 bp, Artificial Sequence
  Synthetic oligonucleotide
aggtgccaggcggagtggtcatgagtgcggagggttga

SEQ ID NO: 16819 - DNA, 36 bp, Artificial Sequence
  Synthetic oligonucleotide
agtattgcctatgtgggaggtcaaagagtcacgtaa

SEQ ID NO: 16820 - DNA, 34 bp, Artificial Sequence
  Synthetic oligonucleotide
agtcagagcacgcatgaacgatggtagtggataa

SEQ ID NO: 16821 - DNA, 38 bp, Artificial Sequence
  Synthetic oligonucleotide
agtcggggttgaacggttgcaggatcggttgtctgtga

SEQ ID NO: 16822 - DNA, 36 bp, Artificial Sequence
  Synthetic oligonucleotide
agttgagattaagccggcccaatggccgctccggta

SEQ ID NO: 16823 - DNA, 36 bp, Artificial Sequence
  Synthetic oligonucleotide
atacaacgagaggacatttcctctggtgattatgga

SEQ ID NO: 16824 - DNA, 35 bp, Artificial Sequence
  Synthetic oligonucleotide
atacataagggctctgtacggtaagattttcctac

SEQ ID NO: 16825 - DNA, 38 bp, Artificial Sequence
  Synthetic oligonucleotide
atactgcgaatggggttttcgtaccattagtcatctga

SEQ ID NO: 16826 - DNA, 37 bp, Artificial Sequence
  Synthetic oligonucleotide
atgcaacatgcagaaggtagatttgatataatagaga

SEQ ID NO: 16827 - DNA, 38 bp, Artificial Sequence
  Synthetic oligonucleotide
atgcgcgctccacgtaagaacaataggtgaaaggctga

SEQ ID NO: 16828 - DNA, 37 bp, Artificial Sequence
  Synthetic oligonucleotide
atgggggatacgacttgctaactagggctattgacga

SEQ ID NO: 16829 - DNA, 36 bp, Artificial Sequence
  Synthetic oligonucleotide
attagtagcctaggacgcggttggaccaggactcta

SEQ ID NO: 16830 - DNA, 35 bp, Artificial Sequence
  Synthetic oligonucleotide
catagtaacaagtcgaatcagtgtgccccacgcta

SEQ ID NO: 16831 - DNA, 35 bp, Artificial Sequence
  Synthetic oligonucleotide
cattaagaagctaacccgtcgtgggatagggctcg

SEQ ID NO: 16832 - DNA, 35 bp, Artificial Sequence
  Synthetic oligonucleotide
ccaactgacgactgtaccgaagagaaatgttttct

SEQ ID NO: 16833 - DNA, 35 bp, Artificial Sequence
  Synthetic oligonucleotide
ccagctactatcctatcattgtttgtcttacggtg

SEQ ID NO: 16834 - DNA, 35 bp, Artificial Sequence
  Synthetic oligonucleotide
cggggacaccacccaaaaaaggtctgcaggttgat

SEQ ID NO: 16835 - DNA, 35 bp, Artificial Sequence
  Synthetic oligonucleotide
ctaccgagcggaaatccgagttatagtcgctgggc

SEQ ID NO: 16836 - DNA, 35 bp, Artificial Sequence
  Synthetic oligonucleotide
ctccaggttctcctgcattattctaagatctaccg

SEQ ID NO: 16837 - DNA, 35 bp, Artificial Sequence
  Synthetic oligonucleotide
ctccatactcactttcattattcgtgcggtcaaag

SEQ ID NO: 16838 - DNA, 36 bp, Artificial Sequence
  Synthetic oligonucleotide
ctcttgccgaacgactggtgacttgggccttgggca

SEQ ID NO: 16839 - DNA, 35 bp, Artificial Sequence
  Synthetic oligonucleotide
ctgggccgatcgcacatgtcgtgggttcatgttac

SEQ ID NO: 16840 - DNA, 36 bp, Artificial Sequence
  Synthetic oligonucleotide
cttaccttagagttaggccagtcaatagggcgtgga

SEQ ID NO: 16841 - DNA, 35 bp, Artificial Sequence
  Synthetic oligonucleotide
cttgtcctgcagttggtttttcgaattcgagcttg

SEQ ID NO: 16842 - DNA, 35 bp, Artificial Sequence
  Synthetic oligonucleotide
gaaaatcaaaagcaacggatggtgcgctggacgca

SEQ ID NO: 16843 - DNA, 35 bp, Artificial Sequence
  Synthetic oligonucleotide
gaacccacgttccgccccaaggagcaattctgggg

SEQ ID NO: 16844 - DNA, 35 bp, Artificial Sequence
  Synthetic oligonucleotide
gaaccgattcgcatccaattagtcgtgtgtgattt

SEQ ID NO: 16845 - DNA, 37 bp, Artificial Sequence
  Synthetic oligonucleotide
gaaggattcacgtgaaataccataggcataccttaga

SEQ ID NO: 16846 - DNA, 36 bp, Artificial Sequence
  Synthetic oligonucleotide
gaagggtatcgactgcaggttttctttgattaggga

SEQ ID NO: 16847 - DNA, 36 bp, Artificial Sequence
  Synthetic oligonucleotide
gaatggaacttaggtgtgatactaaagacagtggaa

SEQ ID NO: 16848 - DNA, 34 bp, Artificial Sequence
  Synthetic oligonucleotide
gacccaccccgtacgtgtacccggtctaacctac

SEQ ID NO: 16849 - DNA, 35 bp, Artificial Sequence
  Synthetic oligonucleotide
gactcgtctgcactgcttcattgcaaggatacggt

SEQ ID NO: 16850 - DNA, 35 bp, Artificial Sequence
  Synthetic oligonucleotide
gataaagctgtatatttgcccatctggcaaaggct

SEQ ID NO: 16851 - DNA, 36 bp, Artificial Sequence
  Synthetic oligonucleotide
gatcgcttgccggttctcatgcaagctaatcacaga

SEQ ID NO: 16852 - DNA, 35 bp, Artificial Sequence
  Synthetic oligonucleotide
gatggcatctggaagcaacatgagtcatctaagta

SEQ ID NO: 16853 - DNA, 38 bp, Artificial Sequence
  Synthetic oligonucleotide
gattcgcagttctgccgtttttggggttacatacctga

SEQ ID NO: 16854 - DNA, 37 bp, Artificial Sequence
  Synthetic oligonucleotide
gattgcattttagaaccgatgggtagcaccggtttga

SEQ ID NO: 16855 - DNA, 35 bp, Artificial Sequence
  Synthetic oligonucleotide
gcaacagacaaacgggttaaaggagcttccgcgac

SEQ ID NO: 16856 - DNA, 36 bp, Artificial Sequence
  Synthetic oligonucleotide
gcaatgaggtgggtgaccctcgccacggtacccata

SEQ ID NO: 16857 - DNA, 37 bp, Artificial Sequence
  Synthetic oligonucleotide
gcaccaagttggacgggcctggtaaagtattagcaga

SEQ ID NO: 16858 - DNA, 36 bp, Artificial Sequence
  Synthetic oligonucleotide
gcactgtcaaccgaccttggagtgaggtacaaggta

SEQ ID NO: 16859 - DNA, 35 bp, Artificial Sequence
  Synthetic oligonucleotide
gccaactcgcaacccacaagatcaacgcgctgaaa

SEQ ID NO: 16860 - DNA, 37 bp, Artificial Sequence
  Synthetic oligonucleotide
gcgctataggggaacagcgacattgcaaagcgctcga

SEQ ID NO: 16861 - DNA, 36 bp, Artificial Sequence
  Synthetic oligonucleotide
gcgctttgtgcgccggggaagccttttgagctcaca

SEQ ID NO: 16862 - DNA, 37 bp, Artificial Sequence
  Synthetic oligonucleotide
gctacgttgattgcatgaatttgactgttgatcccga

SEQ ID NO: 16863 - DNA, 35 bp, Artificial Sequence
  Synthetic oligonucleotide
gctactgggacttggggggagagcggtggtccgtt

SEQ ID NO: 16864 - DNA, 35 bp, Artificial Sequence
  Synthetic oligonucleotide
gctgacttgtccaacgcgtagtctgttgcggatag

SEQ ID NO: 16865 - DNA, 34 bp, Artificial Sequence
  Synthetic oligonucleotide
gctggaaagaggctttacgagacagtaccgaagg

SEQ ID NO: 16866 - DNA, 38 bp, Artificial Sequence
  Synthetic oligonucleotide
gcttgacactacccgaaggagtatgcaatggttcgtga

SEQ ID NO: 16867 - DNA, 38 bp, Artificial Sequence
  Synthetic oligonucleotide
ggacttaagtgttagcacatcttacatcaatgccctga

SEQ ID NO: 16868 - DNA, 36 bp, Artificial Sequence
  Synthetic oligonucleotide
ggaggtggatattcacctcataaaaaattaggctga

SEQ ID NO: 16869 - DNA, 36 bp, Artificial Sequence
  Synthetic oligonucleotide
ggataggacgtagatctctgcatgttagtttcctca

SEQ ID NO: 16870 - DNA, 35 bp, Artificial Sequence
  Synthetic oligonucleotide
ggatctaagacggagcgtacgataaatgctgggat

SEQ ID NO: 16871 - DNA, 37 bp, Artificial Sequence
  Synthetic oligonucleotide
ggcacaagggccgtagtcaactaggtttacaggtaga

SEQ ID NO: 16872 - DNA, 35 bp, Artificial Sequence
  Synthetic oligonucleotide
ggccacttgcctcactgtctcatcaattccctgta

SEQ ID NO: 16873 - DNA, 37 bp, Artificial Sequence
  Synthetic oligonucleotide
ggggagtgccgtggcgccacgcctaagcagtctatga

SEQ ID NO: 16874 - DNA, 35 bp, Artificial Sequence
  Synthetic oligonucleotide
gggtattgagaatgtagttacgagaacgttattga

SEQ ID NO: 16875 - DNA, 38 bp, Artificial Sequence
  Synthetic oligonucleotide
gggtgataaccatgccttggctaaggaccgtttggtga

SEQ ID NO: 16876 - DNA, 38 bp, Artificial Sequence
  Synthetic oligonucleotide
ggtcagggcggaggtatacctccacggaactactttga

SEQ ID NO: 16877 - DNA, 37 bp, Artificial Sequence
  Synthetic oligonucleotide
gtagatactgctaatgaggtgtctaggttgcatttga

SEQ ID NO: 16878 - DNA, 35 bp, Artificial Sequence
  Synthetic oligonucleotide
gtagtggatgtgcgtttgcctagggtatcaacatt

SEQ ID NO: 16879 - DNA, 37 bp, Artificial Sequence
  Synthetic oligonucleotide
gtatcgacattgagtggttcctcctatattggggaga

SEQ ID NO: 16880 - DNA, 36 bp, Artificial Sequence
  Synthetic oligonucleotide
gtatgagtcgaccttgaaagccacctactgtcttga

SEQ ID NO: 16881 - DNA, 36 bp, Artificial Sequence
  Synthetic oligonucleotide
gtcgaggagggatctgacgctaattagggtaccgta

SEQ ID NO: 16882 - DNA, 37 bp, Artificial Sequence
  Synthetic oligonucleotide
gtcgatgaaattgacgcgctggtcgtgcgctgataga

SEQ ID NO: 16883 - DNA, 37 bp, Artificial Sequence
  Synthetic oligonucleotide
gtgacattaggcttggcgatcttgttggctagtccga

SEQ ID NO: 16884 - DNA, 35 bp, Artificial Sequence
  Synthetic oligonucleotide
gtgagcataagatcattcttaggcggatcacggta

SEQ ID NO: 16885 - DNA, 38 bp, Artificial Sequence
  Synthetic oligonucleotide
gttacgctataatgtacggaagtcataactctaggtga

SEQ ID NO: 16886 - DNA, 35 bp, Artificial Sequence
  Synthetic oligonucleotide
gttacgtcggtgattataacgcagatctgccgttg

SEQ ID NO: 16887 - DNA, 37 bp, Artificial Sequence
  Synthetic oligonucleotide
gttatgatatgttaacgtctaggagccacattataga

SEQ ID NO: 16888 - DNA, 36 bp, Artificial Sequence
  Synthetic oligonucleotide
gttcctcatacaggctgagggctaaagaacataaaa

SEQ ID NO: 16889 - DNA, 38 bp, Artificial Sequence
  Synthetic oligonucleotide
gttcgcacgtgctggatttgccctgtgcattaaaatga

SEQ ID NO: 16890 - DNA, 36 bp, Artificial Sequence
  Synthetic oligonucleotide
gtttggtgccgtgtcaccagggtccgattttatgca

SEQ ID NO: 16891 - DNA, 37 bp, Artificial Sequence
  Synthetic oligonucleotide
gtttgtgttggctatcttgtgtggaagtaaactcgga

SEQ ID NO: 16892 - DNA, 38 bp, Artificial Sequence
  Synthetic oligonucleotide
taccaatcgcgcctatgggcacagttcatattacttga

SEQ ID NO: 16893 - DNA, 37 bp, Artificial Sequence
  Synthetic oligonucleotide
tacgacacataatggccagttcgtctcagtcaataga

SEQ ID NO: 16894 - DNA, 37 bp, Artificial Sequence
  Synthetic oligonucleotide
tactaacagcagtggctacagttagctcgatgcgaga

SEQ ID NO: 16895 - DNA, 35 bp, Artificial Sequence
  Synthetic oligonucleotide
taggtggggtgcggccctgagttgaatcaccaaga

SEQ ID NO: 16896 - DNA, 37 bp, Artificial Sequence
  Synthetic oligonucleotide
tagtgatcaggtgtctcgagatccacgatcgagtcga

SEQ ID NO: 16897 - DNA, 37 bp, Artificial Sequence
  Synthetic oligonucleotide
tatgctgagtcacaactaattccaaacgctccaggga

SEQ ID NO: 16898 - DNA, 37 bp, Artificial Sequence
  Synthetic oligonucleotide
tcaacgtgtcgcactacatcgggtttcggaaaataga

SEQ ID NO: 16899 - DNA, 35 bp, Artificial Sequence
  Synthetic oligonucleotide
tcaagtgcccaggcacagcaagtgatgcacttggc

SEQ ID NO: 16900 - DNA, 38 bp, Artificial Sequence
  Synthetic oligonucleotide
tcatggggacgttcttaatgtagtgtattcgtcagtga

SEQ ID NO: 16901 - DNA, 35 bp, Artificial Sequence
  Synthetic oligonucleotide
tcattctcggattgacattctgggcgatctaaagt

SEQ ID NO: 16902 - DNA, 36 bp, Artificial Sequence
  Synthetic oligonucleotide
tccatagggctggtgagtttgcaatggcgaattcaa

SEQ ID NO: 16903 - DNA, 37 bp, Artificial Sequence
  Synthetic oligonucleotide
tccctacggaatcctaaggggcagacttggttcctga

SEQ ID NO: 16904 - DNA, 35 bp, Artificial Sequence
  Synthetic oligonucleotide
tcgaaggtctcgcagaaaaaactctatgattccgg

SEQ ID NO: 16905 - DNA, 37 bp, Artificial Sequence
  Synthetic oligonucleotide
tcgacacctgaagacaaacagtcggggcgctcgctga

SEQ ID NO: 16906 - DNA, 36 bp, Artificial Sequence
  Synthetic oligonucleotide
tcgactcttagagatgtctacgactggggtcttgca

SEQ ID NO: 16907 - DNA, 36 bp, Artificial Sequence
  Synthetic oligonucleotide
tcgggagggcctcccgtagagatattcattgctgga

SEQ ID NO: 16908 - DNA, 35 bp, Artificial Sequence
  Synthetic oligonucleotide
tcgtggggtgtacagaaaactcttgctcgtccatg

SEQ ID NO: 16909 - DNA, 38 bp, Artificial Sequence
  Synthetic oligonucleotide
tctgccctcatgatcgaattagccttgtggctatctga

SEQ ID NO: 16910 - DNA, 37 bp, Artificial Sequence
  Synthetic oligonucleotide
tctgctcaacagagtgcgaccttatacgtactaggga

SEQ ID NO: 16911 - DNA, 38 bp, Artificial Sequence
  Synthetic oligonucleotide
tctgtgcgcgtagagtgttggatggtctgctctattga

SEQ ID NO: 16912 - DNA, 35 bp, Artificial Sequence
  Synthetic oligonucleotide
tgaacagaagtcttagcttatgtcgaatgagactg

SEQ ID NO: 16913 - DNA, 36 bp, Artificial Sequence
  Synthetic oligonucleotide
tgaccatggattgccagttagggtactaccgtccca

SEQ ID NO: 16914 - DNA, 38 bp, Artificial Sequence
  Synthetic oligonucleotide
tgacccccctcaagagatccttcggttcacctcgatga

SEQ ID NO: 16915 - DNA, 35 bp, Artificial Sequence
  Synthetic oligonucleotide
tgataatgaccgtcgagttagagcgcaaatgagca

SEQ ID NO: 16916 - DNA, 37 bp, Artificial Sequence
  Synthetic oligonucleotide
tgcacaggggcatgtaatgatggatgtcaggtcggga

SEQ ID NO: 16917 - DNA, 36 bp, Artificial Sequence
  Synthetic oligonucleotide
tgctagtcctgagagaagagggggttctgccgacga

SEQ ID NO: 16918 - DNA, 32 bp, Artificial Sequence
  Synthetic oligonucleotide
tgctgccatcatggctgtggcccccctcccga

SEQ ID NO: 16919 - DNA, 36 bp, Artificial Sequence
  Synthetic oligonucleotide
tgctttgacgttcaactccgagagagatagtgatca

SEQ ID NO: 16920 - DNA, 36 bp, Artificial Sequence
  Synthetic oligonucleotide
tgggtaggtgtctacgagttaacgaactccagggga

SEQ ID NO: 16921 - DNA, 36 bp, Artificial Sequence
  Synthetic oligonucleotide
tgtacatgtcatcttcatttgtggccgcaggaacaa

SEQ ID NO: 16922 - DNA, 35 bp, Artificial Sequence
  Synthetic oligonucleotide
tgtccagtgcttcggcgtcctgacgtttgtactca

SEQ ID NO: 16923 - DNA, 35 bp, Artificial Sequence
  Synthetic oligonucleotide
tgttcgggtgtttgggatttgtaaggctttggaat

SEQ ID NO: 16924 - DNA, 36 bp, Artificial Sequence
  Synthetic oligonucleotide
tgttgctttaagacggctacaatagctactgatgga

SEQ ID NO: 16925 - DNA, 35 bp, Artificial Sequence
  Synthetic oligonucleotide
ttattgcatcatggaagtcacgcaataggggagtg

SEQ ID NO: 16926 - DNA, 35 bp, Artificial Sequence
  Synthetic oligonucleotide
ttcaacgaaaggagatgcagacgaggcatatttgt

SEQ ID NO: 16927 - DNA, 35 bp, Artificial Sequence
  Synthetic oligonucleotide
ttcagctctccgggcgatcaaaggactgacagggg

SEQ ID NO: 16928 - DNA, 36 bp, Artificial Sequence
  Synthetic oligonucleotide
ttcataactatgtctaatgctttagtgcgaaatata

SEQ ID NO: 16929 - DNA, 35 bp, Artificial Sequence
  Synthetic oligonucleotide
ttccgctgagaatatcggtcacggttaaaggcctg

SEQ ID NO: 16930 - DNA, 36 bp, Artificial Sequence
  Synthetic oligonucleotide
ttgaagtacggtatattatgctgaggagagggttta

SEQ ID NO: 16931 - DNA, 35 bp, Artificial Sequence
  Synthetic oligonucleotide
ttgcgcatgaactggaagctttgtccattgtacac

SEQ ID NO: 16932 - DNA, 37 bp, Artificial Sequence
  Synthetic oligonucleotide
ttgcggtatggtgctaccttgtgaatatccgcgggga

SEQ ID NO: 16933 - DNA, 38 bp, Artificial Sequence
  Synthetic oligonucleotide
ttggttaagccccaaacgtccgaggtataagctacgga

SEQ ID NO: 16934 - DNA, 36 bp, Artificial Sequence
  Synthetic oligonucleotide
tttgggacgaacctaaggctattgcccacaaaggga

SEQ ID NO: 16935 - DNA, 36 bp, Artificial Sequence
  Synthetic oligonucleotide
ccacacctctccgcaccctcccccggacgaggagca

SEQ ID NO: 16936 - DNA, 36 bp, Artificial Sequence
  Synthetic oligonucleotide
gtagaactgaacaataccggcccgtccggcgattta

SEQ ID NO: 16937 - DNA, 36 bp, Artificial Sequence
  Synthetic oligonucleotide
tttgcagtttcgggtgtgctcccccctagcacccta

SEQ ID NO: 16938 - DNA, 37 bp, Artificial Sequence
  Synthetic oligonucleotide
tatgtctattagcctcaggcaaccttgcataggagga

SEQ ID NO: 16939 - DNA, 36 bp, Artificial Sequence
  Synthetic oligonucleotide
tgactgatgttattgaacggtagaagagcggtgata

SEQ ID NO: 16940 - DNA, 36 bp, Artificial Sequence
  Synthetic oligonucleotide
tgcacgtaatcttacacaaagtgttgaacagtatga

SEQ ID NO: 16941 - DNA, 37 bp, Artificial Sequence
  Synthetic oligonucleotide
agttccgacggagttcaagatggtcttaatggtgaga

SEQ ID NO: 16942 - DNA, 35 bp, Artificial Sequence
  Synthetic oligonucleotide
atgaaggttgactacgggcaccaaccccgtggtgc

SEQ ID NO: 16943 - DNA, 36 bp, Artificial Sequence
  Synthetic oligonucleotide
tgtattaatgcctcggacattgtacagggggaagga

SEQ ID NO: 16944 - DNA, 35 bp, Artificial Sequence
  Synthetic oligonucleotide
ttgccccccgttctcaacgtgatgcacgcgcttct

SEQ ID NO: 16945 - DNA, 36 bp, Artificial Sequence
  Synthetic oligonucleotide
accacacatagtatggtgcttagggttattcgctaa

SEQ ID NO: 16946 - DNA, 34 bp, Artificial Sequence
  Synthetic oligonucleotide
gttgccagtccagtgggtacgaaacgtagaagag

SEQ ID NO: 16947 - DNA, 34 bp, Artificial Sequence
  Synthetic oligonucleotide
aacgcgtgtggagaacatatgattttacgattag

SEQ ID NO: 16948 - DNA, 37 bp, Artificial Sequence
  Synthetic oligonucleotide
acgagatcggcacatgaccgaaattcgccgctggaga

SEQ ID NO: 16949 - DNA, 35 bp, Artificial Sequence
  Synthetic oligonucleotide
atacggagaaggtccgtgctttgccttggcgcccc

SEQ ID NO: 16950 - DNA, 35 bp, Artificial Sequence
  Synthetic oligonucleotide
attgggattggcttcttggttaagtgctttgcaag

SEQ ID NO: 16951 - DNA, 35 bp, Artificial Sequence
  Synthetic oligonucleotide
atttagcactatatattgcgtggggtaaccgaccc

SEQ ID NO: 16952 - DNA, 38 bp, Artificial Sequence
  Synthetic oligonucleotide
gatgcaatgtgttgccactggacacaggcgatagttga

SEQ ID NO: 16953 - DNA, 36 bp, Artificial Sequence
  Synthetic oligonucleotide
gctcaaatgcatggattaagaatacagacgcgccaa

SEQ ID NO: 16954 - DNA, 36 bp, Artificial Sequence
  Synthetic oligonucleotide
taaagttctggcggggaggttgtaagtaactcagca

SEQ ID NO: 16955 - DNA, 35 bp, Artificial Sequence
  Synthetic oligonucleotide
tgtctcgcaagttcccaggtaggattttgccagta

SEQ ID NO: 16956 - DNA, 35 bp, Artificial Sequence
  Synthetic oligonucleotide
ccatgagggaatgcattgtctgcgtaccgagtaga

SEQ ID NO: 16957 - DNA, 36 bp, Artificial Sequence
  Synthetic oligonucleotide
gggatgcatctgctacgagcgtatgaaaacgattaa

SEQ ID NO: 16958 - DNA, 38 bp, Artificial Sequence
  Synthetic oligonucleotide
acagctccgccggatgggtgtacgtcaaggatgagtga

SEQ ID NO: 16959 - DNA, 37 bp, Artificial Sequence
  Synthetic oligonucleotide
agggcaaggaacgattaatatggtgagcacgaagtga

SEQ ID NO: 16960 - DNA, 36 bp, Artificial Sequence
  Synthetic oligonucleotide
agggtggcgctgagatcgatagacagcgggcctgga

SEQ ID NO: 16961 - DNA, 37 bp, Artificial Sequence
  Synthetic oligonucleotide
cacgtagagtggggaaggtcccaaatctataggcgga

SEQ ID NO: 16962 - DNA, 36 bp, Artificial Sequence
  Synthetic oligonucleotide
gaaccccggtagtcatatgactttggggacctccga

SEQ ID NO: 16963 - DNA, 36 bp, Artificial Sequence
  Synthetic oligonucleotide
gacacctcgtgcaatacaaaaggagtcagtttacga

SEQ ID NO: 16964 - DNA, 36 bp, Artificial Sequence
  Synthetic oligonucleotide
gacggggaatcggtactgtatacatccgaagtagta

SEQ ID NO: 16965 - DNA, 37 bp, Artificial Sequence
  Synthetic oligonucleotide
gcaagctcaaatctgatttcagacgggttttgttcga

SEQ ID NO: 16966 - DNA, 38 bp, Artificial Sequence
  Synthetic oligonucleotide
gcacttactgtcacgtgtgcatgaatcgtgggccatga

SEQ ID NO: 16967 - DNA, 36 bp, Artificial Sequence
  Synthetic oligonucleotide
gccacaggcgcgacttaggtgatgtaaaacggggta

SEQ ID NO: 16968 - DNA, 35 bp, Artificial Sequence
  Synthetic oligonucleotide
gctgtcttacaattaatattaggcatttgtggttc

SEQ ID NO: 16969 - DNA, 38 bp, Artificial Sequence
  Synthetic oligonucleotide
ggaggcccagccggggactgcctggaattacgctgtga

SEQ ID NO: 16970 - DNA, 35 bp, Artificial Sequence
  Synthetic oligonucleotide
ggtaggaaatgtgctatagaatgggtctgctgatt

SEQ ID NO: 16971 - DNA, 36 bp, Artificial Sequence
  Synthetic oligonucleotide
ggtggaattacgttcgacgtgcgtttcggttcaata

SEQ ID NO: 16972 - DNA, 38 bp, Artificial Sequence
  Synthetic oligonucleotide
gtatggttcctaaaaatgtgtcatgatggtgcatatga

SEQ ID NO: 16973 - DNA, 35 bp, Artificial Sequence
  Synthetic oligonucleotide
gtctcctccacggctcctgggaggttcatgggttc

SEQ ID NO: 16974 - DNA, 36 bp, Artificial Sequence
  Synthetic oligonucleotide
gtgtcttttggcttttcactcactgagaagacgtaa

SEQ ID NO: 16975 - DNA, 37 bp, Artificial Sequence
  Synthetic oligonucleotide
tcacggtaacgatggaacctcaccggctagccggtga

SEQ ID NO: 16976 - DNA, 38 bp, Artificial Sequence
  Synthetic oligonucleotide
tcctgaggtctgagataattggaagtgcatcgaagtga

SEQ ID NO: 16977 - DNA, 38 bp, Artificial Sequence
  Synthetic oligonucleotide
tgtaagtctaacgaagtttaaaggtatactgtgcatga

SEQ ID NO: 16978 - DNA, 37 bp, Artificial Sequence
  Synthetic oligonucleotide
tgtgaggccaccatagcggggtggtcgccggttccga

SEQ ID NO: 16979 - DNA, 36 bp, Artificial Sequence
  Synthetic oligonucleotide
ttagagttacaaagacccatacttatccttaagaga

SEQ ID NO: 16980 - DNA, 36 bp, Artificial Sequence
  Synthetic oligonucleotide
tttaaagtgcgcccgactgcttgtctacggatgaaa

SEQ ID NO: 16981 - DNA, 36 bp, Artificial Sequence
  Synthetic oligonucleotide
tttgtggaggtcaatggatcttactagcgcccagca

SEQ ID NO: 16982 - DNA, 36 bp, Artificial Sequence
  Synthetic oligonucleotide
taagttaactaatttgcagtcgtgtgggataacaga

SEQ ID NO: 16983 - DNA, 35 bp, Artificial Sequence
  Synthetic oligonucleotide
aagatcgcacggaagtcaaacttctatctggcgac

SEQ ID NO: 16984 - DNA, 35 bp, Artificial Sequence
  Synthetic oligonucleotide
aagcaacggtactgagtcgatgcgttattatggcc

SEQ ID NO: 16985 - DNA, 36 bp, Artificial Sequence
  Synthetic oligonucleotide
aatcccgagatagaaaattcgggtaagcgtgacgta

SEQ ID NO: 16986 - DNA, 37 bp, Artificial Sequence
  Synthetic oligonucleotide
acaaccccgaggtctgccccctccaggacatctggga

SEQ ID NO: 16987 - DNA, 36 bp, Artificial Sequence
  Synthetic oligonucleotide
actactaacagtattgcgggtcatgtattcagtgga

SEQ ID NO: 16988 - DNA, 38 bp, Artificial Sequence
  Synthetic oligonucleotide
actactccgccgtgttgactgcacgatacacgtcatga

SEQ ID NO: 16989 - DNA, 38 bp, Artificial Sequence
  Synthetic oligonucleotide
acttaatgagtattggtcatagatgggcgtctccgtga

SEQ ID NO: 16990 - DNA, 36 bp, Artificial Sequence
  Synthetic oligonucleotide
agctatcaagactgtcatgtaacatcttacttggaa

SEQ ID NO: 16991 - DNA, 35 bp, Artificial Sequence
  Synthetic oligonucleotide
agggcttggtcatgcactattggggacgaacgata

SEQ ID NO: 16992 - DNA, 36 bp, Artificial Sequence
  Synthetic oligonucleotide
agtacgctatacaggagacggttcgcggactttgca

SEQ ID NO: 16993 - DNA, 35 bp, Artificial Sequence
  Synthetic oligonucleotide
atagctagacttgaaccgcatatacgtcctaagcg

SEQ ID NO: 16994 - DNA, 38 bp, Artificial Sequence
  Synthetic oligonucleotide
atatcggctggggatatgagatttaaccccccctttga

SEQ ID NO: 16995 - DNA, 37 bp, Artificial Sequence
  Synthetic oligonucleotide
attttgtcagaccccggggtataccagttgtgacgga

SEQ ID NO: 16996 - DNA, 37 bp, Artificial Sequence
  Synthetic oligonucleotide
caacaactaattggcagaagatgagtcctggctaaga

SEQ ID NO: 16997 - DNA, 38 bp, Artificial Sequence
  Synthetic oligonucleotide
ccagtccagtgcatgttatgttcccgggccatctatga

SEQ ID NO: 16998 - DNA, 38 bp, Artificial Sequence
  Synthetic oligonucleotide
cccgagcacatgaaaagtgtgttttagtacaagtctga

SEQ ID NO: 16999 - DNA, 37 bp, Artificial Sequence
  Synthetic oligonucleotide
cctgttgaagacgcagggcgtaaaattacatatccga

SEQ ID NO: 17000 - DNA, 36 bp, Artificial Sequence
  Synthetic oligonucleotide
cgcggggactgagtagtatttactcaccccttgcta

SEQ ID NO: 17001 - DNA, 35 bp, Artificial Sequence
  Synthetic oligonucleotide
cgtaattgaatgaggcatctggtcccgacgtacaa

SEQ ID NO: 17002 - DNA, 35 bp, Artificial Sequence
  Synthetic oligonucleotide
ctaggatacgccagactgttcttccggcctacctc

SEQ ID NO: 17003 - DNA, 36 bp, Artificial Sequence
  Synthetic oligonucleotide
cttgatggaacttactgatcgcgcccccctccaaga

SEQ ID NO: 17004 - DNA, 35 bp, Artificial Sequence
  Synthetic oligonucleotide
gaagttaatggctgccctgggtcgtaaaattagcc

SEQ ID NO: 17005 - DNA, 37 bp, Artificial Sequence
  Synthetic oligonucleotide
gagacccttggttttgcggcctagtctgtgattacga

SEQ ID NO: 17006 - DNA, 37 bp, Artificial Sequence
  Synthetic oligonucleotide
gaggtggggtatttggcaacgggttaggatttcccga

SEQ ID NO: 17007 - DNA, 37 bp, Artificial Sequence
  Synthetic oligonucleotide
gagtcataaggctaatattggtagtcagtatcctgga

SEQ ID NO: 17008 - DNA, 35 bp, Artificial Sequence
  Synthetic oligonucleotide
gataaccacccggttcaacgacttacgtaaaagag

SEQ ID NO: 17009 - DNA, 38 bp, Artificial Sequence
  Synthetic oligonucleotide
gcaccagggggtctaggagcaggttatgtggcctttga

SEQ ID NO: 17010 - DNA, 36 bp, Artificial Sequence
  Synthetic oligonucleotide
gcagtatattagggcgacttctcatcgtgcttggca

SEQ ID NO: 17011 - DNA, 38 bp, Artificial Sequence
  Synthetic oligonucleotide
gccgcatgaagcaggacgtagtattattctacggggga

SEQ ID NO: 17012 - DNA, 35 bp, Artificial Sequence
  Synthetic oligonucleotide
gccggaaggagcacacgggttatactattagtaat

SEQ ID NO: 17013 - DNA, 35 bp, Artificial Sequence
  Synthetic oligonucleotide
gcctccgaagttcagtggataggtggagcgaaatt

SEQ ID NO: 17014 - DNA, 36 bp, Artificial Sequence
  Synthetic oligonucleotide
gcgaatgaccattgcttcgtggtatgcgtatggcga

SEQ ID NO: 17015 - DNA, 37 bp, Artificial Sequence
  Synthetic oligonucleotide
gcgagctgcaggtttaaggagttgtatagcttggcga

SEQ ID NO: 17016 - DNA, 38 bp, Artificial Sequence
  Synthetic oligonucleotide
gcgcacgtagtgacaactgaaacataggctagggatga

SEQ ID NO: 17017 - DNA, 34 bp, Artificial Sequence
  Synthetic oligonucleotide
gcggacatgacgtttgatatgggtgaattcccga

SEQ ID NO: 17018 - DNA, 38 bp, Artificial Sequence
  Synthetic oligonucleotide
ggccagatccctccggtgctttaaggaatccgggatga

SEQ ID NO: 17019 - DNA, 36 bp, Artificial Sequence
  Synthetic oligonucleotide
ggcgcaggtaagctggaatgcgcgaacttcttagga

SEQ ID NO: 17020 - DNA, 38 bp, Artificial Sequence
  Synthetic oligonucleotide
gggagggccacaaaagtggtatacggggcatgcactga

SEQ ID NO: 17021 - DNA, 37 bp, Artificial Sequence
  Synthetic oligonucleotide
gggcgaaactgttcgcgatgcaaagacattcctgtga

SEQ ID NO: 17022 - DNA, 38 bp, Artificial Sequence
  Synthetic oligonucleotide
ggtatcgctagatcggtaaggtaatcattgttatgtga

SEQ ID NO: 17023 - DNA, 37 bp, Artificial Sequence
  Synthetic oligonucleotide
gtatcggctaacccgttggatatgggttcaccgtcga

SEQ ID NO: 17024 - DNA, 35 bp, Artificial Sequence
  Synthetic oligonucleotide
gtcgactccacggggcaatcgtcgcccggggatgc

SEQ ID NO: 17025 - DNA, 35 bp, Artificial Sequence
  Synthetic oligonucleotide
gtctcgagccccagtccttgatgagccacatctac

SEQ ID NO: 17026 - DNA, 36 bp, Artificial Sequence
  Synthetic oligonucleotide
gtgacagaggatctctacaggtagcaagtccgttta

SEQ ID NO: 17027 - DNA, 36 bp, Artificial Sequence
  Synthetic oligonucleotide
gtgcccgctgcgttaagtaggatgcaccgggttaga

SEQ ID NO: 17028 - DNA, 38 bp, Artificial Sequence
  Synthetic oligonucleotide
gtgccgggagactcaggtcaaatggcatcctcgcatga

SEQ ID NO: 17029 - DNA, 36 bp, Artificial Sequence
  Synthetic oligonucleotide
gtggaagctgatattattatagcggggggaaagcta

SEQ ID NO: 17030 - DNA, 36 bp, Artificial Sequence
  Synthetic oligonucleotide
gtggaggaaactaatctacaagctatggtgcccgga

SEQ ID NO: 17031 - DNA, 37 bp, Artificial Sequence
  Synthetic oligonucleotide
gtgggtgcatccgtgctagccgtattatgacgacaga

SEQ ID NO: 17032 - DNA, 36 bp, Artificial Sequence
  Synthetic oligonucleotide
gtggtctcgaatcgagtgcgttatgcagtctgtaga

SEQ ID NO: 17033 - DNA, 38 bp, Artificial Sequence
  Synthetic oligonucleotide
gttggtgcccgtcttggagtttccttaacagactctga

SEQ ID NO: 17034 - DNA, 35 bp, Artificial Sequence
  Synthetic oligonucleotide
gttgtatttggataacttcctctctaggttggctt

SEQ ID NO: 17035 - DNA, 36 bp, Artificial Sequence
  Synthetic oligonucleotide
taaacagccggtcgtttgtagagtttcacttttgga

SEQ ID NO: 17036 - DNA, 38 bp, Artificial Sequence
  Synthetic oligonucleotide
taatagagaacgtctgcaaagtaaaccttactctgtga

SEQ ID NO: 17037 - DNA, 36 bp, Artificial Sequence
  Synthetic oligonucleotide
tacaggactgccagttagatttgattacataacaca

SEQ ID NO: 17038 - DNA, 35 bp, Artificial Sequence
  Synthetic oligonucleotide
tacatgacgacggttcttaaaaattgagctctaag

SEQ ID NO: 17039 - DNA, 37 bp, Artificial Sequence
  Synthetic oligonucleotide
tagaaaccacgttcgtcgtcttacatgacacggtcga

SEQ ID NO: 17040 - DNA, 36 bp, Artificial Sequence
  Synthetic oligonucleotide
tagcaaggcacgcctaaatgcctgtgaacgtgtata

SEQ ID NO: 17041 - DNA, 35 bp, Artificial Sequence
  Synthetic oligonucleotide
taggtcatgattggcaagcgataggaactatctgt

SEQ ID NO: 17042 - DNA, 37 bp, Artificial Sequence
  Synthetic oligonucleotide
tagtaagaccgtcttgggaagagtgagtctacaccga

SEQ ID NO: 17043 - DNA, 38 bp, Artificial Sequence
  Synthetic oligonucleotide
tatctggagccactagggcttgcataagaaattgctga

SEQ ID NO: 17044 - DNA, 34 bp, Artificial Sequence
  Synthetic oligonucleotide
tcagtcaagataccctgaaggggacaccatgata

SEQ ID NO: 17045 - DNA, 35 bp, Artificial Sequence
  Synthetic oligonucleotide
tcataattaacgggcacaaagggcttattgtggct

SEQ ID NO: 17046 - DNA, 37 bp, Artificial Sequence
  Synthetic oligonucleotide
tccacagactagccgtcctgttcgactatactagtga

SEQ ID NO: 17047 - DNA, 36 bp, Artificial Sequence
  Synthetic oligonucleotide
tccagactatgcgagggctccacactaggattatca

SEQ ID NO: 17048 - DNA, 35 bp, Artificial Sequence
  Synthetic oligonucleotide
tcccgcatatgtccttttagtataatccaggctcc

SEQ ID NO: 17049 - DNA, 37 bp, Artificial Sequence
  Synthetic oligonucleotide
tcccttagggggaaccgcgtccaaaacaagtgcggga

SEQ ID NO: 17050 - DNA, 36 bp, Artificial Sequence
  Synthetic oligonucleotide
tcgaacaaacgaatctccctgctagtgcgaccacaa

SEQ ID NO: 17051 - DNA, 36 bp, Artificial Sequence
  Synthetic oligonucleotide
tctataacgttccagtctggtaaactacaattgaca

SEQ ID NO: 17052 - DNA, 35 bp, Artificial Sequence
  Synthetic oligonucleotide
tcttaccagtcttttcaaaatggttcgtccctaag

SEQ ID NO: 17053 - DNA, 36 bp, Artificial Sequence
  Synthetic oligonucleotide
tgaaaccaatcgcgggtacctcgtggatgacgggta

SEQ ID NO: 17054 - DNA, 37 bp, Artificial Sequence
  Synthetic oligonucleotide
tgacgaaagtagtgcttctatcgctattattagcgga

SEQ ID NO: 17055 - DNA, 37 bp, Artificial Sequence
  Synthetic oligonucleotide
tgcttggtcgcaaatgagggtttgagcacggagtgga

SEQ ID NO: 17056 - DNA, 38 bp, Artificial Sequence
  Synthetic oligonucleotide
tggagcggattgagttcaatttctgatagtaggcctga

SEQ ID NO: 17057 - DNA, 37 bp, Artificial Sequence
  Synthetic oligonucleotide
tgggccttgtagcagaacaattcaaatgccatcttga

SEQ ID NO: 17058 - DNA, 35 bp, Artificial Sequence
  Synthetic oligonucleotide
tgtacgacgtaagcggacgtccaaaggcttttcct

SEQ ID NO: 17059 - DNA, 37 bp, Artificial Sequence
  Synthetic oligonucleotide
tgtccccgagactgcgtctatagtccctcaaggccga

SEQ ID NO: 17060 - DNA, 36 bp, Artificial Sequence
  Synthetic oligonucleotide
tgtggatgttgtcgtttcgcaggtccgtatcggcga

SEQ ID NO: 17061 - DNA, 38 bp, Artificial Sequence
  Synthetic oligonucleotide
tgtggcgctattagggacacatgtgtacgtagtcctga

SEQ ID NO: 17062 - DNA, 37 bp, Artificial Sequence
  Synthetic oligonucleotide
tgttaggcacatcggttctgcgacagtggaatcggga

SEQ ID NO: 17063 - DNA, 36 bp, Artificial Sequence
  Synthetic oligonucleotide
tgttttcaaggcctcacttgtttgcgagcatcctta

SEQ ID NO: 17064 - DNA, 38 bp, Artificial Sequence
  Synthetic oligonucleotide
ttagcgaagttagggctctaggaagttgtccgtcgtga

SEQ ID NO: 17065 - DNA, 35 bp, Artificial Sequence
  Synthetic oligonucleotide
ttcctcacgctgactctatggccgattcgtacagt

SEQ ID NO: 17066 - DNA, 37 bp, Artificial Sequence
  Synthetic oligonucleotide
ttcgcccgataggttacgagaagggggaacggaacga

SEQ ID NO: 17067 - DNA, 37 bp, Artificial Sequence
  Synthetic oligonucleotide
ttctctgcccgcgacgttttgcagtcccgtcccttaa

SEQ ID NO: 17068 - DNA, 37 bp, Artificial Sequence
  Synthetic oligonucleotide
ttgagtctcagtaaagtgtggcgcaataatgagcgga

SEQ ID NO: 17069 - DNA, 37 bp, Artificial Sequence
  Synthetic oligonucleotide
ttgcccgtcccctagagggtcgggattggctgcatga

SEQ ID NO: 17070 - DNA, 37 bp, Artificial Sequence
  Synthetic oligonucleotide
tttgctgcaaaaataagtagtcagatagctctgttga

SEQ ID NO: 17071 - DNA, 37 bp, Artificial Sequence
  Synthetic oligonucleotide
acccgagtgtagtcctggagttaaaatatcttagaga

SEQ ID NO: 17072 - DNA, 38 bp, Artificial Sequence
  Synthetic oligonucleotide
atgcacactacctgaggtctataattatcatgtgttga

SEQ ID NO: 17073 - DNA, 38 bp, Artificial Sequence
  Synthetic oligonucleotide
gaatgtgcacgatgttgagcatcaggaggttgaagtga

SEQ ID NO: 17074 - DNA, 36 bp, Artificial Sequence
  Synthetic oligonucleotide
gagaccggccgttgaccatccggccagtgcgcacaa

SEQ ID NO: 17075 - DNA, 35 bp, Artificial Sequence
  Synthetic oligonucleotide
gctcagggtgtacgaatgcagatcactactgtaga

SEQ ID NO: 17076 - DNA, 35 bp, Artificial Sequence
  Synthetic oligonucleotide
taggtcaacagcctctccaacgtggcgataccccc

SEQ ID NO: 17077 - DNA, 37 bp, Artificial Sequence
  Synthetic oligonucleotide
tatggcaatgttatcgtggtcaaagtaggaggatgga

SEQ ID NO: 17078 - DNA, 35 bp, Artificial Sequence
  Synthetic oligonucleotide
gttagactcagtgtcattgtaggtagtacgtgcga

SEQ ID NO: 17079 - DNA, 35 bp, Artificial Sequence
  Synthetic oligonucleotide
atacgaataaactaggccaaacgttgcatcgctaa

SEQ ID NO: 17080 - DNA, 36 bp, Artificial Sequence
  Synthetic oligonucleotide
atgcatgttaacgatcctaatgtgatgtgggttaga

SEQ ID NO: 17081 - DNA, 37 bp, Artificial Sequence
  Synthetic oligonucleotide
gctgttgttttcagcgatggccagagtagccaaatga

SEQ ID NO: 17082 - DNA, 35 bp, Artificial Sequence
  Synthetic oligonucleotide
gtgcatataatgatgcaagtacaatctgcaagatt

SEQ ID NO: 17083 - DNA, 36 bp, Artificial Sequence
  Synthetic oligonucleotide
ttggaaactagaatggtgactttgtgactccatgaa

SEQ ID NO: 17084 - DNA, 35 bp, Artificial Sequence
  Synthetic oligonucleotide
accacaagatgcgagcaggaaattagcgagggtgg

SEQ ID NO: 17085 - DNA, 37 bp, Artificial Sequence
  Synthetic oligonucleotide
acctacacgtcccgaaggtcaagatagctgtaaacga

SEQ ID NO: 17086 - DNA, 37 bp, Artificial Sequence
  Synthetic oligonucleotide
acgactctcatttggaaaaagtcattgttgtatctga

SEQ ID NO: 17087 - DNA, 38 bp, Artificial Sequence
  Synthetic oligonucleotide
atgtcaggtgatcagtcacaattaagcggagcgaatga

SEQ ID NO: 17088 - DNA, 37 bp, Artificial Sequence
  Synthetic oligonucleotide
ccaaacgtgcgcggcttggattctggataactggcga

SEQ ID NO: 17089 - DNA, 38 bp, Artificial Sequence
  Synthetic oligonucleotide
gaccagttgtcggcctgcctcatctgccacgtcaatga

SEQ ID NO: 17090 - DNA, 38 bp, Artificial Sequence
  Synthetic oligonucleotide
gatggctccgggagtgcgcatacgtaatggctggctga

SEQ ID NO: 17091 - DNA, 37 bp, Artificial Sequence
  Synthetic oligonucleotide
gcatcggctcccgagctcaatgacgatacgttgcaga

SEQ ID NO: 17092 - DNA, 35 bp, Artificial Sequence
  Synthetic oligonucleotide
gctctcctactggtaagttcactgagaggacagta

SEQ ID NO: 17093 - DNA, 37 bp, Artificial Sequence
  Synthetic oligonucleotide
ggaaattacttagatctctgaaagttcgcattgcaga

SEQ ID NO: 17094 - DNA, 36 bp, Artificial Sequence
  Synthetic oligonucleotide
gggaaaggattagcctcatctatgaggcggtgaaca

SEQ ID NO: 17095 - DNA, 37 bp, Artificial Sequence
  Synthetic oligonucleotide
gggttatacccctacggctggaggcctatatacaaga

SEQ ID NO: 17096 - DNA, 35 bp, Artificial Sequence
  Synthetic oligonucleotide
gtacagtcttcaggtgcggccatctctccaggaat

SEQ ID NO: 17097 - DNA, 34 bp, Artificial Sequence
  Synthetic oligonucleotide
gtatgaagatcacagtaggtgtgatcagaggtct

SEQ ID NO: 17098 - DNA, 28 bp, Artificial Sequence
  Synthetic oligonucleotide
gtctgcacaccaaggagtaaccgctaga

SEQ ID NO: 17099 - DNA, 38 bp, Artificial Sequence
  Synthetic oligonucleotide
gtctgtcgaatttgatcgcgcattcactaacctgttga

SEQ ID NO: 17100 - DNA, 35 bp, Artificial Sequence
  Synthetic oligonucleotide
taagtgcggtggatgcccagcgtaatttctaagtt

SEQ ID NO: 17101 - DNA, 37 bp, Artificial Sequence
  Synthetic oligonucleotide
tacgaagactgttagagtcaaactgtagacccataga

SEQ ID NO: 17102 - DNA, 35 bp, Artificial Sequence
  Synthetic oligonucleotide
tgcctacggcaccagaggcatgttagttactgcgt

SEQ ID NO: 17103 - DNA, 36 bp, Artificial Sequence
  Synthetic oligonucleotide
ttcgcctggtatcatgccgttgaatcacagacccga

SEQ ID NO: 17104 - DNA, 37 bp, Artificial Sequence
  Synthetic oligonucleotide
ttgacaagctgttcagtttgtggtaaattggtctgga

SEQ ID NO: 17105 - DNA, 36 bp, Artificial Sequence
  Synthetic oligonucleotide
ttgcagtcaacaggcctgcacgcgtgctggcttaaa

SEQ ID NO: 17106 - DNA, 36 bp, Artificial Sequence
  Synthetic oligonucleotide
tttgacatcgtactgggctactggtgccagtgttca

SEQ ID NO: 17107 - DNA, 35 bp, Artificial Sequence
  Synthetic oligonucleotide
gacttagcgggaacagagtatgggatccagcgccg

SEQ ID NO: 17108 - DNA, 38 bp, Artificial Sequence
  Synthetic oligonucleotide
ttggtccggaaggcgtatccacgccaactgacgggtga

SEQ ID NO: 17109 - DNA, 37 bp, Artificial Sequence
  Synthetic oligonucleotide
aaagaggtaagcccaatcacctaagatgaggtcaaga

SEQ ID NO: 17110 - DNA, 38 bp, Artificial Sequence
  Synthetic oligonucleotide
aacctcctgatattcatgactgttgtacaggttcttga

SEQ ID NO: 17111 - DNA, 35 bp, Artificial Sequence
  Synthetic oligonucleotide
aacggtggttgggagtgctttttgcctcgacgcac

SEQ ID NO: 17112 - DNA, 38 bp, Artificial Sequence
  Synthetic oligonucleotide
aacgtggcgtgtgcacgaatagttaagctaagtaatga

SEQ ID NO: 17113 - DNA, 37 bp, Artificial Sequence
  Synthetic oligonucleotide
aactgcagagctggatccacccatatacgacacacga

SEQ ID NO: 17114 - DNA, 35 bp, Artificial Sequence
  Synthetic oligonucleotide
aagaccgtggtaggtaattgttagggcctgccgag

SEQ ID NO: 17115 - DNA, 37 bp, Artificial Sequence
  Synthetic oligonucleotide
aagcaatggcactggttcgatgaattgtgagaatcga

SEQ ID NO: 17116 - DNA, 38 bp, Artificial Sequence
  Synthetic oligonucleotide
aagtggcgagccgcattcgcaactggattgggtgatga

SEQ ID NO: 17117 - DNA, 36 bp, Artificial Sequence
  Synthetic oligonucleotide
aagttgtgaagggtgcataaaacaggcttgtcgtaa

SEQ ID NO: 17118 - DNA, 36 bp, Artificial Sequence
  Synthetic oligonucleotide
aatgggttaaaatcaccagagagaagttgggtcata

SEQ ID NO: 17119 - DNA, 36 bp, Artificial Sequence
  Synthetic oligonucleotide
aatgtggggtgatcaaggtagatagtctgacaggaa

SEQ ID NO: 17120 - DNA, 36 bp, Artificial Sequence
  Synthetic oligonucleotide
aatttcaagaaggcccgcgtatgcgtaggagcccaa

SEQ ID NO: 17121 - DNA, 38 bp, Artificial Sequence
  Synthetic oligonucleotide
accgtacaaaagcgtacgttatacgtatacactcatga

SEQ ID NO: 17122 - DNA, 37 bp, Artificial Sequence
  Synthetic oligonucleotide
acctgtaggcacttagcgtggggtgtttggcgtaaga

SEQ ID NO: 17123 - DNA, 36 bp, Artificial Sequence
  Synthetic oligonucleotide
actacagtcaaagattctgagttcgcgtagtaccga

SEQ ID NO: 17124 - DNA, 35 bp, Artificial Sequence
  Synthetic oligonucleotide
actccagttatttagttgcggggcacaaggtttag

SEQ ID NO: 17125 - DNA, 38 bp, Artificial Sequence
  Synthetic oligonucleotide
actgagttgatgatcctcgggcccggatttagggttga

SEQ ID NO: 17126 - DNA, 35 bp, Artificial Sequence
  Synthetic oligonucleotide
acttcattgcgttcggtaatgctagtgctgccccc

SEQ ID NO: 17127 - DNA, 35 bp, Artificial Sequence
  Synthetic oligonucleotide
agcgggactacagcgtgcgacaaaaattgctagtt

SEQ ID NO: 17128 - DNA, 35 bp, Artificial Sequence
  Synthetic oligonucleotide
agtatgtctagcgaagtcagtatgtgaccgtacag

SEQ ID NO: 17129 - DNA, 36 bp, Artificial Sequence
  Synthetic oligonucleotide
agtgaccggcggagtaggtctctatggatcaacgta

SEQ ID NO: 17130 - DNA, 35 bp, Artificial Sequence
  Synthetic oligonucleotide
agttagcccaaagctacattgtacctgttttcgtg

SEQ ID NO: 17131 - DNA, 35 bp, Artificial Sequence
  Synthetic oligonucleotide
ataacgaagcctgattcgcatatgtaagcgttatg

SEQ ID NO: 17132 - DNA, 35 bp, Artificial Sequence
  Synthetic oligonucleotide
atagagcgatggtgagtttgtgtggtagtgcccga

SEQ ID NO: 17133 - DNA, 37 bp, Artificial Sequence
  Synthetic oligonucleotide
atcgactgctgcaaattggcctctttgacaaccgcga

SEQ ID NO: 17134 - DNA, 35 bp, Artificial Sequence
  Synthetic oligonucleotide
atgctgtagtccctggtcggaaccgccttgacctc

SEQ ID NO: 17135 - DNA, 36 bp, Artificial Sequence
  Synthetic oligonucleotide
atgggaggttggggctgccatgtccggtgtcgaaca

SEQ ID NO: 17136 - DNA, 38 bp, Artificial Sequence
  Synthetic oligonucleotide
atgttacgtgcggatgtactagtcgaattgtgatatga

SEQ ID NO: 17137 - DNA, 35 bp, Artificial Sequence
  Synthetic oligonucleotide
atgtttccggcattcacggttcgtggggcacctag

SEQ ID NO: 17138 - DNA, 36 bp, Artificial Sequence
  Synthetic oligonucleotide
attacgatacgcgtagaggacagtaccgggactcga

SEQ ID NO: 17139 - DNA, 35 bp, Artificial Sequence
  Synthetic oligonucleotide
attgagggctggacaaccattcctggaatttgacc

SEQ ID NO: 17140 - DNA, 38 bp, Artificial Sequence
  Synthetic oligonucleotide
attggtaaacagtcggtgttctatcggtgtaaacctga

SEQ ID NO: 17141 - DNA, 37 bp, Artificial Sequence
  Synthetic oligonucleotide
cccagggccgagattaagacaaagtttaaaaagggga

SEQ ID NO: 17142 - DNA, 37 bp, Artificial Sequence
  Synthetic oligonucleotide
gaacacgatacatagctgcaaggcaaattgacttaga

SEQ ID NO: 17143 - DNA, 36 bp, Artificial Sequence
  Synthetic oligonucleotide
gaagcgtacgatcgtcaaattctaggacgcacagta

SEQ ID NO: 17144 - DNA, 36 bp, Artificial Sequence
  Synthetic oligonucleotide
gaatggatgcgatgtgttcttacattccaacgtcta

SEQ ID NO: 17145 - DNA, 35 bp, Artificial Sequence
  Synthetic oligonucleotide
gacggggtgggttgtagtacgcctcgtaaaccgaa

SEQ ID NO: 17146 - DNA, 38 bp, Artificial Sequence
  Synthetic oligonucleotide
gacggtggtgaccggtcttaatacgtacttcgttatga

SEQ ID NO: 17147 - DNA, 36 bp, Artificial Sequence
  Synthetic oligonucleotide
gactgcaaagcatgcgggttctaggatcaaaggata

SEQ ID NO: 17148 - DNA, 36 bp, Artificial Sequence
  Synthetic oligonucleotide
gatatcttaatcctacgttgtgggcattagacatta

SEQ ID NO: 17149 - DNA, 36 bp, Artificial Sequence
  Synthetic oligonucleotide
gatcgatgtcatggggggatccgagaatgctgctga

SEQ ID NO: 17150 - DNA, 35 bp, Artificial Sequence
  Synthetic oligonucleotide
gcaagagcctggattatggaccacggtgaactatg

SEQ ID NO: 17151 - DNA, 37 bp, Artificial Sequence
  Synthetic oligonucleotide
gcatgacccacgctttgcaaataagtagacggtccga

SEQ ID NO: 17152 - DNA, 38 bp, Artificial Sequence
  Synthetic oligonucleotide
gccatgcctcggattcggtctacccagcactattttga

SEQ ID NO: 17153 - DNA, 36 bp, Artificial Sequence
  Synthetic oligonucleotide
gccgagtctccggccggattagtctattcacgagta

SEQ ID NO: 17154 - DNA, 38 bp, Artificial Sequence
  Synthetic oligonucleotide
gccgtgagtaatgttcaagtgggggtgcccgatattga

SEQ ID NO: 17155 - DNA, 38 bp, Artificial Sequence
  Synthetic oligonucleotide
gcgaacgcaaaacccctggcgtatcccccgggagatga

SEQ ID NO: 17156 - DNA, 38 bp, Artificial Sequence
  Synthetic oligonucleotide
gctaaaattgaggtaggatgtgtgagaggttcagttga

SEQ ID NO: 17157 - DNA, 35 bp, Artificial Sequence
  Synthetic oligonucleotide
ggagtcacacgtggtcctgccccattccccttttg

SEQ ID NO: 17158 - DNA, 36 bp, Artificial Sequence
  Synthetic oligonucleotide
ggatacaacggagtcagcagacgccacccaggctaa

SEQ ID NO: 17159 - DNA, 35 bp, Artificial Sequence
  Synthetic oligonucleotide
ggccacagcccaacgtcaatgtttgtttgtactcc

SEQ ID NO: 17160 - DNA, 38 bp, Artificial Sequence
  Synthetic oligonucleotide
ggtggagtggtatacgtggggcagtatattcgtaatga

SEQ ID NO: 17161 - DNA, 36 bp, Artificial Sequence
  Synthetic oligonucleotide
ggtggattgtacgaggcctggctaataatttcgtta

SEQ ID NO: 17162 - DNA, 35 bp, Artificial Sequence
  Synthetic oligonucleotide
gtatcgataaagtattgggattgttatctagatgt

SEQ ID NO: 17163 - DNA, 35 bp, Artificial Sequence
  Synthetic oligonucleotide
gtccacgggaatccatcgtagttacgtgtgacttt

SEQ ID NO: 17164 - DNA, 38 bp, Artificial Sequence
  Synthetic oligonucleotide
gtccaggtcatgaattatttgagtcacggctatactga

SEQ ID NO: 17165 - DNA, 37 bp, Artificial Sequence
  Synthetic oligonucleotide
gtccgtcgaagggtacgatttcgcaagtggggtggga

SEQ ID NO: 17166 - DNA, 36 bp, Artificial Sequence
  Synthetic oligonucleotide
gtcctgcatgctgacctatagtactgaaatctagca

SEQ ID NO: 17167 - DNA, 36 bp, Artificial Sequence
  Synthetic oligonucleotide
gtgtacggttactgtcacagttgttttatgttcgta

SEQ ID NO: 17168 - DNA, 36 bp, Artificial Sequence
  Synthetic oligonucleotide
gttcgggtttcgggtagatccaaggtcgtcacgtta

SEQ ID NO: 17169 - DNA, 37 bp, Artificial Sequence
  Synthetic oligonucleotide
gtttatactttaagtaggtctgcaaaggtttattcga

SEQ ID NO: 17170 - DNA, 35 bp, Artificial Sequence
  Synthetic oligonucleotide
gtttcaatgcactctctatgcaccttgccccccca

SEQ ID NO: 17171 - DNA, 36 bp, Artificial Sequence
  Synthetic oligonucleotide
gtttgcatggacggtcatatagaaacgttagttaca

SEQ ID NO: 17172 - DNA, 38 bp, Artificial Sequence
  Synthetic oligonucleotide
tacatctcggcgtgtagggcgcactacatcatggatga

SEQ ID NO: 17173 - DNA, 38 bp, Artificial Sequence
  Synthetic oligonucleotide
tactgccatatgttacagcgattgaattttcgtcttga

SEQ ID NO: 17174 - DNA, 34 bp, Artificial Sequence
  Synthetic oligonucleotide
taggaacgcatacgtctcggcatagggatctgga

SEQ ID NO: 17175 - DNA, 27 bp, Artificial Sequence
  Synthetic oligonucleotide
tagtatcgaaaccacggtgcagtttag

SEQ ID NO: 17176 - DNA, 37 bp, Artificial Sequence
  Synthetic oligonucleotide
tataatgtcatctggtatgtttggccacactgggtga

SEQ ID NO: 17177 - DNA, 37 bp, Artificial Sequence
  Synthetic oligonucleotide
tatggccccgcggttcacttatttacagtgcttacga

SEQ ID NO: 17178 - DNA, 35 bp, Artificial Sequence
  Synthetic oligonucleotide
tccacggacggggccagaaggatcagcccttccag

SEQ ID NO: 17179 - DNA, 37 bp, Artificial Sequence
  Synthetic oligonucleotide
tccctgttagcgctgcgcgaaggattttacgtactga

SEQ ID NO: 17180 - DNA, 37 bp, Artificial Sequence
  Synthetic oligonucleotide
tccgactttaagtgttcttattcagcaacgaaacgga

SEQ ID NO: 17181 - DNA, 38 bp, Artificial Sequence
  Synthetic oligonucleotide
tctaccgtagagtgcaagcattgctattgggtagatga

SEQ ID NO: 17182 - DNA, 36 bp, Artificial Sequence
  Synthetic oligonucleotide
tctcgttctacagtttatgctgggtttaccatagga

SEQ ID NO: 17183 - DNA, 36 bp, Artificial Sequence
  Synthetic oligonucleotide
tcttacaagcggattctgtcaccgctatcctttgta

SEQ ID NO: 17184 - DNA, 38 bp, Artificial Sequence
  Synthetic oligonucleotide
tgaggctatggggtgaagtgtgctcgtgaggatagtga

SEQ ID NO: 17185 - DNA, 35 bp, Artificial Sequence
  Synthetic oligonucleotide
tgatctcaactagtactgcagagggggactaggaa

SEQ ID NO: 17186 - DNA, 35 bp, Artificial Sequence
  Synthetic oligonucleotide
tgcaaagtttagggtgcgggggtttttcggtccac

SEQ ID NO: 17187 - DNA, 36 bp, Artificial Sequence
  Synthetic oligonucleotide
tgcggaatgaacatcgtaaatgacttcagtcatgga

SEQ ID NO: 17188 - DNA, 36 bp, Artificial Sequence
  Synthetic oligonucleotide
tggccgtcctaaaattggtaaggatgcacttaagta

SEQ ID NO: 17189 - DNA, 35 bp, Artificial Sequence
  Synthetic oligonucleotide
tgtcataaggtttaactcagtataggcgccatagt

SEQ ID NO: 17190 - DNA, 36 bp, Artificial Sequence
  Synthetic oligonucleotide
tgtccgaaaccgagctgcaggtcattctgatgggca

SEQ ID NO: 17191 - DNA, 37 bp, Artificial Sequence
  Synthetic oligonucleotide
tgttcatcgcgttgtctcctcacaggcccgtagcgga

SEQ ID NO: 17192 - DNA, 38 bp, Artificial Sequence
  Synthetic oligonucleotide
ttcttactagagcgttgggcctgttacgaagctactga

SEQ ID NO: 17193 - DNA, 36 bp, Artificial Sequence
  Synthetic oligonucleotide
ttgcgagcctcttgtcaggacgtaaatcaggtggaa

SEQ ID NO: 17194 - DNA, 38 bp, Artificial Sequence
  Synthetic oligonucleotide
ttggacgttgacttggcatacgacacacgccttgctga

SEQ ID NO: 17195 - DNA, 35 bp, Artificial Sequence
  Synthetic oligonucleotide
ttgggtgcatgagtcatcacgtgcaaccactcggg

SEQ ID NO: 17196 - DNA, 38 bp, Artificial Sequence
  Synthetic oligonucleotide
acagcaccatctagaacaaggactgtaggttaatgtga

SEQ ID NO: 17197 - DNA, 37 bp, Artificial Sequence
  Synthetic oligonucleotide
accggaaagttatgtacagtgggacaagcacgggcga

SEQ ID NO: 17198 - DNA, 36 bp, Artificial Sequence
  Synthetic oligonucleotide
tgcctacgtccggcccaaagtgtaagcaacatggta

SEQ ID NO: 17199 - DNA, 36 bp, Artificial Sequence
  Synthetic oligonucleotide
tcttagagcgatgttgcgtatttgaagttctaggca

SEQ ID NO: 17200 - DNA, 38 bp, Artificial Sequence
  Synthetic oligonucleotide
atgaagtcgatgtgggtgcgggcgaatattgttgctga

SEQ ID NO: 17201 - DNA, 36 bp, Artificial Sequence
  Synthetic oligonucleotide
gcccaaacttcccaaggcagttacatgcgaagcaga

SEQ ID NO: 17202 - DNA, 38 bp, Artificial Sequence
  Synthetic oligonucleotide
gtcacccgtacaggtggtattttagcgtctccgcctga

SEQ ID NO: 17203 - DNA, 37 bp, Artificial Sequence
  Synthetic oligonucleotide
aaattgacgggtggttggtccttgcaaggggagacga

SEQ ID NO: 17204 - DNA, 36 bp, Artificial Sequence
  Synthetic oligonucleotide
aatcctatctgcaaaagcagatgagttgagcatgga

SEQ ID NO: 17205 - DNA, 37 bp, Artificial Sequence
  Synthetic oligonucleotide
aatgttcacagtcagtaataaagcggaccatcatcga

SEQ ID NO: 17206 - DNA, 36 bp, Artificial Sequence
  Synthetic oligonucleotide
acaaaggagtctcatcgtggcatgcgaattgtacta

SEQ ID NO: 17207 - DNA, 37 bp, Artificial Sequence
  Synthetic oligonucleotide
accgcaacacaggacggggttcatcgtttgggcttga

SEQ ID NO: 17208 - DNA, 35 bp, Artificial Sequence
  Synthetic oligonucleotide
atcgtaccacagatgtctcgagggaagcgatccgg

SEQ ID NO: 17209 - DNA, 37 bp, Artificial Sequence
  Synthetic oligonucleotide
ccacgatacttggatgatcagaaccaaacatgcatga

SEQ ID NO: 17210 - DNA, 37 bp, Artificial Sequence
  Synthetic oligonucleotide
cctgtacattcagacaggctaggggttccttgatgga

SEQ ID NO: 17211 - DNA, 36 bp, Artificial Sequence
  Synthetic oligonucleotide
gacagtcgcgctacatagggcacagtcattgaacca

SEQ ID NO: 17212 - DNA, 37 bp, Artificial Sequence
  Synthetic oligonucleotide
gcacacgggattgcacaacccaatttacatgcttaga

SEQ ID NO: 17213 - DNA, 35 bp, Artificial Sequence
  Synthetic oligonucleotide
gcgattgtacatgaattggaaggtaggagaacaaa

SEQ ID NO: 17214 - DNA, 38 bp, Artificial Sequence
  Synthetic oligonucleotide
ggacaaggctcgccacgtatgtagtttataggggttga

SEQ ID NO: 17215 - DNA, 37 bp, Artificial Sequence
  Synthetic oligonucleotide
ggacttgtcctggattaagtagtatcaagtgggttga

SEQ ID NO: 17216 - DNA, 35 bp, Artificial Sequence
  Synthetic oligonucleotide
gggtccacgttggggtttgaccttagcccgacaag

SEQ ID NO: 17217 - DNA, 35 bp, Artificial Sequence
  Synthetic oligonucleotide
gtatacggccacgggggaattcactcctggaaagc

SEQ ID NO: 17218 - DNA, 36 bp, Artificial Sequence
  Synthetic oligonucleotide
gttaaacgctgtgggcacttggaacattcgcccgga

SEQ ID NO: 17219 - DNA, 35 bp, Artificial Sequence
  Synthetic oligonucleotide
tacccgctacccggcctgtaatgtctggatcactg

SEQ ID NO: 17220 - DNA, 37 bp, Artificial Sequence
  Synthetic oligonucleotide
tcatgactgtgacgcgtatagttgggccagattttga

SEQ ID NO: 17221 - DNA, 37 bp, Artificial Sequence
  Synthetic oligonucleotide
ttcgcttcagagaccgtatgggaggcccagcaaacga

SEQ ID NO: 17222 - DNA, 36 bp, Artificial Sequence
  Synthetic oligonucleotide
tttagtctattcgtgggacgagtacgtagataacta

SEQ ID NO: 17223 - DNA, 36 bp, Artificial Sequence
  Synthetic oligonucleotide
gtcacacgccacttgcagtgtgaagtacgatgaaga

SEQ ID NO: 17224 - DNA, 36 bp, Artificial Sequence
  Synthetic oligonucleotide
ttagactgccagccagggagttagcttcgggtgtta

SEQ ID NO: 17225 - DNA, 37 bp, Artificial Sequence
  Synthetic oligonucleotide
gccaaccagtcgaatcgggcctttgatgtttgcagga

SEQ ID NO: 17226 - DNA, 35 bp, Artificial Sequence
  Synthetic oligonucleotide
ttcgtgagggtatccatgcccccatgcgaaaaaga

SEQ ID NO: 17227 - DNA, 36 bp, Artificial Sequence
  Synthetic oligonucleotide
agtcaacattgacggtcttgggtcactcgccaggga

SEQ ID NO: 17228 - DNA, 35 bp, Artificial Sequence
  Synthetic oligonucleotide
gacattggtcttgattgtttttatcaggacgcagt

SEQ ID NO: 17229 - DNA, 35 bp, Artificial Sequence
  Synthetic oligonucleotide
gcagaaatttcgttgggtgagttattaatgaaagg

SEQ ID NO: 17230 - DNA, 38 bp, Artificial Sequence
  Synthetic oligonucleotide
tcatcatggaagtcagtggtgttgattgcctcgtgtga

SEQ ID NO: 17231 - DNA, 35 bp, Artificial Sequence
  Synthetic oligonucleotide
tgttacttccattaccgtcagtcatgagtagggga

SEQ ID NO: 17232 - DNA, 36 bp, Artificial Sequence
  Synthetic oligonucleotide
gcagtaggacaggccaaacgtgaattgagggtgtta

SEQ ID NO: 17233 - DNA, 35 bp, Artificial Sequence
  Synthetic oligonucleotide
gattaactcagcgtattgcataacggctacctcac

SEQ ID NO: 17234 - DNA, 37 bp, Artificial Sequence
  Synthetic oligonucleotide
aaagaattccagcatgcggaggagtgccttgtgacga

SEQ ID NO: 17235 - DNA, 38 bp, Artificial Sequence
  Synthetic oligonucleotide
aactactaaggattgaccgttagatattagggatatga

SEQ ID NO: 17236 - DNA, 37 bp, Artificial Sequence
  Synthetic oligonucleotide
aactcaaactgaagtgtactcgttcgtacattgctga

SEQ ID NO: 17237 - DNA, 37 bp, Artificial Sequence
  Synthetic oligonucleotide
aagccacggtttcagttgagactcgtacagccctgga

SEQ ID NO: 17238 - DNA, 36 bp, Artificial Sequence
  Synthetic oligonucleotide
aagtgggtcatgaagatgaatggcacttttactata

SEQ ID NO: 17239 - DNA, 35 bp, Artificial Sequence
  Synthetic oligonucleotide
aatcgtggggacagttaagcgtagatccgatatac

SEQ ID NO: 17240 - DNA, 36 bp, Artificial Sequence
  Synthetic oligonucleotide
acgattccatggattcgacagtcaggtcgttggaaa

SEQ ID NO: 17241 - DNA, 35 bp, Artificial Sequence
  Synthetic oligonucleotide
acgcttcaagtgtaccaagacgccgataggttcga

SEQ ID NO: 17242 - DNA, 38 bp, Artificial Sequence
  Synthetic oligonucleotide
actgtgggaaggtaggaattaattcggacaagaggtta

SEQ ID NO: 17243 - DNA, 38 bp, Artificial Sequence
  Synthetic oligonucleotide
agacttccacttccgatgcacccggccacctgcgttga

SEQ ID NO: 17244 - DNA, 37 bp, Artificial Sequence
  Synthetic oligonucleotide
agcgagtttgagggagacgattggttacctatgtcga

SEQ ID NO: 17245 - DNA, 36 bp, Artificial Sequence
  Synthetic oligonucleotide
aggaggcgtaggcgagatgcaatcgtaccccgctca

SEQ ID NO: 17246 - DNA, 37 bp, Artificial Sequence
  Synthetic oligonucleotide
aggtgtgcgagagccgtttttcccccagccgccagga

SEQ ID NO: 17247 - DNA, 37 bp, Artificial Sequence
  Synthetic oligonucleotide
atacgtcgtagcacgtgcgaggcacaggcatttgtga

SEQ ID NO: 17248 - DNA, 35 bp, Artificial Sequence
  Synthetic oligonucleotide
atagtaagaggaagaccgagtgcatgcgagcgaag

SEQ ID NO: 17249 - DNA, 38 bp, Artificial Sequence
  Synthetic oligonucleotide
atgactgggatatgtatctattaatgggccaggcttga

SEQ ID NO: 17250 - DNA, 36 bp, Artificial Sequence
  Synthetic oligonucleotide
cccatgaagacccgctttcgtgtgcgtactgcagaa

SEQ ID NO: 17251 - DNA, 36 bp, Artificial Sequence
  Synthetic oligonucleotide
gaaaacggcgtgaagtccgtcctcaatagctataga

SEQ ID NO: 17252 - DNA, 35 bp, Artificial Sequence
  Synthetic oligonucleotide
gaacccatatgtaagtcgcgacagcgataagcgat

SEQ ID NO: 17253 - DNA, 37 bp, Artificial Sequence
  Synthetic oligonucleotide
gacacgggtacatgaaacatagttggactgccatgga

SEQ ID NO: 17254 - DNA, 37 bp, Artificial Sequence
  Synthetic oligonucleotide
gaggccggtacgcccgaagttacaatccttgacagga

SEQ ID NO: 17255 - DNA, 36 bp, Artificial Sequence
  Synthetic oligonucleotide
gagtcatgagtatgcagccatgtgaggcattggata

SEQ ID NO: 17256 - DNA, 38 bp, Artificial Sequence
  Synthetic oligonucleotide
gatcccgcatcggtgataacatgatgcaaggacactga

SEQ ID NO: 17257 - DNA, 35 bp, Artificial Sequence
  Synthetic oligonucleotide
gatttgggaaagcgatccaccttctgcttgccggg

SEQ ID NO: 17258 - DNA, 35 bp, Artificial Sequence
  Synthetic oligonucleotide
gcaacggttgcgttatcaatgtgccgatatccgac

SEQ ID NO: 17259 - DNA, 35 bp, Artificial Sequence
  Synthetic oligonucleotide
gcagtgccggggtaatatacgattcatgcctaccc

SEQ ID NO: 17260 - DNA, 37 bp, Artificial Sequence
  Synthetic oligonucleotide
gcatggtgggtgagtctcactggacgggttctaggga

SEQ ID NO: 17261 - DNA, 37 bp, Artificial Sequence
  Synthetic oligonucleotide
gcggatcgttgtcatcgctggctattcgttgcggtga

SEQ ID NO: 17262 - DNA, 38 bp, Artificial Sequence
  Synthetic oligonucleotide
gcgggagagtagattcgacatgtatgccttgtctatga

SEQ ID NO: 17263 - DNA, 36 bp, Artificial Sequence
  Synthetic oligonucleotide
ggatatctctgatcaaccaagtcgtcgcgcttatca

SEQ ID NO: 17264 - DNA, 37 bp, Artificial Sequence
  Synthetic oligonucleotide
ggccagacgacgtcacacggcgtccggctacgaccga

SEQ ID NO: 17265 - DNA, 35 bp, Artificial Sequence
  Synthetic oligonucleotide
ggtacaagctacccagtgcgaggcggtctggagag

SEQ ID NO: 17266 - DNA, 36 bp, Artificial Sequence
  Synthetic oligonucleotide
ggtacctccagtcctgcatgggaaatgaacggggta

SEQ ID NO: 17267 - DNA, 35 bp, Artificial Sequence
  Synthetic oligonucleotide
ggtctgcgtgctagtgaaagaaactaagcttgacg

SEQ ID NO: 17268 - DNA, 38 bp, Artificial Sequence
  Synthetic oligonucleotide
gtacggtcggagtctcgcgtctgataagaggcgaatga

SEQ ID NO: 17269 - DNA, 36 bp, Artificial Sequence
  Synthetic oligonucleotide
gtagtgaagtcaagattggcattcacggcattccaa

SEQ ID NO: 17270 - DNA, 36 bp, Artificial Sequence
  Synthetic oligonucleotide
gtcaaggcaaaggtgcggacttgtgctgggagtgaa

SEQ ID NO: 17271 - DNA, 37 bp, Artificial Sequence
  Synthetic oligonucleotide
gtggggaatacgcattcgttacccgatgctgctgcga

SEQ ID NO: 17272 - DNA, 37 bp, Artificial Sequence
  Synthetic oligonucleotide
gtgggggaaccgcttggtatggataaagatctcacga

SEQ ID NO: 17273 - DNA, 36 bp, Artificial Sequence
  Synthetic oligonucleotide
gttaggtacatcgacgttcctccggtacttcgacta

SEQ ID NO: 17274 - DNA, 35 bp, Artificial Sequence
  Synthetic oligonucleotide
tacaccggacttgggtagggagtgctgtcgacact

SEQ ID NO: 17275 - DNA, 38 bp, Artificial Sequence
  Synthetic oligonucleotide
tactgggttagctgcgatattgccggactggcaattga

SEQ ID NO: 17276 - DNA, 38 bp, Artificial Sequence
  Synthetic oligonucleotide
taggctccatgctgcagtactgtctgaggtagccatga

SEQ ID NO: 17277 - DNA, 37 bp, Artificial Sequence
  Synthetic oligonucleotide
tatgcgccagagcatacaaacgtattgttgtcatgga

SEQ ID NO: 17278 - DNA, 36 bp, Artificial Sequence
  Synthetic oligonucleotide
tcatcgccgccattccgatctgggttgtaacaatta

SEQ ID NO: 17279 - DNA, 36 bp, Artificial Sequence
  Synthetic oligonucleotide
tgaaccgtagctaggtgtttaggaggtagatgggca

SEQ ID NO: 17280 - DNA, 35 bp, Artificial Sequence
  Synthetic oligonucleotide
tgacaatgcagtctacgggtcggagatcataatgg

SEQ ID NO: 17281 - DNA, 37 bp, Artificial Sequence
  Synthetic oligonucleotide
tgagacggaactgctgctatgtaactggtcatattga

SEQ ID NO: 17282 - DNA, 36 bp, Artificial Sequence
  Synthetic oligonucleotide
tgagggtgattctggccgtctctggtactaggtcaa

SEQ ID NO: 17283 - DNA, 37 bp, Artificial Sequence
  Synthetic oligonucleotide
tgcatgctgtgccctctgagacaatgtagcaaggtga

SEQ ID NO: 17284 - DNA, 35 bp, Artificial Sequence
  Synthetic oligonucleotide
tgcctctgctgcgtactctggacgtattagtcccc

SEQ ID NO: 17285 - DNA, 35 bp, Artificial Sequence
  Synthetic oligonucleotide
tggacaccaagcaggtgcccaatttatgtgaaagg

SEQ ID NO: 17286 - DNA, 35 bp, Artificial Sequence
  Synthetic oligonucleotide
tgttggggtacgtggtggcatcgataacggttgga

SEQ ID NO: 17287 - DNA, 38 bp, Artificial Sequence
  Synthetic oligonucleotide
ttcggtgtaaatttaaaacggagactgtcagggagtga

SEQ ID NO: 17288 - DNA, 35 bp, Artificial Sequence
  Synthetic oligonucleotide
ttgcggttaaagctgccgtcaagctgtgtggtgtt

SEQ ID NO: 17289 - DNA, 35 bp, Artificial Sequence
  Synthetic oligonucleotide
ttgctagctggatattttagagcattcgtatgaat

SEQ ID NO: 17290 - DNA, 36 bp, Artificial Sequence
  Synthetic oligonucleotide
agaacctggggctaagcacgtaatgcaggtcaagga

SEQ ID NO: 17291 - DNA, 35 bp, Artificial Sequence
  Synthetic oligonucleotide
attagcgcggaacggtgttgtggtgtaagatgttc

SEQ ID NO: 17292 - DNA, 36 bp, Artificial Sequence
  Synthetic oligonucleotide
cacggcgtattgtaatatccaagggggtatcgctaa

SEQ ID NO: 17293 - DNA, 36 bp, Artificial Sequence
  Synthetic oligonucleotide
caggggctgtacccgcgtcgaagtaaaacgcttaca

SEQ ID NO: 17294 - DNA, 36 bp, Artificial Sequence
  Synthetic oligonucleotide
catgtgaacgctagtctgagactaatagctgggaaa

SEQ ID NO: 17295 - DNA, 36 bp, Artificial Sequence
  Synthetic oligonucleotide
gaacgttgttgtgtgttgtatcccagggcttaggca

SEQ ID NO: 17296 - DNA, 35 bp, Artificial Sequence
  Synthetic oligonucleotide
gacctctctctccgagtctaagggctacccgcatg

SEQ ID NO: 17297 - DNA, 37 bp, Artificial Sequence
  Synthetic oligonucleotide
gactcttccataatgctccttgtgggggtagtgtgga

SEQ ID NO: 17298 - DNA, 35 bp, Artificial Sequence
  Synthetic oligonucleotide
gagctccggcgttataccggcttagtcctcgttta

SEQ ID NO: 17299 - DNA, 38 bp, Artificial Sequence
  Synthetic oligonucleotide
gatcaacgacaggttatgggtatcccgactaatcctga

SEQ ID NO: 17300 - DNA, 35 bp, Artificial Sequence
  Synthetic oligonucleotide
gcactagacgtggtaaaacaagcagtcaatgttat

SEQ ID NO: 17301 - DNA, 37 bp, Artificial Sequence
  Synthetic oligonucleotide
ggatcatagagcggtgactcgacgacggaggatcgga

SEQ ID NO: 17302 - DNA, 35 bp, Artificial Sequence
  Synthetic oligonucleotide
gtagaattcattgtacggggaatccctaaaagtga

SEQ ID NO: 17303 - DNA, 38 bp, Artificial Sequence
  Synthetic oligonucleotide
gttgaggctacggggcaccggcacacagctgtggctga

SEQ ID NO: 17304 - DNA, 35 bp, Artificial Sequence
  Synthetic oligonucleotide
tgtgtttggataaccgtggcattgtggctcatcgg

SEQ ID NO: 17305 - DNA, 35 bp, Artificial Sequence
  Synthetic oligonucleotide
acggtcgtcgcaacttgcaatttctatgctctcac

SEQ ID NO: 17306 - DNA, 38 bp, Artificial Sequence
  Synthetic oligonucleotide
gttgcacacgtacggtctttctgtgtggactaatttga

SEQ ID NO: 17307 - DNA, 35 bp, Artificial Sequence
  Synthetic oligonucleotide
tggtgcaccccgcaccgcctattctctgtagttga

SEQ ID NO: 17308 - DNA, 36 bp, Artificial Sequence
  Synthetic oligonucleotide
aatcgaagagccttggtatgcagttacgactagtta

SEQ ID NO: 17309 - DNA, 36 bp, Artificial Sequence
  Synthetic oligonucleotide
agtctaaggggaggctaggttcgggaaagactaaca

SEQ ID NO: 17310 - DNA, 38 bp, Artificial Sequence
  Synthetic oligonucleotide
gggtagaacaacatctggtgagaagtagttgccaatga

SEQ ID NO: 17311 - DNA, 36 bp, Artificial Sequence
  Synthetic oligonucleotide
gtcggtcacgacacattaattgtcttagacacgtta

SEQ ID NO: 17312 - DNA, 35 bp, Artificial Sequence
  Synthetic oligonucleotide
tgtatatcgtctcggcctctcccacgggtgacgcg

SEQ ID NO: 17313 - DNA, 37 bp, Artificial Sequence
  Synthetic oligonucleotide
acagctcattatatcgagttctggggtgtacatacga

SEQ ID NO: 17314 - DNA, 35 bp, Artificial Sequence
  Synthetic oligonucleotide
tacctagagcttttctaggttgctctagagtattg

SEQ ID NO: 17315 - DNA, 38 bp, Artificial Sequence
  Synthetic oligonucleotide
tacgcgagttgagtaatggacataggcgaggctattga

SEQ ID NO: 17316 - DNA, 35 bp, Artificial Sequence
  Synthetic oligonucleotide
tctccacgcccgttctagacctagtatacgctgtc

SEQ ID NO: 17317 - DNA, 35 bp, Artificial Sequence
  Synthetic oligonucleotide
gtcaggctcggcccataagacacatcgcttgcgtt

SEQ ID NO: 17318 - DNA, 36 bp, Artificial Sequence
  Synthetic oligonucleotide
tcgaatgtacgtacccccagctcatgcgggggagca

SEQ ID NO: 17319 - DNA, 37 bp, Artificial Sequence
  Synthetic oligonucleotide
aattaggccccgcagcagattggtagatagaacgcga

SEQ ID NO: 17320 - DNA, 38 bp, Artificial Sequence
  Synthetic oligonucleotide
acgtacgtgctcacgatcaggagccgggggctatttga

SEQ ID NO: 17321 - DNA, 32 bp, Artificial Sequence
  Synthetic oligonucleotide
cctggatgggactagcggtccaagctatatga

SEQ ID NO: 17322 - DNA, 37 bp, Artificial Sequence
  Synthetic oligonucleotide
gagcgacataggtatctaccaccatgtagtccattga

SEQ ID NO: 17323 - DNA, 35 bp, Artificial Sequence
  Synthetic oligonucleotide
tcttaacatcgggggaaagctttactctgttgaaa

SEQ ID NO: 17324 - DNA, 37 bp, Artificial Sequence
  Synthetic oligonucleotide
aaaaaaagtccggttggacgattgtttgctaaagcga

SEQ ID NO: 17325 - DNA, 37 bp, Artificial Sequence
  Synthetic oligonucleotide
aaacaatacgaagcttgccagtcacccgtagtccgga

SEQ ID NO: 17326 - DNA, 37 bp, Artificial Sequence
  Synthetic oligonucleotide
aaagtgcgtatttatcggcggtttgctgatccggaga

SEQ ID NO: 17327 - DNA, 35 bp, Artificial Sequence
  Synthetic oligonucleotide
aaagtggttgcgttaggttctcttgtgctaaacat

SEQ ID NO: 17328 - DNA, 38 bp, Artificial Sequence
  Synthetic oligonucleotide
aaatagttcggtgagcccggatgggctaagatacgtga

SEQ ID NO: 17329 - DNA, 38 bp, Artificial Sequence
  Synthetic oligonucleotide
aaccagacccgatgtaagggtacgtaatcagtacttga

SEQ ID NO: 17330 - DNA, 37 bp, Artificial Sequence
  Synthetic oligonucleotide
accgtaaggcactggataaacaagccgtgtttcgtga

SEQ ID NO: 17331 - DNA, 37 bp, Artificial Sequence
  Synthetic oligonucleotide
acgagtcacgagaagggatgaggcaagggtttcagga

SEQ ID NO: 17332 - DNA, 36 bp, Artificial Sequence
  Synthetic oligonucleotide
acggtcctaccaatcgttaaaggttactgtagataa

SEQ ID NO: 17333 - DNA, 36 bp, Artificial Sequence
  Synthetic oligonucleotide
agccgggatgagatctgttcgagttttgggatcaga

SEQ ID NO: 17334 - DNA, 38 bp, Artificial Sequence
  Synthetic oligonucleotide
aggtacacgtaacttcgcatttgacatgttattattga

SEQ ID NO: 17335 - DNA, 37 bp, Artificial Sequence
  Synthetic oligonucleotide
agtaggcggtgccttagtgctgtggggggagtgggga

SEQ ID NO: 17336 - DNA, 35 bp, Artificial Sequence
  Synthetic oligonucleotide
agtccggttgcagtaaagcggggatagaattgtca

SEQ ID NO: 17337 - DNA, 33 bp, Artificial Sequence
  Synthetic oligonucleotide
agtctccaagaccatcccccgcctctacgtaga

SEQ ID NO: 17338 - DNA, 37 bp, Artificial Sequence
  Synthetic oligonucleotide
ataccaccgcaaggtgtatgttggctagtgtatgaga

SEQ ID NO: 17339 - DNA, 35 bp, Artificial Sequence
  Synthetic oligonucleotide
attgcctcttgcccccattgtgatcatatgcccag

SEQ ID NO: 17340 - DNA, 35 bp, Artificial Sequence
  Synthetic oligonucleotide
cacactactcggaatcaatgcagatatgtaagggg

SEQ ID NO: 17341 - DNA, 36 bp, Artificial Sequence
  Synthetic oligonucleotide
caccacatagcggtatcaagggttcaggaatctgca

SEQ ID NO: 17342 - DNA, 37 bp, Artificial Sequence
  Synthetic oligonucleotide
ccacgtgctgagctttgacgtagctccggccttgaga

SEQ ID NO: 17343 - DNA, 36 bp, Artificial Sequence
  Synthetic oligonucleotide
cgactgattcgtatcgattgctggctggagtacaca

SEQ ID NO: 17344 - DNA, 36 bp, Artificial Sequence
  Synthetic oligonucleotide
gaaattgctcgcgtgtgtcacatagtaatggcccta

SEQ ID NO: 17345 - DNA, 35 bp, Artificial Sequence
  Synthetic oligonucleotide
gacaaagacacatttaacatgtagtagtaatctta

SEQ ID NO: 17346 - DNA, 37 bp, Artificial Sequence
  Synthetic oligonucleotide
gaccacagcgtgtggtcgctcatgattaagcgtggga

SEQ ID NO: 17347 - DNA, 38 bp, Artificial Sequence
  Synthetic oligonucleotide
gacggtgaagaacttggcgtttacgtcagaggagttga

SEQ ID NO: 17348 - DNA, 38 bp, Artificial Sequence
  Synthetic oligonucleotide
gacgtttgttagtgttgcggtcgaggtattcgcgctga

SEQ ID NO: 17349 - DNA, 38 bp, Artificial Sequence
  Synthetic oligonucleotide
gagatcagcttgacatgacaggcatgcgcctgagttga

SEQ ID NO: 17350 - DNA, 35 bp, Artificial Sequence
  Synthetic oligonucleotide
gagcacacagtgccaacggaattttgctactgaaa

SEQ ID NO: 17351 - DNA, 36 bp, Artificial Sequence
  Synthetic oligonucleotide
gagtcattggaaggataggaacgaaggtcgatggca

SEQ ID NO: 17352 - DNA, 38 bp, Artificial Sequence
  Synthetic oligonucleotide
gcacgggctaaacaagcgtgcggtgcgagtacatttga

SEQ ID NO: 17353 - DNA, 38 bp, Artificial Sequence
  Synthetic oligonucleotide
gcccatttatcatcccaggtgttaggccaactgcttga

SEQ ID NO: 17354 - DNA, 37 bp, Artificial Sequence
  Synthetic oligonucleotide
gccgaaatggaacgtccattctttaggatgggtgaga

SEQ ID NO: 17355 - DNA, 35 bp, Artificial Sequence
  Synthetic oligonucleotide
gccgcgcaccaatacaactttgagttgtcttgagg

SEQ ID NO: 17356 - DNA, 38 bp, Artificial Sequence
  Synthetic oligonucleotide
gcgaagtccagtgcgactgagactcgacatttacgtga

SEQ ID NO: 17357 - DNA, 35 bp, Artificial Sequence
  Synthetic oligonucleotide
gcgatagcacttagtatgcttagggcatagcccaa

SEQ ID NO: 17358 - DNA, 37 bp, Artificial Sequence
  Synthetic oligonucleotide
gctcacgacactagtcagaataaggataggtgtccga

SEQ ID NO: 17359 - DNA, 36 bp, Artificial Sequence
  Synthetic oligonucleotide
gctcgccaaatcgttgggctgtatccatacctggga

SEQ ID NO: 17360 - DNA, 37 bp, Artificial Sequence
  Synthetic oligonucleotide
gctgcctagttgagtagacccggggaccccagaagga

SEQ ID NO: 17361 - DNA, 35 bp, Artificial Sequence
  Synthetic oligonucleotide
ggaaggtatccgctgtaacacccgggctcttgtaa

SEQ ID NO: 17362 - DNA, 36 bp, Artificial Sequence
  Synthetic oligonucleotide
ggacggtcaacgtcctttgggatttatttaacacaa

SEQ ID NO: 17363 - DNA, 36 bp, Artificial Sequence
  Synthetic oligonucleotide
gggtgtacccccttagtttaacagctcatggtcaag

SEQ ID NO: 17364 - DNA, 36 bp, Artificial Sequence
  Synthetic oligonucleotide
ggtgtttcagcacgaatcacgctcccgtgatcttta

SEQ ID NO: 17365 - DNA, 37 bp, Artificial Sequence
  Synthetic oligonucleotide
gtagcaacatgatacggccgcatgttgctcatctcga

SEQ ID NO: 17366 - DNA, 36 bp, Artificial Sequence
  Synthetic oligonucleotide
gtgaatagcggaccctgagtggagtgcggctgaata

SEQ ID NO: 17367 - DNA, 35 bp, Artificial Sequence
  Synthetic oligonucleotide
gtgcataaatggaaataggtaaacgtctcgaccgg

SEQ ID NO: 17368 - DNA, 36 bp, Artificial Sequence
  Synthetic oligonucleotide
gtgtggcgcaccaccggtgacctggcgaagacagga

SEQ ID NO: 17369 - DNA, 35 bp, Artificial Sequence
  Synthetic oligonucleotide
taaaggcccatcgatctcaatgctacggtcatgag

SEQ ID NO: 17370 - DNA, 36 bp, Artificial Sequence
  Synthetic oligonucleotide
taagggcatcggttggatttgatgttctgaccttga

SEQ ID NO: 17371 - DNA, 37 bp, Artificial Sequence
  Synthetic oligonucleotide
tacaacgtatataggaaccctcggggttctcccagga

SEQ ID NO: 17372 - DNA, 37 bp, Artificial Sequence
  Synthetic oligonucleotide
tacagcgaatcgcttgtccagtgtctgagggatggga

SEQ ID NO: 17373 - DNA, 36 bp, Artificial Sequence
  Synthetic oligonucleotide
tatgcggtccaaggtccgggtggtatctgggcttca

SEQ ID NO: 17374 - DNA, 37 bp, Artificial Sequence
  Synthetic oligonucleotide
tccaccgcaaggatattccgtaagcgtgttcttctga

SEQ ID NO: 17375 - DNA, 38 bp, Artificial Sequence
  Synthetic oligonucleotide
tccatgacgctcatcgatggcattatggccggtaatga

SEQ ID NO: 17376 - DNA, 35 bp, Artificial Sequence
  Synthetic oligonucleotide
tgaggggggtcaaagataaatgggtcaaatcatac

SEQ ID NO: 17377 - DNA, 36 bp, Artificial Sequence
  Synthetic oligonucleotide
tgagggtactacggaatcaccctacgtatgttagga

SEQ ID NO: 17378 - DNA, 38 bp, Artificial Sequence
  Synthetic oligonucleotide
tgatcgtccgaaataacgactggtttggggatcaatga

SEQ ID NO: 17379 - DNA, 36 bp, Artificial Sequence
  Synthetic oligonucleotide
tgccccgcgcggggactggctattcatggaaagaca

SEQ ID NO: 17380 - DNA, 35 bp, Artificial Sequence
  Synthetic oligonucleotide
tgggatttctttcctaggacgggagtcttctatcc

SEQ ID NO: 17381 - DNA, 36 bp, Artificial Sequence
  Synthetic oligonucleotide
tgtacaggaaggcgtgacttaagattaaatctttta

SEQ ID NO: 17382 - DNA, 35 bp, Artificial Sequence
  Synthetic oligonucleotide
tgtcgacggtgggctgcctcgtgcggagtgcatgt

SEQ ID NO: 17383 - DNA, 36 bp, Artificial Sequence
  Synthetic oligonucleotide
tgtgctatggcgtaacgcaaacctagctctacagaa

SEQ ID NO: 17384 - DNA, 37 bp, Artificial Sequence
  Synthetic oligonucleotide
ttaggacgatttcgagaggggtattgtgaagacgtga

SEQ ID NO: 17385 - DNA, 35 bp, Artificial Sequence
  Synthetic oligonucleotide
ttagggcggagctccacgagggatttaatgagaac

SEQ ID NO: 17386 - DNA, 35 bp, Artificial Sequence
  Synthetic oligonucleotide
tgaaccaactgtctgaatcatacctctggggttcg

SEQ ID NO: 17387 - DNA, 35 bp, Artificial Sequence
  Synthetic oligonucleotide
gattgatacggagcatttatgagaataggctagaa

SEQ ID NO: 17388 - DNA, 38 bp, Artificial Sequence
  Synthetic oligonucleotide
gtaactattagtgtacgtacctagtctttattaattga

SEQ ID NO: 17389 - DNA, 36 bp, Artificial Sequence
  Synthetic oligonucleotide
gccgcaattacagggttttgtagtgcggctatcgta

SEQ ID NO: 17390 - DNA, 38 bp, Artificial Sequence
  Synthetic oligonucleotide
gtgcggaggagaagacagaatcgattcaatcgacttga

SEQ ID NO: 17391 - DNA, 36 bp, Artificial Sequence
  Synthetic oligonucleotide
aaatcggacagagaacacgtagtttggtttgacgga

SEQ ID NO: 17392 - DNA, 36 bp, Artificial Sequence
  Synthetic oligonucleotide
acgtacagtacgttgcgggaactagtaaaccggtga

SEQ ID NO: 17393 - DNA, 38 bp, Artificial Sequence
  Synthetic oligonucleotide
gagcactaagttcccaaagcaccatttggcggtcatga

SEQ ID NO: 17394 - DNA, 35 bp, Artificial Sequence
  Synthetic oligonucleotide
aagtgcctgtgtgtccacgcccctgggatacccac

SEQ ID NO: 17395 - DNA, 38 bp, Artificial Sequence
  Synthetic oligonucleotide
acagcatatctgagcgttctactatgtcagtctcctga

SEQ ID NO: 17396 - DNA, 35 bp, Artificial Sequence
  Synthetic oligonucleotide
cagtcgtgcctattttctggacgcggttagggctt

SEQ ID NO: 17397 - DNA, 35 bp, Artificial Sequence
  Synthetic oligonucleotide
gcctagagtgacacttacggaggactcaatcctca

SEQ ID NO: 17398 - DNA, 37 bp, Artificial Sequence
  Synthetic oligonucleotide
gttccacgcggcgtagtgggcgaggtcacacaaaaga

SEQ ID NO: 17399 - DNA, 35 bp, Artificial Sequence
  Synthetic oligonucleotide
gttcgtcccggtataatggagccgactgttgtgag

SEQ ID NO: 17400 - DNA, 35 bp, Artificial Sequence
  Synthetic oligonucleotide
gttgcgggtcggtcatggcgttaatacgcgatagg

SEQ ID NO: 17401 - DNA, 37 bp, Artificial Sequence
  Synthetic oligonucleotide
aggtcatgactcgtgttttaaaataagtgtctcttga

SEQ ID NO: 17402 - DNA, 38 bp, Artificial Sequence
  Synthetic oligonucleotide
gaaacgcctcagccagctgtattgatacgaaccactga

SEQ ID NO: 17403 - DNA, 35 bp, Artificial Sequence
  Synthetic oligonucleotide
gcgccccgcgatttgtggatagtccgaaggagtgg

SEQ ID NO: 17404 - DNA, 36 bp, Artificial Sequence
  Synthetic oligonucleotide
aaagacgggggcgacggttaactttaagtatgtcta

SEQ ID NO: 17405 - DNA, 37 bp, Artificial Sequence
  Synthetic oligonucleotide
aaaggaatcgcaagcaggcataaaagccgtggacaga

SEQ ID NO: 17406 - DNA, 35 bp, Artificial Sequence
  Synthetic oligonucleotide
acgacgtgtgcgtgccctcccagatcattgtaacc

SEQ ID NO: 17407 - DNA, 37 bp, Artificial Sequence
  Synthetic oligonucleotide
acgctctaccccaagatgttcgggaacaagcgcgtga

SEQ ID NO: 17408 - DNA, 38 bp, Artificial Sequence
  Synthetic oligonucleotide
agaacaaggtaatggggggcgcgccacggggtgagtga

SEQ ID NO: 17409 - DNA, 34 bp, Artificial Sequence
  Synthetic oligonucleotide
agacacaagggctcccacgggatatagacccatt

SEQ ID NO: 17410 - DNA, 35 bp, Artificial Sequence
  Synthetic oligonucleotide
agacacgtgcccagttcaccagtgagcatgatatg

SEQ ID NO: 17411 - DNA, 38 bp, Artificial Sequence
  Synthetic oligonucleotide
agtgtagtgaagatactttctcacagatatcccactga

SEQ ID NO: 17412 - DNA, 35 bp, Artificial Sequence
  Synthetic oligonucleotide
atcggaaccaaggcgctgttaaaatattacaagga

SEQ ID NO: 17413 - DNA, 35 bp, Artificial Sequence
  Synthetic oligonucleotide
attaggagtgaaacaacccagtagttgttcatagg

SEQ ID NO: 17414 - DNA, 38 bp, Artificial Sequence
  Synthetic oligonucleotide
attgtaggggttgtcgaggtgttttctagccgtgatga

SEQ ID NO: 17415 - DNA, 36 bp, Artificial Sequence
  Synthetic oligonucleotide
gagaaacgtactattggtttatgattgtgaggcgta

SEQ ID NO: 17416 - DNA, 36 bp, Artificial Sequence
  Synthetic oligonucleotide
gcctcaatgagagaccactgcgacgcaagggaataa

SEQ ID NO: 17417 - DNA, 35 bp, Artificial Sequence
  Synthetic oligonucleotide
gcgtaggcgcacagttcaacaggtcaaagactcaa

SEQ ID NO: 17418 - DNA, 38 bp, Artificial Sequence
  Synthetic oligonucleotide
gctaaagctagcgccctgaccaaaccaacgttgtgtga

SEQ ID NO: 17419 - DNA, 36 bp, Artificial Sequence
  Synthetic oligonucleotide
gctggggtaaacgcggtgtcggtgcaacctatacca

SEQ ID NO: 17420 - DNA, 38 bp, Artificial Sequence
  Synthetic oligonucleotide
ggggagggaaccggtctgttgttagactgtgagtgtga

SEQ ID NO: 17421 - DNA, 37 bp, Artificial Sequence
  Synthetic oligonucleotide
gtccgtggtattagccgcgcaatcaggtaatgctgga

SEQ ID NO: 17422 - DNA, 36 bp, Artificial Sequence
  Synthetic oligonucleotide
gtcgcgtagaacagtggttctagaggtggctccgga

SEQ ID NO: 17423 - DNA, 36 bp, Artificial Sequence
  Synthetic oligonucleotide
gtgaggggtttcaatgtaacttatagagtacgatga

SEQ ID NO: 17424 - DNA, 36 bp, Artificial Sequence
  Synthetic oligonucleotide
gtgggttaatgcagtgatacattcagtaaatctaca

SEQ ID NO: 17425 - DNA, 38 bp, Artificial Sequence
  Synthetic oligonucleotide
gtgtacaggcacctctatactgcttcctgatcgactga

SEQ ID NO: 17426 - DNA, 36 bp, Artificial Sequence
  Synthetic oligonucleotide
gttggatgcagtcggcacattatacgaaggcttcta

SEQ ID NO: 17427 - DNA, 36 bp, Artificial Sequence
  Synthetic oligonucleotide
gtttgacaagcgggcggactactcttgtagagtaca

SEQ ID NO: 17428 - DNA, 36 bp, Artificial Sequence
  Synthetic oligonucleotide
taccgcccgctctctacagttcatccccccgcggga

SEQ ID NO: 17429 - DNA, 36 bp, Artificial Sequence
  Synthetic oligonucleotide
tagccgccgcagtgactaatctaggggatgcggcta

SEQ ID NO: 17430 - DNA, 37 bp, Artificial Sequence
  Synthetic oligonucleotide
tataagacactgcagaaatgtataacctggcctatga

SEQ ID NO: 17431 - DNA, 35 bp, Artificial Sequence
  Synthetic oligonucleotide
tcaaccagatcgtttcttttaaaacaacggccgtc

SEQ ID NO: 17432 - DNA, 38 bp, Artificial Sequence
  Synthetic oligonucleotide
tgtcaagtcagttattgagccggtattgccctttttga

SEQ ID NO: 17433 - DNA, 38 bp, Artificial Sequence
  Synthetic oligonucleotide
tgtcacgagggcttgcggtccaagtgccacgttcatga

SEQ ID NO: 17434 - DNA, 36 bp, Artificial Sequence
  Synthetic oligonucleotide
ttgagaatagggcgcaacatagtcgaagtccgcgga

SEQ ID NO: 17435 - DNA, 36 bp, Artificial Sequence
  Synthetic oligonucleotide
ttgggcagataccgtgccccttcggtatgtagcaga

SEQ ID NO: 17436 - DNA, 36 bp, Artificial Sequence
  Synthetic oligonucleotide
tttcgtggggttggtcccactgtacgtgcagtatta

SEQ ID NO: 17437 - DNA, 38 bp, Artificial Sequence
  Synthetic oligonucleotide
ggtcgttccgggtcgggtatcagctatggtaaagctga

SEQ ID NO: 17438 - DNA, 36 bp, Artificial Sequence
  Synthetic oligonucleotide
gagaactgcgatggcgagcttacacgcgacagcgta

SEQ ID NO: 17439 - DNA, 37 bp, Artificial Sequence
  Synthetic oligonucleotide
tgaccaatggtgtcgacaaacgggtctaggatagtga

SEQ ID NO: 17440 - DNA, 36 bp, Artificial Sequence
  Synthetic oligonucleotide
tgtccaagctgtttagatgaagttaagatgctaaga

SEQ ID NO: 17441 - DNA, 37 bp, Artificial Sequence
  Synthetic oligonucleotide
gactagatagttactgtatctgagtggaatggaacga

SEQ ID NO: 17442 - DNA, 36 bp, Artificial Sequence
  Synthetic oligonucleotide
gatccggacaagtagattcatggagacgtacgaaga

SEQ ID NO: 17443 - DNA, 37 bp, Artificial Sequence
  Synthetic oligonucleotide
tgctgtggttgtgggcattcatagtgcaatggtatga

SEQ ID NO: 17444 - DNA, 36 bp, Artificial Sequence
  Synthetic oligonucleotide
tttgctgagcgaagcaagccctgcgcccgtgtgaga

SEQ ID NO: 17445 - DNA, 35 bp, Artificial Sequence
  Synthetic oligonucleotide
gccaaatgctaatggtagggtgatgcttcatgctc

SEQ ID NO: 17446 - DNA, 35 bp, Artificial Sequence
  Synthetic oligonucleotide
gtgggtgtacgacgaacctcgacatggagcatgtt

SEQ ID NO: 17447 - DNA, 38 bp, Artificial Sequence
  Synthetic oligonucleotide
atttcccgtgcggacgatcatagcgcaaggagatttga

SEQ ID NO: 17448 - DNA, 35 bp, Artificial Sequence
  Synthetic oligonucleotide
gactacggtatttttaccgaatgtctgcgcactta

SEQ ID NO: 17449 - DNA, 38 bp, Artificial Sequence
  Synthetic oligonucleotide
gcatgaacggttatgaaccaagaaagtccgctaggtga

SEQ ID NO: 17450 - DNA, 37 bp, Artificial Sequence
  Synthetic oligonucleotide
ggtcccttacgtagtcgattagtaaggttgaagggga

SEQ ID NO: 17451 - DNA, 38 bp, Artificial Sequence
  Synthetic oligonucleotide
gtgggtgtgatgtgtactcatctacctgacgactctga

SEQ ID NO: 17452 - DNA, 35 bp, Artificial Sequence
  Synthetic oligonucleotide
tagcacggagtggggaattcaatggggttacgtaa

SEQ ID NO: 17453 - DNA, 38 bp, Artificial Sequence
  Synthetic oligonucleotide
tcacggtcaaggacggacactgaggatgtggctattga

SEQ ID NO: 17454 - DNA, 38 bp, Artificial Sequence
  Synthetic oligonucleotide
tccacgtactcggctggtacaaaacgttgaagtactga

SEQ ID NO: 17455 - DNA, 35 bp, Artificial Sequence
  Synthetic oligonucleotide
tgctcgatgaccagagtgatccgggaattgctcct

SEQ ID NO: 17456 - DNA, 35 bp, Artificial Sequence
  Synthetic oligonucleotide
ttaacgtgcaacgctcatttatgacatacgtaggg

SEQ ID NO: 17457 - DNA, 35 bp, Artificial Sequence
  Synthetic oligonucleotide
ttagtgtttggcaggctaccctgaccacccgctgt

SEQ ID NO: 17458 - DNA, 37 bp, Artificial Sequence
  Synthetic oligonucleotide
ttggacatcaaggaggacgtatgtctgccagtcacga

SEQ ID NO: 17459 - DNA, 37 bp, Artificial Sequence
  Synthetic oligonucleotide
agacatgcaagggtcagtttttggtcccttggtcaga

SEQ ID NO: 17460 - DNA, 35 bp, Artificial Sequence
  Synthetic oligonucleotide
gtggagcgaattccggatagcccagaggtacccac

SEQ ID NO: 17461 - DNA, 37 bp, Artificial Sequence
  Synthetic oligonucleotide
taggttggacacactgtcctgacctgacgttaggcga

SEQ ID NO: 17462 - DNA, 35 bp, Artificial Sequence
  Synthetic oligonucleotide
tctacaacgtacatgggcgagaacttgggtcgtga

SEQ ID NO: 17463 - DNA, 37 bp, Artificial Sequence
  Synthetic oligonucleotide
ttcaggcatttgatacttgactagtgctcagttacga

SEQ ID NO: 17464 - DNA, 35 bp, Artificial Sequence
  Synthetic oligonucleotide
aatatagctgtcacgaagggaagatgttctatgag

SEQ ID NO: 17465 - DNA, 38 bp, Artificial Sequence
  Synthetic oligonucleotide
acgcctagtgagcgtacttaaggttcatgtcttgttga

SEQ ID NO: 17466 - DNA, 35 bp, Artificial Sequence
  Synthetic oligonucleotide
gaccaaggcacggaccagagatagatagcatccac

SEQ ID NO: 17467 - DNA, 36 bp, Artificial Sequence
  Synthetic oligonucleotide
ggaaacggacagtagagcgcaggtatcaggatatga

SEQ ID NO: 17468 - DNA, 35 bp, Artificial Sequence
  Synthetic oligonucleotide
tcagacacgtggggccattacacgtgcgggcgttg

SEQ ID NO: 17469 - DNA, 36 bp, Artificial Sequence
  Synthetic oligonucleotide
tgcacaccgaatgctgtgcgccacggatgggccaca

SEQ ID NO: 17470 - DNA, 37 bp, Artificial Sequence
  Synthetic oligonucleotide
tgtgcttttaacggactgacgcatggagagcgcgaga

SEQ ID NO: 17471 - DNA, 38 bp, Artificial Sequence
  Synthetic oligonucleotide
aactgcacatgtctatatttgtttaccgcacatcgtga

SEQ ID NO: 17472 - DNA, 37 bp, Artificial Sequence
  Synthetic oligonucleotide
aaggaacgaagttagcattcgaaggactggcattgga

SEQ ID NO: 17473 - DNA, 35 bp, Artificial Sequence
  Synthetic oligonucleotide
aatgcaaaggtaggtcatgggttacggtcttgatg

SEQ ID NO: 17474 - DNA, 38 bp, Artificial Sequence
  Synthetic oligonucleotide
acacgaacgtgaacgtaggaacggtgtggtcgttatga

SEQ ID NO: 17475 - DNA, 36 bp, Artificial Sequence
  Synthetic oligonucleotide
acccatgcttggaggcgtcaaagagccacgacttga

SEQ ID NO: 17476 - DNA, 35 bp, Artificial Sequence
  Synthetic oligonucleotide
accgtactcttgcgacaagtgatgcctttggaagc

SEQ ID NO: 17477 - DNA, 38 bp, Artificial Sequence
  Synthetic oligonucleotide
acttaagcgtggacgtgacgttcaggttggagtcttga

SEQ ID NO: 17478 - DNA, 36 bp, Artificial Sequence
  Synthetic oligonucleotide
agagatagctaggggtcctttggggctcgaataaga

SEQ ID NO: 17479 - DNA, 36 bp, Artificial Sequence
  Synthetic oligonucleotide
agatacggggtagctattgcaaggtttcgaacggga

SEQ ID NO: 17480 - DNA, 35 bp, Artificial Sequence
  Synthetic oligonucleotide
agattatcgctccggcgctgcaaggtaggtatgcg

SEQ ID NO: 17481 - DNA, 35 bp, Artificial Sequence
  Synthetic oligonucleotide
agcaataagtctagtaggtgacttggtacgtgctg

SEQ ID NO: 17482 - DNA, 35 bp, Artificial Sequence
  Synthetic oligonucleotide
agcgcgtaagtggcaaggtttcgagatgttttcgt

SEQ ID NO: 17483 - DNA, 36 bp, Artificial Sequence
  Synthetic oligonucleotide
atggtcactacagaacgacgaacatcaggctgtaca

SEQ ID NO: 17484 - DNA, 35 bp, Artificial Sequence
  Synthetic oligonucleotide
ctctggcacatcgcggccaccccgcgggttcgatg

SEQ ID NO: 17485 - DNA, 37 bp, Artificial Sequence
  Synthetic oligonucleotide
gaatgcaggtggctcaaaggcaatatagtagccttga

SEQ ID NO: 17486 - DNA, 37 bp, Artificial Sequence
  Synthetic oligonucleotide
gagacgcggttgaccattgccttcatgatgcgctcga

SEQ ID NO: 17487 - DNA, 37 bp, Artificial Sequence
  Synthetic oligonucleotide
gatacgaaaaaaagccactgcgtatgtagggacttga

SEQ ID NO: 17488 - DNA, 35 bp, Artificial Sequence
  Synthetic oligonucleotide
gatttgtcacgatgcaacttgatgattttaggaag

SEQ ID NO: 17489 - DNA, 37 bp, Artificial Sequence
  Synthetic oligonucleotide
gccacgagttccgaacggggccatttcctaccacgga

SEQ ID NO: 17490 - DNA, 37 bp, Artificial Sequence
  Synthetic oligonucleotide
gcccgtgaggggggacgggacgtaatgggttttcgga

SEQ ID NO: 17491 - DNA, 35 bp, Artificial Sequence
  Synthetic oligonucleotide
gctttgccagtgagaaaaggtagaaacgagccagg

SEQ ID NO: 17492 - DNA, 35 bp, Artificial Sequence
  Synthetic oligonucleotide
gggagggaagcacacgagccgtgtttcgaataatg

SEQ ID NO: 17493 - DNA, 38 bp, Artificial Sequence
  Synthetic oligonucleotide
ggtcgagacgggacacaattgaacagtcagagctatga

SEQ ID NO: 17494 - DNA, 32 bp, Artificial Sequence
  Synthetic oligonucleotide
gtaatggatgtattgatgccgagttgtagcta

SEQ ID NO: 17495 - DNA, 37 bp, Artificial Sequence
  Synthetic oligonucleotide
gtcacgtggacatgtgccaggataagtttgctaatga

SEQ ID NO: 17496 - DNA, 37 bp, Artificial Sequence
  Synthetic oligonucleotide
gtcctgtctgggtgcgatcaggaaaggccgaacgaga

SEQ ID NO: 17497 - DNA, 37 bp, Artificial Sequence
  Synthetic oligonucleotide
gtgatgagcgattaactggtatgagggcacaacacga

SEQ ID NO: 17498 - DNA, 36 bp, Artificial Sequence
  Synthetic oligonucleotide
taatgtcaatagtagctgctctccacgaggttaata

SEQ ID NO: 17499 - DNA, 35 bp, Artificial Sequence
  Synthetic oligonucleotide
tcacaatggaacgtacacgacaatatcgtgttgca

SEQ ID NO: 17500 - DNA, 37 bp, Artificial Sequence
  Synthetic oligonucleotide
tctgggccaagggatgggaaggatagggcccatgaga

SEQ ID NO: 17501 - DNA, 35 bp, Artificial Sequence
  Synthetic oligonucleotide
tgaagggacggtctagcattgtggtttgttggggt

SEQ ID NO: 17502 - DNA, 37 bp, Artificial Sequence
  Synthetic oligonucleotide
tggatttagaactcttgccacagagatctctgagaga

SEQ ID NO: 17503 - DNA, 35 bp, Artificial Sequence
  Synthetic oligonucleotide
tgtctgtacggagcgaagtaactaacgcataacga

SEQ ID NO: 17504 - DNA, 37 bp, Artificial Sequence
  Synthetic oligonucleotide
ccatgcatctggatgggacgtactgtctaaaagatga

SEQ ID NO: 17505 - DNA, 36 bp, Artificial Sequence
  Synthetic oligonucleotide
aacaagcaggattgacttacggaccagccattgcaa

SEQ ID NO: 17506 - DNA, 36 bp, Artificial Sequence
  Synthetic oligonucleotide
agcatgcgatgtatttgcatgattacgtgctttaca

SEQ ID NO: 17507 - DNA, 38 bp, Artificial Sequence
  Synthetic oligonucleotide
gtctggccaagagaggacaaaacgtcactgcgagctga

SEQ ID NO: 17508 - DNA, 38 bp, Artificial Sequence
  Synthetic oligonucleotide
tcagtactgaattgtaactgcgctgtcctgaacggtga

SEQ ID NO: 17509 - DNA, 38 bp, Artificial Sequence
  Synthetic oligonucleotide
acgagatcatgtagcttggtagtgtatgtcttgcggga

SEQ ID NO: 17510 - DNA, 35 bp, Artificial Sequence
  Synthetic oligonucleotide
aaaacattgtttaggttggtcttgagcgaacggtg

SEQ ID NO: 17511 - DNA, 37 bp, Artificial Sequence
  Synthetic oligonucleotide
aaaccgtctggtggtatatactctccactccacggga

SEQ ID NO: 17512 - DNA, 35 bp, Artificial Sequence
  Synthetic oligonucleotide
aaacgtgctccatgatttcgctagcctacggctcg

SEQ ID NO: 17513 - DNA, 35 bp, Artificial Sequence
  Synthetic oligonucleotide
aaagcgggacgcttgggttgttatgctctgatatg

SEQ ID NO: 17514 - DNA, 35 bp, Artificial Sequence
  Synthetic oligonucleotide
aaatgggatacattggccctcgactgaaggcacct

SEQ ID NO: 17515 - DNA, 38 bp, Artificial Sequence
  Synthetic oligonucleotide
aatatgcaggagtgatggcatcggacaatgtactctga

SEQ ID NO: 17516 - DNA, 36 bp, Artificial Sequence
  Synthetic oligonucleotide
aatggagaagcaacgcaggttatacgacaacatgga

SEQ ID NO: 17517 - DNA, 36 bp, Artificial Sequence
  Synthetic oligonucleotide
aatggggctatgcatagaagtcacagtggggaagga

SEQ ID NO: 17518 - DNA, 35 bp, Artificial Sequence
  Synthetic oligonucleotide
acacaaggcaggcctgctcggaatttatgaaaaac

SEQ ID NO: 17519 - DNA, 35 bp, Artificial Sequence
  Synthetic oligonucleotide
acaggctcactgtagaagtcgcccctcgctcttgt

SEQ ID NO: 17520 - DNA, 38 bp, Artificial Sequence
  Synthetic oligonucleotide
acatcactaaagcggattcattcatatcgcgtacgtga

SEQ ID NO: 17521 - DNA, 35 bp, Artificial Sequence
  Synthetic oligonucleotide
acatggccgtgaatcctgcaacatggccactacgt

SEQ ID NO: 17522 - DNA, 35 bp, Artificial Sequence
  Synthetic oligonucleotide
acgcgaagataaggaaagcccgctattaaagacgt

SEQ ID NO: 17523 - DNA, 37 bp, Artificial Sequence
  Synthetic oligonucleotide
acgtacaaaattagtatgtcgagctgccccaacagga

SEQ ID NO: 17524 - DNA, 37 bp, Artificial Sequence
  Synthetic oligonucleotide
acgttactgtaacgacttacgtgggtcacggtggtga

SEQ ID NO: 17525 - DNA, 37 bp, Artificial Sequence
  Synthetic oligonucleotide
agagtactcccgctcatggttttcgactgaaagcaga

SEQ ID NO: 17526 - DNA, 37 bp, Artificial Sequence
  Synthetic oligonucleotide
aggatttcgtaggtccagtgctgcgagtttgagtgga

SEQ ID NO: 17527 - DNA, 36 bp, Artificial Sequence
  Synthetic oligonucleotide
aggggtaagtgcttgtaatttcgtatatgttataga

SEQ ID NO: 17528 - DNA, 36 bp, Artificial Sequence
  Synthetic oligonucleotide
aggtccgttcagtatggttgttgatttctggtacga

SEQ ID NO: 17529 - DNA, 37 bp, Artificial Sequence
  Synthetic oligonucleotide
agtccctgtactgggtggagaacgcctgtgaaacaga

SEQ ID NO: 17530 - DNA, 38 bp, Artificial Sequence
  Synthetic oligonucleotide
agtcgtctaccaaaaggttcggatatagtggcatctga

SEQ ID NO: 17531 - DNA, 35 bp, Artificial Sequence
  Synthetic oligonucleotide
agtttaggctaccaagtcaaactagtcactggagt

SEQ ID NO: 17532 - DNA, 36 bp, Artificial Sequence
  Synthetic oligonucleotide
atagatgacaattcgggattagttaacagaaaagca

SEQ ID NO: 17533 - DNA, 37 bp, Artificial Sequence
  Synthetic oligonucleotide
atcggaggtctaccgctattactgctacttgacagga

SEQ ID NO: 17534 - DNA, 36 bp, Artificial Sequence
  Synthetic oligonucleotide
atcggattgaggtgcctcgaaacccaagttcagcaa

SEQ ID NO: 17535 - DNA, 37 bp, Artificial Sequence
  Synthetic oligonucleotide
atggaagggatgagttcgcgctcgcgccgctagcgga

SEQ ID NO: 17536 - DNA, 37 bp, Artificial Sequence
  Synthetic oligonucleotide
atgtctttgtccatgaagttaagtaggaacctacaga

SEQ ID NO: 17537 - DNA, 37 bp, Artificial Sequence
  Synthetic oligonucleotide
caacgcggggaacaaggtattggtggttccattagga

SEQ ID NO: 17538 - DNA, 37 bp, Artificial Sequence
  Synthetic oligonucleotide
catgaccgcacggggttaccagctagagcaaccggga

SEQ ID NO: 17539 - DNA, 38 bp, Artificial Sequence
  Synthetic oligonucleotide
ccagaggatgaatgattcggaatagtgggtctcgctga

SEQ ID NO: 17540 - DNA, 38 bp, Artificial Sequence
  Synthetic oligonucleotide
ccgggtaagtcgagcgtgttcttaaattcatcatatga

SEQ ID NO: 17541 - DNA, 36 bp, Artificial Sequence
  Synthetic oligonucleotide
ctgagagaatatttgttcgagccttcgctaagagca

SEQ ID NO: 17542 - DNA, 36 bp, Artificial Sequence
  Synthetic oligonucleotide
gaaaacccagggggtaaatagcctgttagtcatgga

SEQ ID NO: 17543 - DNA, 38 bp, Artificial Sequence
  Synthetic oligonucleotide
gaaacttcggaacgatgagtgcccgtacgcggggttga

SEQ ID NO: 17544 - DNA, 37 bp, Artificial Sequence
  Synthetic oligonucleotide
gaacgtctacgaaagcaacctgcagagaatcgatgga

SEQ ID NO: 17545 - DNA, 35 bp, Artificial Sequence
  Synthetic oligonucleotide
gaagtcgggagggcttgacaggattattattcgat

SEQ ID NO: 17546 - DNA, 38 bp, Artificial Sequence
  Synthetic oligonucleotide
gaagtgtcattcttactaacgcagacttatcgctgtga

SEQ ID NO: 17547 - DNA, 35 bp, Artificial Sequence
  Synthetic oligonucleotide
gacctacgggtacaattgctcttttactctgagac

SEQ ID NO: 17548 - DNA, 36 bp, Artificial Sequence
  Synthetic oligonucleotide
gacgcacaagcaaagtaggtcctgtcgattacaaga

SEQ ID NO: 17549 - DNA, 36 bp, Artificial Sequence
  Synthetic oligonucleotide
gacgttcagggggagccgattgattggaaatgctta

SEQ ID NO: 17550 - DNA, 35 bp, Artificial Sequence
  Synthetic oligonucleotide
gaggtcctgttgaagtactacagacagatccggag

SEQ ID NO: 17551 - DNA, 38 bp, Artificial Sequence
  Synthetic oligonucleotide
gaggtgttcggcccgcttgacatttaaaaattgaatga

SEQ ID NO: 17552 - DNA, 38 bp, Artificial Sequence
  Synthetic oligonucleotide
gatggcgtgtccacgtactgtcacctgcatcatcttga

SEQ ID NO: 17553 - DNA, 36 bp, Artificial Sequence
  Synthetic oligonucleotide
gattgtaccgtacaggactgaaggtttccggtaaaa

SEQ ID NO: 17554 - DNA, 35 bp, Artificial Sequence
  Synthetic oligonucleotide
gcaacaatgtaatggtgtcacggacgagacgtgag

SEQ ID NO: 17555 - DNA, 37 bp, Artificial Sequence
  Synthetic oligonucleotide
gcaagtctcgcgttataactggttcggttttcccgga

SEQ ID NO: 17556 - DNA, 36 bp, Artificial Sequence
  Synthetic oligonucleotide
gcaattgcgtaacacgcacctgcggttcttttcaga

SEQ ID NO: 17557 - DNA, 36 bp, Artificial Sequence
  Synthetic oligonucleotide
gccgatacacgtataaatgagttggcttaccttgca

SEQ ID NO: 17558 - DNA, 38 bp, Artificial Sequence
  Synthetic oligonucleotide
gccggttgttccatggaacatctcgaaacttacgatga

SEQ ID NO: 17559 - DNA, 37 bp, Artificial Sequence
  Synthetic oligonucleotide
gcgaagcgaagtagcgtgtactctacgtacgccgtga

SEQ ID NO: 17560 - DNA, 37 bp, Artificial Sequence
  Synthetic oligonucleotide
gctcccggatatgtttagaacgtagtgattcatcaga

SEQ ID NO: 17561 - DNA, 37 bp, Artificial Sequence
  Synthetic oligonucleotide
gctcgtcaacgtgcagtttataggcgataatgtagga

SEQ ID NO: 17562 - DNA, 35 bp, Artificial Sequence
  Synthetic oligonucleotide
gctgacatatccatgtcaagttggtgtaccgatgt

SEQ ID NO: 17563 - DNA, 38 bp, Artificial Sequence
  Synthetic oligonucleotide
ggaaagagcaccgtacctggcgacggcacagcatttga

SEQ ID NO: 17564 - DNA, 37 bp, Artificial Sequence
  Synthetic oligonucleotide
ggctctcagccacggccccccactgctgtatctttga

SEQ ID NO: 17565 - DNA, 35 bp, Artificial Sequence
  Synthetic oligonucleotide
gggaaaatcagaatcccgttgatcgtgcggttagt

SEQ ID NO: 17566 - DNA, 36 bp, Artificial Sequence
  Synthetic oligonucleotide
gggtaatcacaatgcggctagcttcaacatttgaaa

SEQ ID NO: 17567 - DNA, 36 bp, Artificial Sequence
  Synthetic oligonucleotide
gggtccactggcgcgaagtcctctggacttctacta

SEQ ID NO: 17568 - DNA, 36 bp, Artificial Sequence
  Synthetic oligonucleotide
gggtgatagtcggctatcagtccttatgggccagaa

SEQ ID NO: 17569 - DNA, 35 bp, Artificial Sequence
  Synthetic oligonucleotide
ggtaagaccttttgtaggacgtccggcatttggag

SEQ ID NO: 17570 - DNA, 36 bp, Artificial Sequence
  Synthetic oligonucleotide
ggtacgatagttacccttcagtgaccgaatcttgaa

SEQ ID NO: 17571 - DNA, 37 bp, Artificial Sequence
  Synthetic oligonucleotide
ggtagtgaactgggagttatgattcctgcatgctaga

SEQ ID NO: 17572 - DNA, 36 bp, Artificial Sequence
  Synthetic oligonucleotide
ggtatgctttgtgaacattttttggtgtgatgtgga

SEQ ID NO: 17573 - DNA, 35 bp, Artificial Sequence
  Synthetic oligonucleotide
ggtgcagatcacaaaggtggacctccgttacgtta

SEQ ID NO: 17574 - DNA, 36 bp, Artificial Sequence
  Synthetic oligonucleotide
gtacgttcatgggatggtcggtcgttgaggaatcta

SEQ ID NO: 17575 - DNA, 37 bp, Artificial Sequence
  Synthetic oligonucleotide
gtaggtactgccgatgatgtggggttgttgaatagga

SEQ ID NO: 17576 - DNA, 38 bp, Artificial Sequence
  Synthetic oligonucleotide
gtatgggacctcagctactaaacttggatagtcggtga

SEQ ID NO: 17577 - DNA, 36 bp, Artificial Sequence
  Synthetic oligonucleotide
gtattgttccatggctccataggagggtgtggggta

SEQ ID NO: 17578 - DNA, 37 bp, Artificial Sequence
  Synthetic oligonucleotide
gtgcggtctattgattatctgatgttgttttacatga

SEQ ID NO: 17579 - DNA, 38 bp, Artificial Sequence
  Synthetic oligonucleotide
gtgctgcacagtgactgcctacaatgacagtctgctga

SEQ ID NO: 17580 - DNA, 36 bp, Artificial Sequence
  Synthetic oligonucleotide
gtgctgcatgctggactgcgagaagtaccgaggtta

SEQ ID NO: 17581 - DNA, 35 bp, Artificial Sequence
  Synthetic oligonucleotide
gtgtaacggataacatggaaggataatgatttagt

SEQ ID NO: 17582 - DNA, 36 bp, Artificial Sequence
  Synthetic oligonucleotide
gtgtacgcgtggttacaccgcggacaagataagata

SEQ ID NO: 17583 - DNA, 37 bp, Artificial Sequence
  Synthetic oligonucleotide
gttcactccactgctactataacaggattcaaccaga

SEQ ID NO: 17584 - DNA, 36 bp, Artificial Sequence
  Synthetic oligonucleotide
gtttccagcgtaagcgtcccggggcacttgtggtca

SEQ ID NO: 17585 - DNA, 38 bp, Artificial Sequence
  Synthetic oligonucleotide
taaaaaagtgaggtgctgccgagctttccactggctga

SEQ ID NO: 17586 - DNA, 35 bp, Artificial Sequence
  Synthetic oligonucleotide
taaagcccctaggagacccctcgtggtggactcca

SEQ ID NO: 17587 - DNA, 38 bp, Artificial Sequence
  Synthetic oligonucleotide
taaatggagattgcgcgtgagtgcgaggcgccaaatga

SEQ ID NO: 17588 - DNA, 36 bp, Artificial Sequence
  Synthetic oligonucleotide
tacacgattgggttgtctcattgttagttaatttta

SEQ ID NO: 17589 - DNA, 38 bp, Artificial Sequence
  Synthetic oligonucleotide
tacatcgccgagtggttttaccatggccacgagagtga

SEQ ID NO: 17590 - DNA, 36 bp, Artificial Sequence
  Synthetic oligonucleotide
tacattggagattgaaagacaatgtacattcctgga

SEQ ID NO: 17591 - DNA, 37 bp, Artificial Sequence
  Synthetic oligonucleotide
tacctccccacattgaatcacagttaggcccgcctga

SEQ ID NO: 17592 - DNA, 38 bp, Artificial Sequence
  Synthetic oligonucleotide
tacgccccagggacctaggaccgagttcataatattga

SEQ ID NO: 17593 - DNA, 35 bp, Artificial Sequence
  Synthetic oligonucleotide
tcagtagggtggttccgctttccgtgctccccgtt

SEQ ID NO: 17594 - DNA, 36 bp, Artificial Sequence
  Synthetic oligonucleotide
tccaccaaccggtgtgctgatacagctgtacatgga

SEQ ID NO: 17595 - DNA, 36 bp, Artificial Sequence
  Synthetic oligonucleotide
tccgatgaacggagtcagagaggcttaaacaaagga

SEQ ID NO: 17596 - DNA, 37 bp, Artificial Sequence
  Synthetic oligonucleotide
tcgacttcatgatggagccaaatcatgggtagataga

SEQ ID NO: 17597 - DNA, 38 bp, Artificial Sequence
  Synthetic oligonucleotide
tcgagtaagccctagggcgagctccgggttgcgcttga

SEQ ID NO: 17598 - DNA, 35 bp, Artificial Sequence
  Synthetic oligonucleotide
tcgcgacatcgtacagaaacggttgtttctgacgc

SEQ ID NO: 17599 - DNA, 37 bp, Artificial Sequence
  Synthetic oligonucleotide
tctatgaacgtggggtgatcctcgaactgcggggcga

SEQ ID NO: 17600 - DNA, 38 bp, Artificial Sequence
  Synthetic oligonucleotide
tctcattgtggtgctacagataggcgccgacacagtga

SEQ ID NO: 17601 - DNA, 35 bp, Artificial Sequence
  Synthetic oligonucleotide
tgaatcaaggcgtgatatcggttttcgtggagtag

SEQ ID NO: 17602 - DNA, 35 bp, Artificial Sequence
  Synthetic oligonucleotide
tgagaacgattcagggatgatttatctctgctgta

SEQ ID NO: 17603 - DNA, 38 bp, Artificial Sequence
  Synthetic oligonucleotide
tgagtaggtccccgtgtgggctacggacttttgtgtga

SEQ ID NO: 17604 - DNA, 38 bp, Artificial Sequence
  Synthetic oligonucleotide
tgccacagaggctagagaaccctgacatgtcgccttga

SEQ ID NO: 17605 - DNA, 35 bp, Artificial Sequence
  Synthetic oligonucleotide
tgccactggggtgcacggatttacaacaagattta

SEQ ID NO: 17606 - DNA, 36 bp, Artificial Sequence
  Synthetic oligonucleotide
tgcgaattatatagttggttgatggtccttgggaga

SEQ ID NO: 17607 - DNA, 38 bp, Artificial Sequence
  Synthetic oligonucleotide
tgggggttacgccatccactcgaagagatccgctctga

SEQ ID NO: 17608 - DNA, 38 bp, Artificial Sequence
  Synthetic oligonucleotide
tgtaccgaccagcatgggatcatcgctgtaatcgctga

SEQ ID NO: 17609 - DNA, 38 bp, Artificial Sequence
  Synthetic oligonucleotide
tgttccgtaccccggcccccagtgatgccatcggttga

SEQ ID NO: 17610 - DNA, 36 bp, Artificial Sequence
  Synthetic oligonucleotide
ttatgggaccggccaccggtctgcgtgttcaccgga

SEQ ID NO: 17611 - DNA, 37 bp, Artificial Sequence
  Synthetic oligonucleotide
ttcacgggtgcaggagggtgagggatttgaagggtga

SEQ ID NO: 17612 - DNA, 37 bp, Artificial Sequence
  Synthetic oligonucleotide
ttggaacacacgacggacacccattagttaactgtga

SEQ ID NO: 17613 - DNA, 36 bp, Artificial Sequence
  Synthetic oligonucleotide
ttggtctggaccagataatgtctatggcagtcaaga

SEQ ID NO: 17614 - DNA, 35 bp, Artificial Sequence
  Synthetic oligonucleotide
ttgtaaccggacgtaggcctccttctttcccatgt

SEQ ID NO: 17615 - DNA, 35 bp, Artificial Sequence
  Synthetic oligonucleotide
ttgtacaaatagtggtcgacgtatgattatagtcc

SEQ ID NO: 17616 - DNA, 37 bp, Artificial Sequence
  Synthetic oligonucleotide
tgggcctatacattcagaatttaatgcagcacatgga

SEQ ID NO: 17617 - DNA, 38 bp, Artificial Sequence
  Synthetic oligonucleotide
aagcgccagcctacacgaagggtgcggccacgtagtga

SEQ ID NO: 17618 - DNA, 37 bp, Artificial Sequence
  Synthetic oligonucleotide
aagggcttctatggcctgtgtcaattcgaccctcaga

SEQ ID NO: 17619 - DNA, 36 bp, Artificial Sequence
  Synthetic oligonucleotide
aatatgggtgctttactaatgtgacattctaggcga

SEQ ID NO: 17620 - DNA, 38 bp, Artificial Sequence
  Synthetic oligonucleotide
agactggtgattgtgagtagatgagttcggtggattga

SEQ ID NO: 17621 - DNA, 37 bp, Artificial Sequence
  Synthetic oligonucleotide
aggtatggtcccggccgccgaatcgggcggggagcga

SEQ ID NO: 17622 - DNA, 35 bp, Artificial Sequence
  Synthetic oligonucleotide
atatggggtgccgtaaccaaccggctcatatacga

SEQ ID NO: 17623 - DNA, 36 bp, Artificial Sequence
  Synthetic oligonucleotide
atctgccggttggaagcgctagcggattaggccgta

SEQ ID NO: 17624 - DNA, 38 bp, Artificial Sequence
  Synthetic oligonucleotide
ctattttcagtaccagcatgtagagcagacgctcctga

SEQ ID NO: 17625 - DNA, 35 bp, Artificial Sequence
  Synthetic oligonucleotide
ctgaacgtgccatgtttgatgacgtgtctgaccat

SEQ ID NO: 17626 - DNA, 35 bp, Artificial Sequence
  Synthetic oligonucleotide
gccttgtgcatttactggtagtaccataataaatg

SEQ ID NO: 17627 - DNA, 37 bp, Artificial Sequence
  Synthetic oligonucleotide
gcggaacgcaagactgttagaaggattgtgtatggga

SEQ ID NO: 17628 - DNA, 36 bp, Artificial Sequence
  Synthetic oligonucleotide
gctacaatcgcaatcctgaccgccattgtgcatgta

SEQ ID NO: 17629 - DNA, 36 bp, Artificial Sequence
  Synthetic oligonucleotide
ggaactgttttgtatgtactgccactgacccaggga

SEQ ID NO: 17630 - DNA, 37 bp, Artificial Sequence
  Synthetic oligonucleotide
ggataggcccaggcctccgggccacgctagggcggga

SEQ ID NO: 17631 - DNA, 35 bp, Artificial Sequence
  Synthetic oligonucleotide
ggatccattcctggaccagtcttcgtttggttgtt

SEQ ID NO: 17632 - DNA, 37 bp, Artificial Sequence
  Synthetic oligonucleotide
gtatgagcaagtaagaacgcctaggtgactcgaccga

SEQ ID NO: 17633 - DNA, 38 bp, Artificial Sequence
  Synthetic oligonucleotide
tagtcctgaacagtgggactgggggaataagggcctga

SEQ ID NO: 17634 - DNA, 37 bp, Artificial Sequence
  Synthetic oligonucleotide
tatgtcctggatcacgggcaccatacgtggtacggga

SEQ ID NO: 17635 - DNA, 38 bp, Artificial Sequence
  Synthetic oligonucleotide
tccggacatagacgccaatcacatgtcaaacaaggtga

SEQ ID NO: 17636 - DNA, 35 bp, Artificial Sequence
  Synthetic oligonucleotide
tgctcatagtttgtctaccatggccatacggtaat

SEQ ID NO: 17637 - DNA, 36 bp, Artificial Sequence
  Synthetic oligonucleotide
tgtaacgtcacgcggggttacctgtgcccgtacgta

SEQ ID NO: 17638 - DNA, 37 bp, Artificial Sequence
  Synthetic oligonucleotide
ttattaacgccgatccatgaacaaagtgatagtgtga

SEQ ID NO: 17639 - DNA, 38 bp, Artificial Sequence
  Synthetic oligonucleotide
ttccagcacattgtgtgagtgttggagaccacgcttga

SEQ ID NO: 17640 - DNA, 37 bp, Artificial Sequence
  Synthetic oligonucleotide
ttcgtgcccacacgcagtaggtgcatggtggacacga

SEQ ID NO: 17641 - DNA, 35 bp, Artificial Sequence
  Synthetic oligonucleotide
ttctatccctttcagctattcggatttagtcaggt

SEQ ID NO: 17642 - DNA, 37 bp, Artificial Sequence
  Synthetic oligonucleotide
tcactgcttaccgtgcaatattccaataatgctttga

SEQ ID NO: 17643 - DNA, 36 bp, Artificial Sequence
  Synthetic oligonucleotide
aactgcaattctgtgatggtttgggctatgtttaaa

SEQ ID NO: 17644 - DNA, 38 bp, Artificial Sequence
  Synthetic oligonucleotide
gtcccacatcggtgtccttgttttcttggccgtgctga

SEQ ID NO: 17645 - DNA, 38 bp, Artificial Sequence
  Synthetic oligonucleotide
gtctggtactgaatgtcgcgttgtacattgggtgatga

SEQ ID NO: 17646 - DNA, 36 bp, Artificial Sequence
  Synthetic oligonucleotide
gaaggaactgctacgttctttgtcgagtccaggcga

SEQ ID NO: 17647 - DNA, 35 bp, Artificial Sequence
  Synthetic oligonucleotide
gtcgagcgctagtagggcacatcgcacttttctgg

SEQ ID NO: 17648 - DNA, 36 bp, Artificial Sequence
  Synthetic oligonucleotide
tcagtgtggcgggttacgtggacaaattcaagtcga

SEQ ID NO: 17649 - DNA, 35 bp, Artificial Sequence
  Synthetic oligonucleotide
acccacgcataacatcgttttggacccgattcaat

SEQ ID NO: 17650 - DNA, 38 bp, Artificial Sequence
  Synthetic oligonucleotide
ggacaagaccgtcaatttgaaaaatttgatgcaaatga

SEQ ID NO: 17651 - DNA, 35 bp, Artificial Sequence
  Synthetic oligonucleotide
ggatccccgataggcactcctaggtccactggtac

SEQ ID NO: 17652 - DNA, 35 bp, Artificial Sequence
  Synthetic oligonucleotide
tacctgaagtaccgcatgcattgagtaagatgcct

SEQ ID NO: 17653 - DNA, 37 bp, Artificial Sequence
  Synthetic oligonucleotide
tactgccagaaacaggcgacaagcgcaaaatgcagga

SEQ ID NO: 17654 - DNA, 38 bp, Artificial Sequence
  Synthetic oligonucleotide
taggttcctgattaggtcggattagtacgcatggttga

SEQ ID NO: 17655 - DNA, 38 bp, Artificial Sequence
  Synthetic oligonucleotide
aaaactagtctgtccaactggttgcgacattcaattga

SEQ ID NO: 17656 - DNA, 36 bp, Artificial Sequence
  Synthetic oligonucleotide
aaactaacacccagcctcgtcacgcgattggaggca

SEQ ID NO: 17657 - DNA, 35 bp, Artificial Sequence
  Synthetic oligonucleotide
aacagtctgctggatgtcacggtcgccattattgg

SEQ ID NO: 17658 - DNA, 35 bp, Artificial Sequence
  Synthetic oligonucleotide
aaccgcgttgttacggggtcaaccttctttgctgt

SEQ ID NO: 17659 - DNA, 36 bp, Artificial Sequence
  Synthetic oligonucleotide
aacgggaaaataacgaggcgtgataaagtaaaggta

SEQ ID NO: 17660 - DNA, 38 bp, Artificial Sequence
  Synthetic oligonucleotide
aagaggcgtaagattcggacttgatttgtcgggactga

SEQ ID NO: 17661 - DNA, 35 bp, Artificial Sequence
  Synthetic oligonucleotide
aagagggtacggtgcttttgacacatgtgatcaac

SEQ ID NO: 17662 - DNA, 38 bp, Artificial Sequence
  Synthetic oligonucleotide
aatcaccgagaactatcggcgcccagggctcctagtga

SEQ ID NO: 17663 - DNA, 36 bp, Artificial Sequence
  Synthetic oligonucleotide
aatggcaccgtaggctcacaaaagttgtgggtggta

SEQ ID NO: 17664 - DNA, 35 bp, Artificial Sequence
  Synthetic oligonucleotide
aattcgtggattccgcgctgtggactgtaaaaatg

SEQ ID NO: 17665 - DNA, 37 bp, Artificial Sequence
  Synthetic oligonucleotide
aattgaaggcccggggaagaggcttatcctcggtgga

SEQ ID NO: 17666 - DNA, 38 bp, Artificial Sequence
  Synthetic oligonucleotide
acaattcttgtagcaaacagcaggcggaacggggttga

SEQ ID NO: 17667 - DNA, 37 bp, Artificial Sequence
  Synthetic oligonucleotide
accaggggcatcccctggagacgagaacggctctgga

SEQ ID NO: 17668 - DNA, 34 bp, Artificial Sequence
  Synthetic oligonucleotide
accatagcgttgaggcaagtccaatagtagacag

SEQ ID NO: 17669 - DNA, 37 bp, Artificial Sequence
  Synthetic oligonucleotide
accgacggagttggtgaagcgtgtgtgactagttgga

SEQ ID NO: 17670 - DNA, 36 bp, Artificial Sequence
  Synthetic oligonucleotide
accgtaactgcggtgcctatgggttttgaaagcaaa

SEQ ID NO: 17671 - DNA, 37 bp, Artificial Sequence
  Synthetic oligonucleotide
accgtatttagtcccagctcaattgctcaggcacgga

SEQ ID NO: 17672 - DNA, 35 bp, Artificial Sequence
  Synthetic oligonucleotide
accgtgaccatcgcgaagggtccaggtagcttgac

SEQ ID NO: 17673 - DNA, 38 bp, Artificial Sequence
  Synthetic oligonucleotide
accttccgtagagtactagtcaggaggacgcgccttga

SEQ ID NO: 17674 - DNA, 35 bp, Artificial Sequence
  Synthetic oligonucleotide
acgaccaaacagcttgccccttggaggccagactg

SEQ ID NO: 17675 - DNA, 36 bp, Artificial Sequence
  Synthetic oligonucleotide
acgcatggtccatggcgctgtattcttaaaagacga

SEQ ID NO: 17676 - DNA, 36 bp, Artificial Sequence
  Synthetic oligonucleotide
acgcccaccgagtcaagttagaggtacgtcagggta

SEQ ID NO: 17677 - DNA, 35 bp, Artificial Sequence
  Synthetic oligonucleotide
actaggctcggtacggtcgaaaggcatcgcaggcc

SEQ ID NO: 17678 - DNA, 38 bp, Artificial Sequence
  Synthetic oligonucleotide
agaccggtcagtaagctcctgagtttttacatgtgtga

SEQ ID NO: 17679 - DNA, 36 bp, Artificial Sequence
  Synthetic oligonucleotide
agactattagctgccgagacgtcaagggctgcttga

SEQ ID NO: 17680 - DNA, 37 bp, Artificial Sequence
  Synthetic oligonucleotide
agccagggtaatcctactgcagatttccaccggtgga

SEQ ID NO: 17681 - DNA, 36 bp, Artificial Sequence
  Synthetic oligonucleotide
agcgaaatgcgtgggtgcacaccgtttcagttagga

SEQ ID NO: 17682 - DNA, 35 bp, Artificial Sequence
  Synthetic oligonucleotide
agcgcgactcttcacgggtgagcgggggttggcga

SEQ ID NO: 17683 - DNA, 37 bp, Artificial Sequence
  Synthetic oligonucleotide
aggagacgagggtggttatgtgttatcgcagacaaga

SEQ ID NO: 17684 - DNA, 35 bp, Artificial Sequence
  Synthetic oligonucleotide
aggtctaaaggcttaacggcgtactacctggctta

SEQ ID NO: 17685 - DNA, 36 bp, Artificial Sequence
  Synthetic oligonucleotide
agtaagttgcagatgggacgaatcgttgcgtacgta

SEQ ID NO: 17686 - DNA, 35 bp, Artificial Sequence
  Synthetic oligonucleotide
agttgaattagatgctcaccgtagaaacaactcgt

SEQ ID NO: 17687 - DNA, 38 bp, Artificial Sequence
  Synthetic oligonucleotide
atagccctcgggtgggcctagtcgagttacttgtttga

SEQ ID NO: 17688 - DNA, 35 bp, Artificial Sequence
  Synthetic oligonucleotide
atgacatacttattcatgaacggtacacggttatg

SEQ ID NO: 17689 - DNA, 35 bp, Artificial Sequence
  Synthetic oligonucleotide
atgatttaaacgtacccgatcgtgagcttgggatg

SEQ ID NO: 17690 - DNA, 38 bp, Artificial Sequence
  Synthetic oligonucleotide
atggctctattcgtggaggtgaagggttgcatcaatga

SEQ ID NO: 17691 - DNA, 34 bp, Artificial Sequence
  Synthetic oligonucleotide
atggtgtgcgaatgtacgtgaattcgagtaagtc

SEQ ID NO: 17692 - DNA, 35 bp, Artificial Sequence
  Synthetic oligonucleotide
atgtccgagttacagcgtaatttttgaaccttatt

SEQ ID NO: 17693 - DNA, 38 bp, Artificial Sequence
  Synthetic oligonucleotide
attcaaagcgcttaatttagcgccgtattcgatcgtga

SEQ ID NO: 17694 - DNA, 36 bp, Artificial Sequence
  Synthetic oligonucleotide
attgtaactgcggacggctcttgagcaaaaggtaga

SEQ ID NO: 17695 - DNA, 36 bp, Artificial Sequence
  Synthetic oligonucleotide
cactgcttttatttccaaaaaatcatggccaggcca

SEQ ID NO: 17696 - DNA, 35 bp, Artificial Sequence
  Synthetic oligonucleotide
cccgtaggagacggtctgggttaatttaggcactt

SEQ ID NO: 17697 - DNA, 35 bp, Artificial Sequence
  Synthetic oligonucleotide
cctgagcatgattggaataatcctcgatctccctg

SEQ ID NO: 17698 - DNA, 35 bp, Artificial Sequence
  Synthetic oligonucleotide
cctgtcccacttcctctttcctggttaccgctaag

SEQ ID NO: 17699 - DNA, 35 bp, Artificial Sequence
  Synthetic oligonucleotide
cgtaagaagatccgggtagtttcgctggtcgcctc

SEQ ID NO: 17700 - DNA, 35 bp, Artificial Sequence
  Synthetic oligonucleotide
ctccttcctcaacaccggatatcaagtgcgctggc

SEQ ID NO: 17701 - DNA, 35 bp, Artificial Sequence
  Synthetic oligonucleotide
cttatggtaacgagtaagggtccgggtcgtatagt

SEQ ID NO: 17702 - DNA, 36 bp, Artificial Sequence
  Synthetic oligonucleotide
cttctgtgacagttcgtattgcagtcaaaaggtata

SEQ ID NO: 17703 - DNA, 35 bp, Artificial Sequence
  Synthetic oligonucleotide
gaaccaaggctgagagactagggagagggtgcggg

SEQ ID NO: 17704 - DNA, 37 bp, Artificial Sequence
  Synthetic oligonucleotide
gaaccggttcagggttgggaggctccgattagataga

SEQ ID NO: 17705 - DNA, 37 bp, Artificial Sequence
  Synthetic oligonucleotide
gacggcatacttgatgtgcgtggtgcatgggatctga

SEQ ID NO: 17706 - DNA, 36 bp, Artificial Sequence
  Synthetic oligonucleotide
gacttaggtcaccgtctcaagtcaagctccactcaa

SEQ ID NO: 17707 - DNA, 35 bp, Artificial Sequence
  Synthetic oligonucleotide
gacttccgcatgccacaagcaggccttaattgaag

SEQ ID NO: 17708 - DNA, 38 bp, Artificial Sequence
  Synthetic oligonucleotide
gacttctcagataaggcatatagacgggacgggagtga

SEQ ID NO: 17709 - DNA, 38 bp, Artificial Sequence
  Synthetic oligonucleotide
gagcttcgtggggtaagcgccatgtactgtcctaatga

SEQ ID NO: 17710 - DNA, 38 bp, Artificial Sequence
  Synthetic oligonucleotide
gagtggggtttgattgtctggtaattgaagccatgtga

SEQ ID NO: 17711 - DNA, 35 bp, Artificial Sequence
  Synthetic oligonucleotide
gatagaacagcattctgcagcatgctcaaagctgt

SEQ ID NO: 17712 - DNA, 38 bp, Artificial Sequence
  Synthetic oligonucleotide
gatcggaacagggtatcagataatatacacgtacctga

SEQ ID NO: 17713 - DNA, 38 bp, Artificial Sequence
  Synthetic oligonucleotide
gcatacagcaccacagtccgaattaccacaggggttga

SEQ ID NO: 17714 - DNA, 36 bp, Artificial Sequence
  Synthetic oligonucleotide
gccccaacgattcaaggatcgaacgccacggatcaa

SEQ ID NO: 17715 - DNA, 38 bp, Artificial Sequence
  Synthetic oligonucleotide
gccgaatcatggcggatatgaagatagatagggtttga

SEQ ID NO: 17716 - DNA, 37 bp, Artificial Sequence
  Synthetic oligonucleotide
gccgcgcacggagaaattgcaaccagagagtggacga

SEQ ID NO: 17717 - DNA, 35 bp, Artificial Sequence
  Synthetic oligonucleotide
gcgtagagtgagttgctgtacgcactctgtggtcc

SEQ ID NO: 17718 - DNA, 35 bp, Artificial Sequence
  Synthetic oligonucleotide
gctagagtggtaaggggatggttgtgaaaagcctc

SEQ ID NO: 17719 - DNA, 36 bp, Artificial Sequence
  Synthetic oligonucleotide
gctcaatgtcatattctatggattgggacgcaggta

SEQ ID NO: 17720 - DNA, 37 bp, Artificial Sequence
  Synthetic oligonucleotide
gctcggtgactgtgttaaacaacacgagttttccgga

SEQ ID NO: 17721 - DNA, 36 bp, Artificial Sequence
  Synthetic oligonucleotide
ggacaagaacgcactagatgtggcaacgacatggca

SEQ ID NO: 17722 - DNA, 36 bp, Artificial Sequence
  Synthetic oligonucleotide
ggacacgcttgctcgaataacagttgcccgctgcaa

SEQ ID NO: 17723 - DNA, 38 bp, Artificial Sequence
  Synthetic oligonucleotide
ggaggtgcaaacagcccatggtcgtactgcagtgatga

SEQ ID NO: 17724 - DNA, 38 bp, Artificial Sequence
  Synthetic oligonucleotide
ggccgcttaaggtggaagattgttaggaccggtactga

SEQ ID NO: 17725 - DNA, 37 bp, Artificial Sequence
  Synthetic oligonucleotide
ggctaagttgtcggcgaaaatcccgttataactgcga

SEQ ID NO: 17726 - DNA, 37 bp, Artificial Sequence
  Synthetic oligonucleotide
gggaacaattggttacttattgcacatacactgacga

SEQ ID NO: 17727 - DNA, 37 bp, Artificial Sequence
  Synthetic oligonucleotide
ggggatagactacacgacagaaatttgattggaaaga

SEQ ID NO: 17728 - DNA, 35 bp, Artificial Sequence
  Synthetic oligonucleotide
ggggtgagaaagcggcataatcagcttgtcaacgc

SEQ ID NO: 17729 - DNA, 37 bp, Artificial Sequence
  Synthetic oligonucleotide
ggggttagatactgatattgcttgtagcaagctagga

SEQ ID NO: 17730 - DNA, 35 bp, Artificial Sequence
  Synthetic oligonucleotide
ggtaactgtaggacaggcacccatcgtaaatttaa

SEQ ID NO: 17731 - DNA, 35 bp, Artificial Sequence
  Synthetic oligonucleotide
ggtcgtattcggtaaagcgttatattgtagactgc

SEQ ID NO: 17732 - DNA, 38 bp, Artificial Sequence
  Synthetic oligonucleotide
ggtctaccccagaattcttgatggattgacagtactga

SEQ ID NO: 17733 - DNA, 35 bp, Artificial Sequence
  Synthetic oligonucleotide
ggtgacacccagtcatgtctccggggaccatttat

SEQ ID NO: 17734 - DNA, 36 bp, Artificial Sequence
  Synthetic oligonucleotide
ggtgcacatactgaggcgtgaggtaggaataaagta

SEQ ID NO: 17735 - DNA, 35 bp, Artificial Sequence
  Synthetic oligonucleotide
ggtgcgggtcgcactagtaaggtaggtgagtagtg

SEQ ID NO: 17736 - DNA, 36 bp, Artificial Sequence
  Synthetic oligonucleotide
ggtgtacgggtcctgcgtgtagtaagcccagaccaa

SEQ ID NO: 17737 - DNA, 33 bp, Artificial Sequence
  Synthetic oligonucleotide
gtaacgttaaagccgcatgttaataggtgctag

SEQ ID NO: 17738 - DNA, 38 bp, Artificial Sequence
  Synthetic oligonucleotide
gtagcaattgtgaggacccctacgcagttccctgatga

SEQ ID NO: 17739 - DNA, 35 bp, Artificial Sequence
  Synthetic oligonucleotide
gtagccccccgcgaggccgacaagcaaggacggtt

SEQ ID NO: 17740 - DNA, 35 bp, Artificial Sequence
  Synthetic oligonucleotide
gtagtaccgcgccgtatacggaatggaagggtggt

SEQ ID NO: 17741 - DNA, 38 bp, Artificial Sequence
  Synthetic oligonucleotide
gtattctagctgtgcaatcacttgttgacaggtactga

SEQ ID NO: 17742 - DNA, 36 bp, Artificial Sequence
  Synthetic oligonucleotide
gtcgaggcgcatcccctttatgttttgctcacagaa

SEQ ID NO: 17743 - DNA, 35 bp, Artificial Sequence
  Synthetic oligonucleotide
gtgccggcggattatttctattgcttgtaggagat

SEQ ID NO: 17744 - DNA, 38 bp, Artificial Sequence
  Synthetic oligonucleotide
gtgcttctgtgttcattgtggcctcgcaggtgtagtga

SEQ ID NO: 17745 - DNA, 35 bp, Artificial Sequence
  Synthetic oligonucleotide
gtgggattgccggagaaaagcaacagagtccggtg

SEQ ID NO: 17746 - DNA, 37 bp, Artificial Sequence
  Synthetic oligonucleotide
gttaggacgcgcaggtatttgagctttcatttagcga

SEQ ID NO: 17747 - DNA, 36 bp, Artificial Sequence
  Synthetic oligonucleotide
gttcctgaatggcaattaatgcgacttttgttcgca

SEQ ID NO: 17748 - DNA, 36 bp, Artificial Sequence
  Synthetic oligonucleotide
taaacacaaccctgcgcgcgctcggtatagtgagta

SEQ ID NO: 17749 - DNA, 37 bp, Artificial Sequence
  Synthetic oligonucleotide
taaccatgtggtcgggaaccgctagggatgtgctcga

SEQ ID NO: 17750 - DNA, 35 bp, Artificial Sequence
  Synthetic oligonucleotide
taacgatccgcacctgttatatggcgaatgaattg

SEQ ID NO: 17751 - DNA, 38 bp, Artificial Sequence
  Synthetic oligonucleotide
taaggtggttagcacttggctgccgacgtagaggatga

SEQ ID NO: 17752 - DNA, 35 bp, Artificial Sequence
  Synthetic oligonucleotide
tacagctatggcgctctgggtgtcccccggctagg

SEQ ID NO: 17753 - DNA, 38 bp, Artificial Sequence
  Synthetic oligonucleotide
taccacttaatgtccgggacgttcaatcggtaacgtga

SEQ ID NO: 17754 - DNA, 35 bp, Artificial Sequence
  Synthetic oligonucleotide
tagactgatttgcgtagttgacgacgaagctatgg

SEQ ID NO: 17755 - DNA, 35 bp, Artificial Sequence
  Synthetic oligonucleotide
tagcaggccaaagctagcgggatcagtacttatcc

SEQ ID NO: 17756 - DNA, 35 bp, Artificial Sequence
  Synthetic oligonucleotide
tagtctcgaccctgttaagtcaacgtacacctatc

SEQ ID NO: 17757 - DNA, 37 bp, Artificial Sequence
  Synthetic oligonucleotide
tatgggcacttaacgatggagtgtgtcccagaggtga

SEQ ID NO: 17758 - DNA, 37 bp, Artificial Sequence
  Synthetic oligonucleotide
tatttccgcccacggcggtagggatagtgagttccga

SEQ ID NO: 17759 - DNA, 35 bp, Artificial Sequence
  Synthetic oligonucleotide
tcatgcccagatcctcacggcgtgagaccaagtgt

SEQ ID NO: 17760 - DNA, 36 bp, Artificial Sequence
  Synthetic oligonucleotide
tccaaatgctaacggaactggggtaggcgctggaaa

SEQ ID NO: 17761 - DNA, 37 bp, Artificial Sequence
  Synthetic oligonucleotide
tcccggagcgacttgcgtaaagacgagctggaacgga

SEQ ID NO: 17762 - DNA, 36 bp, Artificial Sequence
  Synthetic oligonucleotide
tccgtggtattgtgagctatagaagagattgttaca

SEQ ID NO: 17763 - DNA, 38 bp, Artificial Sequence
  Synthetic oligonucleotide
tctgcgtacccgattctatcggctccgacttgtcatga

SEQ ID NO: 17764 - DNA, 37 bp, Artificial Sequence
  Synthetic oligonucleotide
tgaatactgctgagcaataccggttccgggttgaaga

SEQ ID NO: 17765 - DNA, 38 bp, Artificial Sequence
  Synthetic oligonucleotide
tgccctgtgtgtaccactttagcctatagcaaatttga

SEQ ID NO: 17766 - DNA, 35 bp, Artificial Sequence
  Synthetic oligonucleotide
tgtaacgtctgtggacatttgtgtctcgtgaacca

SEQ ID NO: 17767 - DNA, 38 bp, Artificial Sequence
  Synthetic oligonucleotide
ttacgagcagggaggtggccagcctctttctgcattga

SEQ ID NO: 17768 - DNA, 36 bp, Artificial Sequence
  Synthetic oligonucleotide
ttcacaagtttgccactccatagactgtgaacctta

SEQ ID NO: 17769 - DNA, 38 bp, Artificial Sequence
  Synthetic oligonucleotide
ttgactgggtgctatttgggttatggttgtaacaatga

SEQ ID NO: 17770 - DNA, 35 bp, Artificial Sequence
  Synthetic oligonucleotide
ttgcaacagtcgggtcaccagagctctagatgaat

SEQ ID NO: 17771 - DNA, 35 bp, Artificial Sequence
  Synthetic oligonucleotide
ttgcagttgcatattagcgggctgaaccatgacag

SEQ ID NO: 17772 - DNA, 38 bp, Artificial Sequence
  Synthetic oligonucleotide
ttgctgggtcggtctattgtatatagtcctccaaatga

SEQ ID NO: 17773 - DNA, 35 bp, Artificial Sequence
  Synthetic oligonucleotide
tttgggcgttgtatatcgtggcttgttgtgagaat

SEQ ID NO: 17774 - DNA, 35 bp, Artificial Sequence
  Synthetic oligonucleotide
aacacgctactgggtcagagggacttgataattaa

SEQ ID NO: 17775 - DNA, 36 bp, Artificial Sequence
  Synthetic oligonucleotide
ggattacacgcctgctttgaattgtagtcatatgca

SEQ ID NO: 17776 - DNA, 35 bp, Artificial Sequence
  Synthetic oligonucleotide
gctgcgaagtcaagggtaaagtgtagattgaaaag

SEQ ID NO: 17777 - DNA, 36 bp, Artificial Sequence
  Synthetic oligonucleotide
ggattcgccacacaatactgcacggggccacccgga

SEQ ID NO: 17778 - DNA, 37 bp, Artificial Sequence
  Synthetic oligonucleotide
ttcgacgttgacatagtgttccccgaacatgaggaga

SEQ ID NO: 17779 - DNA, 35 bp, Artificial Sequence
  Synthetic oligonucleotide
acttggcggagacgacacgggtacgctccgtcacc

SEQ ID NO: 17780 - DNA, 37 bp, Artificial Sequence
  Synthetic oligonucleotide
ttacgagtaaacacatatgggtgtcgcgtttcagcga

SEQ ID NO: 17781 - DNA, 36 bp, Artificial Sequence
  Synthetic oligonucleotide
taacgcactgcggccgaagatgaggcttccgttcga

SEQ ID NO: 17782 - DNA, 37 bp, Artificial Sequence
  Synthetic oligonucleotide
taagcccagagtctatgaccagggccgctggccttga

SEQ ID NO: 17783 - DNA, 37 bp, Artificial Sequence
  Synthetic oligonucleotide
tcccagggttactactcaaacgaacagcagtcctgga

SEQ ID NO: 17784 - DNA, 36 bp, Artificial Sequence
  Synthetic oligonucleotide
aacgcccaagttcgttcgcacatggagtaaaaggta

SEQ ID NO: 17785 - DNA, 38 bp, Artificial Sequence
  Synthetic oligonucleotide
gaacgcgggatatcgattgtagtatgcattccatttga

SEQ ID NO: 17786 - DNA, 36 bp, Artificial Sequence
  Synthetic oligonucleotide
gaactagttgcctcgtgccacgaatgttatgtccga

SEQ ID NO: 17787 - DNA, 38 bp, Artificial Sequence
  Synthetic oligonucleotide
gaagtaataggcactcaggtagatacaagcggctttga

SEQ ID NO: 17788 - DNA, 35 bp, Artificial Sequence
  Synthetic oligonucleotide
gagcaaactgaaagggcccggactgtgctcctggt

SEQ ID NO: 17789 - DNA, 35 bp, Artificial Sequence
  Synthetic oligonucleotide
ggacaggagatggatgacaagctccttcccttcga

SEQ ID NO: 17790 - DNA, 36 bp, Artificial Sequence
  Synthetic oligonucleotide
ggctgtaggtacaaattgtttaggagttgtgcttta

SEQ ID NO: 17791 - DNA, 37 bp, Artificial Sequence
  Synthetic oligonucleotide
gggtgatccgccgctgccatgtacgaagttgccggga

SEQ ID NO: 17792 - DNA, 35 bp, Artificial Sequence
  Synthetic oligonucleotide
gttcgtggcctaccccccttattccgatccatcac

SEQ ID NO: 17793 - DNA, 36 bp, Artificial Sequence
  Synthetic oligonucleotide
gttgactcaacgccatgttggctggactattgcgcc

SEQ ID NO: 17794 - DNA, 38 bp, Artificial Sequence
  Synthetic oligonucleotide
gttgagacggaacatattagtattaatccgataactga

SEQ ID NO: 17795 - DNA, 38 bp, Artificial Sequence
  Synthetic oligonucleotide
tagtggtgacgggtggggtctacggacgtcccaattga

SEQ ID NO: 17796 - DNA, 36 bp, Artificial Sequence
  Synthetic oligonucleotide
tcgatgcattgcaaatatacctgctcgaaggaagta

SEQ ID NO: 17797 - DNA, 35 bp, Artificial Sequence
  Synthetic oligonucleotide
tttagctaatggcgttaatttggtttatacgtgcg

SEQ ID NO: 17798 - DNA, 37 bp, Artificial Sequence
  Synthetic oligonucleotide
tactcgttacaggccagacgagtgtttggattgctga

SEQ ID NO: 17799 - DNA, 38 bp, Artificial Sequence
  Synthetic oligonucleotide
gagtggaactggctaatctatgtgggtaggtcggttga

SEQ ID NO: 17800 - DNA, 38 bp, Artificial Sequence
  Synthetic oligonucleotide
actcacgccgatagaacgcgcttgcggggagagtttga

SEQ ID NO: 17801 - DNA, 36 bp, Artificial Sequence
  Synthetic oligonucleotide
aacgagaagattactacgcaacggtcgctcgcggaa

SEQ ID NO: 17802 - DNA, 37 bp, Artificial Sequence
  Synthetic oligonucleotide
aagagtagcgggtctggataaaaacgggcgctaagga

SEQ ID NO: 17803 - DNA, 35 bp, Artificial Sequence
  Synthetic oligonucleotide
aatgctacagagcaaagtagccttcttggggcctt

SEQ ID NO: 17804 - DNA, 35 bp, Artificial Sequence
  Synthetic oligonucleotide
accagtcggatggttcaattgaacccgtacgttgt

SEQ ID NO: 17805 - DNA, 38 bp, Artificial Sequence
  Synthetic oligonucleotide
accgatgctccggagccgtgggaacatgtgccccctga

SEQ ID NO: 17806 - DNA, 36 bp, Artificial Sequence
  Synthetic oligonucleotide
accgccacgtgagcgagtgccgtgcacgtaagccga

SEQ ID NO: 17807 - DNA, 38 bp, Artificial Sequence
  Synthetic oligonucleotide
acctcgaagtaggtccaagctacgtggggacgtggtga

SEQ ID NO: 17808 - DNA, 36 bp, Artificial Sequence
  Synthetic oligonucleotide
acctctgcggtatacacggccggtccatctttgtca

SEQ ID NO: 17809 - DNA, 35 bp, Artificial Sequence
  Synthetic oligonucleotide
acgatgggaaaatacgtacttggtggatagttatt

SEQ ID NO: 17810 - DNA, 35 bp, Artificial Sequence
  Synthetic oligonucleotide
acgcactttcatatcttgacggatgcataaggcga

SEQ ID NO: 17811 - DNA, 36 bp, Artificial Sequence
  Synthetic oligonucleotide
acgcccctaagaagtcaagaatctggggctaagcca

SEQ ID NO: 17812 - DNA, 36 bp, Artificial Sequence
  Synthetic oligonucleotide
acgcctcgcatcatgttggaatgtttgttcctcgaa

SEQ ID NO: 17813 - DNA, 36 bp, Artificial Sequence
  Synthetic oligonucleotide
actaaccagctttcgtgtagtacggacttggagata

SEQ ID NO: 17814 - DNA, 37 bp, Artificial Sequence
  Synthetic oligonucleotide
actcctggatcacttagaatccgcggacttacccgga

SEQ ID NO: 17815 - DNA, 36 bp, Artificial Sequence
  Synthetic oligonucleotide
actgggacatcgcttgagttgatgttgagagggcca

SEQ ID NO: 17816 - DNA, 36 bp, Artificial Sequence
  Synthetic oligonucleotide
acttgagtacccaggtatcgcgtttacaggtgccta

SEQ ID NO: 17817 - DNA, 36 bp, Artificial Sequence
  Synthetic oligonucleotide
agaaccgacgggactttatatttcgatgtaaaggaa

SEQ ID NO: 17818 - DNA, 38 bp, Artificial Sequence
  Synthetic oligonucleotide
agatcgtagtgaaggatattatgaggtctccgatttga

SEQ ID NO: 17819 - DNA, 38 bp, Artificial Sequence
  Synthetic oligonucleotide
agatttggagatcatctgtaccaggcgacagcttatga

SEQ ID NO: 17820 - DNA, 35 bp, Artificial Sequence
  Synthetic oligonucleotide
aggctccctctgaaatacgccagcataatgttagt

SEQ ID NO: 17821 - DNA, 37 bp, Artificial Sequence
  Synthetic oligonucleotide
agttaatatcgtcgcataaagcgcctgacttgtggga

SEQ ID NO: 17822 - DNA, 36 bp, Artificial Sequence
  Synthetic oligonucleotide
atcaatcgtgtcctttgttgtccactgcagtcacca

SEQ ID NO: 17823 - DNA, 38 bp, Artificial Sequence
  Synthetic oligonucleotide
atcacactctttgcgaaatggagtgtaattttggctga

SEQ ID NO: 17824 - DNA, 35 bp, Artificial Sequence
  Synthetic oligonucleotide
atgccgaaaggtcgcgattcaagggttacaggcta

SEQ ID NO: 17825 - DNA, 36 bp, Artificial Sequence
  Synthetic oligonucleotide
atggtaccgtattgatctaatgaaggttgctcgcga

SEQ ID NO: 17826 - DNA, 35 bp, Artificial Sequence
  Synthetic oligonucleotide
attctacacgtacgcccacacagggacggcaaccc

SEQ ID NO: 17827 - DNA, 36 bp, Artificial Sequence
  Synthetic oligonucleotide
caatggacggccgatatgatcgggactctagttaga

SEQ ID NO: 17828 - DNA, 33 bp, Artificial Sequence
  Synthetic oligonucleotide
ccagtgatgggatcgtacccaagcttatgttca

SEQ ID NO: 17829 - DNA, 35 bp, Artificial Sequence
  Synthetic oligonucleotide
cctgcggtggaggactatgaaccaaattaaccgtc

SEQ ID NO: 17830 - DNA, 35 bp, Artificial Sequence
  Synthetic oligonucleotide
cgtgtccactgttcaatctgaaatcggatacttcg

SEQ ID NO: 17831 - DNA, 35 bp, Artificial Sequence
  Synthetic oligonucleotide
ctactcccattgtccgtgaaagtagatggattagg

SEQ ID NO: 17832 - DNA, 36 bp, Artificial Sequence
  Synthetic oligonucleotide
ctaggcatgcttggcggaagccccacacttgcccta

SEQ ID NO: 17833 - DNA, 38 bp, Artificial Sequence
  Synthetic oligonucleotide
gaaacgcctacaagggccaagctaagaacaggcgttga

SEQ ID NO: 17834 - DNA, 35 bp, Artificial Sequence
  Synthetic oligonucleotide
gaagtttggcgcactacagcagttcatcgtgatgt

SEQ ID NO: 17835 - DNA, 36 bp, Artificial Sequence
  Synthetic oligonucleotide
gaatattcacggtctgaaacgggatgtcgatcgaga

SEQ ID NO: 17836 - DNA, 36 bp, Artificial Sequence
  Synthetic oligonucleotide
gacgtcactgtaacaactgttgacgtggcaagccaa

SEQ ID NO: 17837 - DNA, 37 bp, Artificial Sequence
  Synthetic oligonucleotide
gagggcaaagcccggctgccatccgatgggctcaaga

SEQ ID NO: 17838 - DNA, 35 bp, Artificial Sequence
  Synthetic oligonucleotide
gcaagacacagggaaaagtcagttagaacggcgcc

SEQ ID NO: 17839 - DNA, 37 bp, Artificial Sequence
  Synthetic oligonucleotide
gcaatcggaactgcggtataggtcaaaataagtacga

SEQ ID NO: 17840 - DNA, 38 bp, Artificial Sequence
  Synthetic oligonucleotide
gccgactcacgtgatgtgagtgtgataaggcgtaatga

SEQ ID NO: 17841 - DNA, 36 bp, Artificial Sequence
  Synthetic oligonucleotide
gcgctcggtggacaggcgaccaaaacgtaccaaaga

SEQ ID NO: 17842 - DNA, 36 bp, Artificial Sequence
  Synthetic oligonucleotide
gctgtaacacgaggtattccaaagagtagagtcgaa

SEQ ID NO: 17843 - DNA, 37 bp, Artificial Sequence
  Synthetic oligonucleotide
ggaagggtgcagacaacaatcaatatgttgtttaaga

SEQ ID NO: 17844 - DNA, 38 bp, Artificial Sequence
  Synthetic oligonucleotide
ggggctgacgaagactcgagacctggatgctctggtga

SEQ ID NO: 17845 - DNA, 36 bp, Artificial Sequence
  Synthetic oligonucleotide
ggtacagaagtcttcaatgcgatgtttctagtacca

SEQ ID NO: 17846 - DNA, 36 bp, Artificial Sequence
  Synthetic oligonucleotide
ggtgcgcaagaagaaaacggacaagtggctcaccga

SEQ ID NO: 17847 - DNA, 36 bp, Artificial Sequence
  Synthetic oligonucleotide
gtaaggagacggggcttgcaccctaaccaacctgta

SEQ ID NO: 17848 - DNA, 35 bp, Artificial Sequence
  Synthetic oligonucleotide
gtaatagctggccgatacacgtagcagtctattgt

SEQ ID NO: 17849 - DNA, 38 bp, Artificial Sequence
  Synthetic oligonucleotide
gtacttggcataatgagccaatacgtgtctgcccatga

SEQ ID NO: 17850 - DNA, 37 bp, Artificial Sequence
  Synthetic oligonucleotide
gtagcactatcgtagccctgtattttgttactggtga

SEQ ID NO: 17851 - DNA, 35 bp, Artificial Sequence
  Synthetic oligonucleotide
gtcacttagctgcatgggtcacgacgccccaagga

SEQ ID NO: 17852 - DNA, 37 bp, Artificial Sequence
  Synthetic oligonucleotide
gtctagagatcaggaggaaacatatggggtgctacga

SEQ ID NO: 17853 - DNA, 37 bp, Artificial Sequence
  Synthetic oligonucleotide
gtgcacgacctgcaaaaagtactgatccggagcttga

SEQ ID NO: 17854 - DNA, 35 bp, Artificial Sequence
  Synthetic oligonucleotide
gttccatgttgcaagataaattgattcgggacatg

SEQ ID NO: 17855 - DNA, 37 bp, Artificial Sequence
  Synthetic oligonucleotide
gtttcacagccaagctaacactttatatagcgaagga

SEQ ID NO: 17856 - DNA, 37 bp, Artificial Sequence
  Synthetic oligonucleotide
taatgctcaagcatgacatctgcatctacggacgaga

SEQ ID NO: 17857 - DNA, 36 bp, Artificial Sequence
  Synthetic oligonucleotide
tatgtatagggcatggagcacagtgctgtttgtgaa

SEQ ID NO: 17858 - DNA, 38 bp, Artificial Sequence
  Synthetic oligonucleotide
tcccggtatagagtatgcgaaatcggggttcgggatga

SEQ ID NO: 17859 - DNA, 35 bp, Artificial Sequence
  Synthetic oligonucleotide
tcctgggtcgaccaagaaacgttgtgtagggaaga

SEQ ID NO: 17860 - DNA, 35 bp, Artificial Sequence
  Synthetic oligonucleotide
tcgaggtcggtaccataccttctgggtgatacgtg

SEQ ID NO: 17861 - DNA, 35 bp, Artificial Sequence
  Synthetic oligonucleotide
tcgcgtgatgccatcaggtgaagtcccagttgcat

SEQ ID NO: 17862 - DNA, 37 bp, Artificial Sequence
  Synthetic oligonucleotide
tctcttcgtagatgaggaggtcttactgcaggttaga

SEQ ID NO: 17863 - DNA, 37 bp, Artificial Sequence
  Synthetic oligonucleotide
tgccacaaagccatggtattgtcagacgttttcagga

SEQ ID NO: 17864 - DNA, 36 bp, Artificial Sequence
  Synthetic oligonucleotide
tgcgtacaggattgcagtcctatgcattgcgttaga

SEQ ID NO: 17865 - DNA, 35 bp, Artificial Sequence
  Synthetic oligonucleotide
tgggccctccgatgttgtctgctcaatggtacttc

SEQ ID NO: 17866 - DNA, 38 bp, Artificial Sequence
  Synthetic oligonucleotide
tggtctcttccgagcaccgtacgaagatatgcaggtga

SEQ ID NO: 17867 - DNA, 38 bp, Artificial Sequence
  Synthetic oligonucleotide
tggtgcgataccgcgtcatctgaaggctcatacgttga

SEQ ID NO: 17868 - DNA, 35 bp, Artificial Sequence
  Synthetic oligonucleotide
tgtatccagccgcgcgggggaggctggtttacgcg

SEQ ID NO: 17869 - DNA, 37 bp, Artificial Sequence
  Synthetic oligonucleotide
ttacgcggtaatggtcgagtaagacgtaattccgtga

SEQ ID NO: 17870 - DNA, 38 bp, Artificial Sequence
  Synthetic oligonucleotide
ttaggacacggatttggcatgacgggttgtcgccctga

SEQ ID NO: 17871 - DNA, 38 bp, Artificial Sequence
  Synthetic oligonucleotide
ttgtgtgtgtaacaatcgaacgaatatggcaatcatga

SEQ ID NO: 17872 - DNA, 35 bp, Artificial Sequence
  Synthetic oligonucleotide
tttcattggcgacagagaagttaatgtttctgggt

SEQ ID NO: 17873 - DNA, 35 bp, Artificial Sequence
  Synthetic oligonucleotide
acgtgactcatgggtgggacgatcttaaggtctta

SEQ ID NO: 17874 - DNA, 35 bp, Artificial Sequence
  Synthetic oligonucleotide
cctaaccgaaaatggaacttggaatgcggttacga

SEQ ID NO: 17875 - DNA, 35 bp, Artificial Sequence
  Synthetic oligonucleotide
ggggtagaccagccgcgattctattcaacttctcg

SEQ ID NO: 17876 - DNA, 35 bp, Artificial Sequence
  Synthetic oligonucleotide
gtcaccaggggttccgctcacatcttttgttcgag

SEQ ID NO: 17877 - DNA, 36 bp, Artificial Sequence
  Synthetic oligonucleotide
tgaatcgcagtcaggttgcttatgacccatgggtca

SEQ ID NO: 17878 - DNA, 38 bp, Artificial Sequence
  Synthetic oligonucleotide
actggactaggaaggggaagcaggttgttccccactga

SEQ ID NO: 17879 - DNA, 36 bp, Artificial Sequence
  Synthetic oligonucleotide
ctcgacgcatctgagtctgtttggcttaaaactgga

SEQ ID NO: 17880 - DNA, 36 bp, Artificial Sequence
  Synthetic oligonucleotide
gctagacatagcccgtgtcgcgcataacgcgcgaga

SEQ ID NO: 17881 - DNA, 35 bp, Artificial Sequence
  Synthetic oligonucleotide
tacgagtgggacgctaccaggtctgtgctgtcagt

SEQ ID NO: 17882 - DNA, 37 bp, Artificial Sequence
  Synthetic oligonucleotide
ttgtcatgtatgattgacagcatttttccttctatga

SEQ ID NO: 17883 - DNA, 35 bp, Artificial Sequence
  Synthetic oligonucleotide
acaaggctcagaattgcggagatagcgaaaatgtg

SEQ ID NO: 17884 - DNA, 36 bp, Artificial Sequence
  Synthetic oligonucleotide
acctgtgaccagttacccatcacggcgaatctcgta

SEQ ID NO: 17885 - DNA, 35 bp, Artificial Sequence
  Synthetic oligonucleotide
cgaccgggattcggagcgactgactgcttggtcga

SEQ ID NO: 17886 - DNA, 37 bp, Artificial Sequence
  Synthetic oligonucleotide
gctcaatgagtgaggatcgccccacaattggttagta

SEQ ID NO: 17887 - DNA, 37 bp, Artificial Sequence
  Synthetic oligonucleotide
gctgacgggctgatataccgtagatgacttgagcgga

SEQ ID NO: 17888 - DNA, 36 bp, Artificial Sequence
  Synthetic oligonucleotide
gtgcttatgggatgggacaatatggttaggttccta

SEQ ID NO: 17889 - DNA, 35 bp, Artificial Sequence
  Synthetic oligonucleotide
gtgtaatggcgattaacggcatgttggttagtgct

SEQ ID NO: 17890 - DNA, 37 bp, Artificial Sequence
  Synthetic oligonucleotide
gttccctgtataggcgcaatgtgggcggtgtgtggga

SEQ ID NO: 17891 - DNA, 38 bp, Artificial Sequence
  Synthetic oligonucleotide
tactgcacgtgtgggaatacctatttaaatcttgctga

SEQ ID NO: 17892 - DNA, 37 bp, Artificial Sequence
  Synthetic oligonucleotide
catgactcggtaaggagaaaaagtgatagcgcccaga

SEQ ID NO: 17893 - DNA, 37 bp, Artificial Sequence
  Synthetic oligonucleotide
ttacggtgcgggttatggtatgaccgacccctgctga

SEQ ID NO: 17894 - DNA, 37 bp, Artificial Sequence
  Synthetic oligonucleotide
actcaagtctagagtggaattagggagttacgcagga

SEQ ID NO: 17895 - DNA, 38 bp, Artificial Sequence
  Synthetic oligonucleotide
tgtctcagaagcattgtacaagagtcagacctgtctga

SEQ ID NO: 17896 - DNA, 36 bp, Artificial Sequence
  Synthetic oligonucleotide
aacgcactgtgcctgtaattcttacgagatggatta

SEQ ID NO: 17897 - DNA, 38 bp, Artificial Sequence
  Synthetic oligonucleotide
aacggaaccggaggagccgtggtaaaaaacgttgatga

SEQ ID NO: 17898 - DNA, 36 bp, Artificial Sequence
  Synthetic oligonucleotide
accgtacccggttctttcaatatacggagatataca

SEQ ID NO: 17899 - DNA, 36 bp, Artificial Sequence
  Synthetic oligonucleotide
accgtcggatacgtttaacccggcgtttcccaaata

SEQ ID NO: 17900 - DNA, 35 bp, Artificial Sequence
  Synthetic oligonucleotide
acctcgaacgataccgcggctatgagcctctgtgg

SEQ ID NO: 17901 - DNA, 35 bp, Artificial Sequence
  Synthetic oligonucleotide
agacaacactatacatgccggggccttgaccaggg

SEQ ID NO: 17902 - DNA, 37 bp, Artificial Sequence
  Synthetic oligonucleotide
agtctctgcaatggcttacccagttaccgcgtaggga

SEQ ID NO: 17903 - DNA, 36 bp, Artificial Sequence
  Synthetic oligonucleotide
atcagccctggggatgttatatacttaacggagaca

SEQ ID NO: 17904 - DNA, 35 bp, Artificial Sequence
  Synthetic oligonucleotide
atgcaagtggaaggtgtaaaggtttggaagtctgg

SEQ ID NO: 17905 - DNA, 38 bp, Artificial Sequence
  Synthetic oligonucleotide
attcgtaagtcaccgcagtcacatcttgtacttgatga

SEQ ID NO: 17906 - DNA, 36 bp, Artificial Sequence
  Synthetic oligonucleotide
ccaggaccaggagttttggaatacgattaggtctca

SEQ ID NO: 17907 - DNA, 36 bp, Artificial Sequence
  Synthetic oligonucleotide
ctgctacgcttgaaactgaaatccgtggggaacata

SEQ ID NO: 17908 - DNA, 37 bp, Artificial Sequence
  Synthetic oligonucleotide
gaaaggaaccgtgtctgactgcggtggaccgatctga

SEQ ID NO: 17909 - DNA, 35 bp, Artificial Sequence
  Synthetic oligonucleotide
gaagtcagctaggaccacaccctgacctaaaactg

SEQ ID NO: 17910 - DNA, 36 bp, Artificial Sequence
  Synthetic oligonucleotide
gagacgggaggtagctagcgctcttgcggattggaa

SEQ ID NO: 17911 - DNA, 36 bp, Artificial Sequence
  Synthetic oligonucleotide
gagcatgaatgtatccgcttttatgtcgcttaccaa

SEQ ID NO: 17912 - DNA, 38 bp, Artificial Sequence
  Synthetic oligonucleotide
gagccaacagccaaaagtccttttggtgcaggaccgga

SEQ ID NO: 17913 - DNA, 38 bp, Artificial Sequence
  Synthetic oligonucleotide
gagggattccacgaagtgtaacccggtagaccgactga

SEQ ID NO: 17914 - DNA, 35 bp, Artificial Sequence
  Synthetic oligonucleotide
gagtcagtaaaacattacgaccacaggaaccggtt

SEQ ID NO: 17915 - DNA, 35 bp, Artificial Sequence
  Synthetic oligonucleotide
gagtcattgacacgattttggtgtaccaggttacg

SEQ ID NO: 17916 - DNA, 36 bp, Artificial Sequence
  Synthetic oligonucleotide
gagtgtctgtgtaacgcagttacccagaagggctaa

SEQ ID NO: 17917 - DNA, 36 bp, Artificial Sequence
  Synthetic oligonucleotide
gatttgatcagccctcctacataatcgcacgcgcta

SEQ ID NO: 17918 - DNA, 35 bp, Artificial Sequence
  Synthetic oligonucleotide
gccctacagtcagtgcttattgtcttatgtcagca

SEQ ID NO: 17919 - DNA, 35 bp, Artificial Sequence
  Synthetic oligonucleotide
gccctttacaacgttctacagtgatatcgacgtac

SEQ ID NO: 17920 - DNA, 35 bp, Artificial Sequence
  Synthetic oligonucleotide
gcgggtataggcaaaactaataaaggagatgggtc

SEQ ID NO: 17921 - DNA, 36 bp, Artificial Sequence
  Synthetic oligonucleotide
gggtacacacctcctaagagcggtctctttctcgga

SEQ ID NO: 17922 - DNA, 38 bp, Artificial Sequence
  Synthetic oligonucleotide
ggttaattgtttgagaatgctatgagcgcagtctctga

SEQ ID NO: 17923 - DNA, 38 bp, Artificial Sequence
  Synthetic oligonucleotide
ggttacggcctgtctatggtagccctccacgctcctga

SEQ ID NO: 17924 - DNA, 35 bp, Artificial Sequence
  Synthetic oligonucleotide
taataaccgggttatatagtatcttttgccatagt

SEQ ID NO: 17925 - DNA, 36 bp, Artificial Sequence
  Synthetic oligonucleotide
tacaggctggcgtatgttgaatagccagggctttta

SEQ ID NO: 17926 - DNA, 35 bp, Artificial Sequence
  Synthetic oligonucleotide
tacccccgcggagccggcggagttcttaccttcat

SEQ ID NO: 17927 - DNA, 36 bp, Artificial Sequence
  Synthetic oligonucleotide
tcgttcgaactcagtcacgactgtctatagaagcaa

SEQ ID NO: 17928 - DNA, 37 bp, Artificial Sequence
  Synthetic oligonucleotide
tgactgtaacgccccgccgcctaatttagatcacgga

SEQ ID NO: 17929 - DNA, 35 bp, Artificial Sequence
  Synthetic oligonucleotide
tgtcttaaagtcctgtgtgccaatattagtggcaa

SEQ ID NO: 17930 - DNA, 38 bp, Artificial Sequence
  Synthetic oligonucleotide
ttaaagggatagatcgtgttagaggggcccgttcttga

SEQ ID NO: 17931 - DNA, 36 bp, Artificial Sequence
  Synthetic oligonucleotide
ttcagtaacagccgccggagattcgtacggatagga

SEQ ID NO: 17932 - DNA, 38 bp, Artificial Sequence
  Synthetic oligonucleotide
aattcaagccaccgtagtcaggttcctgtgggaagtga

SEQ ID NO: 17933 - DNA, 35 bp, Artificial Sequence
  Synthetic oligonucleotide
agtgttctccctggcgcaaacgtatttacgggact

SEQ ID NO: 17934 - DNA, 35 bp, Artificial Sequence
  Synthetic oligonucleotide
agttccgacttgaacgtaacaaaatacatagcccg

SEQ ID NO: 17935 - DNA, 36 bp, Artificial Sequence
  Synthetic oligonucleotide
catggggctccgttggtgcacatcaaggagttcgta

SEQ ID NO: 17936 - DNA, 37 bp, Artificial Sequence
  Synthetic oligonucleotide
ctcagcgcaggttgctccgatttgcccccccccgtga

SEQ ID NO: 17937 - DNA, 35 bp, Artificial Sequence
  Synthetic oligonucleotide
gcaaaggtaaccggggaatcgctggtatagctaag

SEQ ID NO: 17938 - DNA, 38 bp, Artificial Sequence
  Synthetic oligonucleotide
gcacggaagaagattcaccgcgtacggctctaaactga

SEQ ID NO: 17939 - DNA, 36 bp, Artificial Sequence
  Synthetic oligonucleotide
gctggtaacaacttcgcccaggtttaccgagatgga

SEQ ID NO: 17940 - DNA, 37 bp, Artificial Sequence
  Synthetic oligonucleotide
gtaaacctccgttaagggcaaaaaggtatactgtgga

SEQ ID NO: 17941 - DNA, 37 bp, Artificial Sequence
  Synthetic oligonucleotide
gtaacataaccacagggcgcagttgaagcttgtgcga

SEQ ID NO: 17942 - DNA, 35 bp, Artificial Sequence
  Synthetic oligonucleotide
gttgccccggaacgcgtgctaagtaacacgaaaag

SEQ ID NO: 17943 - DNA, 35 bp, Artificial Sequence
  Synthetic oligonucleotide
tatttacgttcaggaggccctcggcgaagacggtt

SEQ ID NO: 17944 - DNA, 36 bp, Artificial Sequence
  Synthetic oligonucleotide
tgactggcccaggtgattaagatttctgttcaagga

SEQ ID NO: 17945 - DNA, 38 bp, Artificial Sequence
  Synthetic oligonucleotide
ttacactcaagacgtgtcacatgtagaacgtcaaatga

SEQ ID NO: 17946 - DNA, 36 bp, Artificial Sequence
  Synthetic oligonucleotide
ttctctgtgggtcttgagtactgcatgagaagagta

SEQ ID NO: 17947 - DNA, 36 bp, Artificial Sequence
  Synthetic oligonucleotide
ttgacaacgagaccgcaaagtggaggcctgttgtta

SEQ ID NO: 17948 - DNA, 37 bp, Artificial Sequence
  Synthetic oligonucleotide
atacgggacatggcttacctgaatcgtagaaggagtg

SEQ ID NO: 17949 - DNA, 38 bp, Artificial Sequence
  Synthetic oligonucleotide
atgactgagagtgaattgaaatggctacattgaaatga

SEQ ID NO: 17950 - DNA, 36 bp, Artificial Sequence
  Synthetic oligonucleotide
aacagtcgccgactctaggttgtgtaggtttacgta

SEQ ID NO: 17951 - DNA, 35 bp, Artificial Sequence
  Synthetic oligonucleotide
acgtcaaatgacgttcaagccgcttagctcccccc

SEQ ID NO: 17952 - DNA, 35 bp, Artificial Sequence
  Synthetic oligonucleotide
gcgaatcaattggcgcgtcctgcaggcgtcctttg

SEQ ID NO: 17953 - DNA, 38 bp, Artificial Sequence
  Synthetic oligonucleotide
tacagtaactggtttcgacaattgcttaggctttgtga

SEQ ID NO: 17954 - DNA, 38 bp, Artificial Sequence
  Synthetic oligonucleotide
tctcaagtactcagtccggataacgggtccgaaactga

SEQ ID NO: 17955 - DNA, 35 bp, Artificial Sequence
  Synthetic oligonucleotide
aaaggagcaaggcgtccggaataaggaatcttcgt

SEQ ID NO: 17956 - DNA, 37 bp, Artificial Sequence
  Synthetic oligonucleotide
aacaaacgagcttgttagcgccagatttaatagtcga

SEQ ID NO: 17957 - DNA, 38 bp, Artificial Sequence
  Synthetic oligonucleotide
aacacagccaatgaggaattagggtgtcagaggcttga

SEQ ID NO: 17958 - DNA, 37 bp, Artificial Sequence
  Synthetic oligonucleotide
aacgtgagcttagcttatgtcccatcgggatacgtga

SEQ ID NO: 17959 - DNA, 37 bp, Artificial Sequence
  Synthetic oligonucleotide
aactatgaatctacattcgccggtgtttaggcgaaga

SEQ ID NO: 17960 - DNA, 38 bp, Artificial Sequence
  Synthetic oligonucleotide
aagttggcattgagcgacgtttatatgatagacgatga

SEQ ID NO: 17961 - DNA, 36 bp, Artificial Sequence
  Synthetic oligonucleotide
aatatggacagggaagcttcataaaagtcacggcta

SEQ ID NO: 17962 - DNA, 38 bp, Artificial Sequence
  Synthetic oligonucleotide
aatttcgggcggtcaaccgaggttgtagtggggattga

SEQ ID NO: 17963 - DNA, 35 bp, Artificial Sequence
  Synthetic oligonucleotide
acatgcgagacgacttcagcacctttatacgtcca

SEQ ID NO: 17964 - DNA, 37 bp, Artificial Sequence
  Synthetic oligonucleotide
acgaactcgtccgtaaataggcctgcgcccacataga

SEQ ID NO: 17965 - DNA, 38 bp, Artificial Sequence
  Synthetic oligonucleotide
acgatccgccgggcctaggctgatttgggaccaaatga

SEQ ID NO: 17966 - DNA, 38 bp, Artificial Sequence
  Synthetic oligonucleotide
actaggaatgtcccgcccagcttaccaagtacgtctga

SEQ ID NO: 17967 - DNA, 35 bp, Artificial Sequence
  Synthetic oligonucleotide
agactcaaggtgacatgggcgagacgatatcatat

SEQ ID NO: 17968 - DNA, 36 bp, Artificial Sequence
  Synthetic oligonucleotide
agcggtgagatcggtggttttggttcgaaaagttta

SEQ ID NO: 17969 - DNA, 37 bp, Artificial Sequence
  Synthetic oligonucleotide
agtcttggggtatggacgattacgggcttccctgtga

SEQ ID NO: 17970 - DNA, 36 bp, Artificial Sequence
  Synthetic oligonucleotide
ataagaacgggtatccagtcagcatcctccgcacta

SEQ ID NO: 17971 - DNA, 37 bp, Artificial Sequence
  Synthetic oligonucleotide
atacagtcatgaggtccgggacattccggcgcaccga

SEQ ID NO: 17972 - DNA, 36 bp, Artificial Sequence
  Synthetic oligonucleotide
atgcgacatggtgggtgaccaggaccatgctgtgca

SEQ ID NO: 17973 - DNA, 37 bp, Artificial Sequence
  Synthetic oligonucleotide
atgtcccgtggggagatgcggttgtgattcacactga

SEQ ID NO: 17974 - DNA, 35 bp, Artificial Sequence
  Synthetic oligonucleotide
cagacattgcttcagtcatcgctggcttaactctt

SEQ ID NO: 17975 - DNA, 37 bp, Artificial Sequence
  Synthetic oligonucleotide
cctagctccggaccgatagtacttttttatttgccga

SEQ ID NO: 17976 - DNA, 35 bp, Artificial Sequence
  Synthetic oligonucleotide
cgcccggtctcaggaaggacgtactcttgcttaga

SEQ ID NO: 17977 - DNA, 35 bp, Artificial Sequence
  Synthetic oligonucleotide
gaaatgccgaatagcgatatcgggttgtgtccgta

SEQ ID NO: 17978 - DNA, 37 bp, Artificial Sequence
  Synthetic oligonucleotide
gaactgccgtgtttattgtgggtctagactagtatga

SEQ ID NO: 17979 - DNA, 35 bp, Artificial Sequence
  Synthetic oligonucleotide
gaccacgctatatctccgactggccatctagcggc

SEQ ID NO: 17980 - DNA, 37 bp, Artificial Sequence
  Synthetic oligonucleotide
gagagacctcgatagttcgggtaattcgaggtaacga

SEQ ID NO: 17981 - DNA, 35 bp, Artificial Sequence
  Synthetic oligonucleotide
gagtgcgtacaggtacgggacgcaaagcgaaacta

SEQ ID NO: 17982 - DNA, 36 bp, Artificial Sequence
  Synthetic oligonucleotide
gatgcaaggatgagcggggtgtgggtccttaatgga

SEQ ID NO: 17983 - DNA, 35 bp, Artificial Sequence
  Synthetic oligonucleotide
gattgctccgatcacccggcccgcaggctcaaatc

SEQ ID NO: 17984 - DNA, 37 bp, Artificial Sequence
  Synthetic oligonucleotide
gcccaaaaatgggtggtccaagagagctctagtcaga

SEQ ID NO: 17985 - DNA, 35 bp, Artificial Sequence
  Synthetic oligonucleotide
gccctaacgtttagatagtagcatcttcggagacc

SEQ ID NO: 17986 - DNA, 37 bp, Artificial Sequence
  Synthetic oligonucleotide
gccgggcgcaagaattgcaattcggggggtgtgcgga

SEQ ID NO: 17987 - DNA, 35 bp, Artificial Sequence
  Synthetic oligonucleotide
gctataagacagtgtacatatagggttttggctgg

SEQ ID NO: 17988 - DNA, 37 bp, Artificial Sequence
  Synthetic oligonucleotide
gctgtatctttgactctttattgcctcgtagtccgga

SEQ ID NO: 17989 - DNA, 34 bp, Artificial Sequence
  Synthetic oligonucleotide
ggaattacgtagatgttcatgatcctggtttctg

SEQ ID NO: 17990 - DNA, 35 bp, Artificial Sequence
  Synthetic oligonucleotide
ggaccgggtggagcaatcaatctacagttgtgccg

SEQ ID NO: 17991 - DNA, 36 bp, Artificial Sequence
  Synthetic oligonucleotide
ggagatcactaatgctcgttccgccttaaatggata

SEQ ID NO: 17992 - DNA, 37 bp, Artificial Sequence
  Synthetic oligonucleotide
ggagcttctgcggtaaacggtacggtcttgtcgggga

SEQ ID NO: 17993 - DNA, 37 bp, Artificial Sequence
  Synthetic oligonucleotide
ggtcatgagaaaatcacgtctcctcaacaagagatga

SEQ ID NO: 17994 - DNA, 38 bp, Artificial Sequence
  Synthetic oligonucleotide
gtagcgacctaatgagctgcaagtagatgaacgcgtga

SEQ ID NO: 17995 - DNA, 36 bp, Artificial Sequence
  Synthetic oligonucleotide
gtcagcaacgactctgtcgggttgtttttgtaaaca

SEQ ID NO: 17996 - DNA, 36 bp, Artificial Sequence
  Synthetic oligonucleotide
gtgcgcaacttacaataatcagcagtgcgcgagcga

SEQ ID NO: 17997 - DNA, 35 bp, Artificial Sequence
  Synthetic oligonucleotide
gtggataactctccgcatgtgatacgcatcaattc

SEQ ID NO: 17998 - DNA, 38 bp, Artificial Sequence
  Synthetic oligonucleotide
gtggtccctctggttacaagttacgaaaggtgccctga

SEQ ID NO: 17999 - DNA, 35 bp, Artificial Sequence
  Synthetic oligonucleotide
gtgtgggttggacaagtgtggtcgttatagctatg

SEQ ID NO: 18000 - DNA, 35 bp, Artificial Sequence
  Synthetic oligonucleotide
taccgtagtaggcaacccatttgcggcgaaacatt

SEQ ID NO: 18001 - DNA, 36 bp, Artificial Sequence
  Synthetic oligonucleotide
tatgcatttgccaggaaagcacgtgggggcggttca

SEQ ID NO: 18002 - DNA, 35 bp, Artificial Sequence
  Synthetic oligonucleotide
tatgctgctacgtaactcgtcgtgtatcagtaggg

SEQ ID NO: 18003 - DNA, 35 bp, Artificial Sequence
  Synthetic oligonucleotide
tcaattaatagtccgtacccattgatgcagtacgg

SEQ ID NO: 18004 - DNA, 35 bp, Artificial Sequence
  Synthetic oligonucleotide
tccggggctgttacagtgcatcgcccttccggata

SEQ ID NO: 18005 - DNA, 36 bp, Artificial Sequence
  Synthetic oligonucleotide
tccggggtggccgggataatcctcttggagagtgta

SEQ ID NO: 18006 - DNA, 38 bp, Artificial Sequence
  Synthetic oligonucleotide
tcgtgtgcagaagcagggataacttcccaccaacttga

SEQ ID NO: 18007 - DNA, 35 bp, Artificial Sequence
  Synthetic oligonucleotide
tctgagcacaggtcatgcaggggctgtgtttatca

SEQ ID NO: 18008 - DNA, 35 bp, Artificial Sequence
  Synthetic oligonucleotide
tgacaatcaattagtacggcgtggcgtgcgtagga

SEQ ID NO: 18009 - DNA, 37 bp, Artificial Sequence
  Synthetic oligonucleotide
tgacttctctatatgggattcagagacgacttgcaga

SEQ ID NO: 18010 - DNA, 35 bp, Artificial Sequence
  Synthetic oligonucleotide
tggagtagtccgggcgccacatgtctccttgaggg

SEQ ID NO: 18011 - DNA, 38 bp, Artificial Sequence
  Synthetic oligonucleotide
tggtagccgcacgtaactatactatgcggcctacatga

SEQ ID NO: 18012 - DNA, 38 bp, Artificial Sequence
  Synthetic oligonucleotide
tgtggctaaacgacgtttctgcaggaacgagacggtga

SEQ ID NO: 18013 - DNA, 37 bp, Artificial Sequence
  Synthetic oligonucleotide
tgttaacgactgcgggactgtggtagagccgaaggga

SEQ ID NO: 18014 - DNA, 38 bp, Artificial Sequence
  Synthetic oligonucleotide
ttaggtatggaacgcccgtcaatccctcttaggtatga

SEQ ID NO: 18015 - DNA, 38 bp, Artificial Sequence
  Synthetic oligonucleotide
ttccagtcacgcacatcgtgccgttcagggctatctga

SEQ ID NO: 18016 - DNA, 35 bp, Artificial Sequence
  Synthetic oligonucleotide
ttcgacgcggtacaaccgtgttaggaccgtaggcg

SEQ ID NO: 18017 - DNA, 35 bp, Artificial Sequence
  Synthetic oligonucleotide
ttcgcccagtgaccgtcaccgtataacaagtgtaa

SEQ ID NO: 18018 - DNA, 37 bp, Artificial Sequence
  Synthetic oligonucleotide
ttgacatgaatgggtgtagaattcggaatctacgcga

SEQ ID NO: 18019 - DNA, 37 bp, Artificial Sequence
  Synthetic oligonucleotide
ttgaccacgcgtgagcgcatgcagtagcggatatgga

SEQ ID NO: 18020 - DNA, 36 bp, Artificial Sequence
  Synthetic oligonucleotide
ttggagacctgttattgatttgtttgcgcattaaca

SEQ ID NO: 18021 - DNA, 36 bp, Artificial Sequence
  Synthetic oligonucleotide
ttgggcgggggcgtacgccttttagagtcagtggta

SEQ ID NO: 18022 - DNA, 35 bp, Artificial Sequence
  Synthetic oligonucleotide
tttgagagcgtttggacaagtctgtggtccgagag

SEQ ID NO: 18023 - DNA, 36 bp, Artificial Sequence
  Synthetic oligonucleotide
ttttaacgcaattgagcaaagcttgagtcttgagta

SEQ ID NO: 18024 - DNA, 37 bp, Artificial Sequence
  Synthetic oligonucleotide
attaggacgacactggcgataagacgtagagcactga

SEQ ID NO: 18025 - DNA, 36 bp, Artificial Sequence
  Synthetic oligonucleotide
gccacatcgcaataagggatttggtccaccatttga

SEQ ID NO: 18026 - DNA, 37 bp, Artificial Sequence
  Synthetic oligonucleotide
actcacactaacaaacaatccgtgtatggagtatgga

SEQ ID NO: 18027 - DNA, 37 bp, Artificial Sequence
  Synthetic oligonucleotide
aatggacaccacaacagatgaatgttagtccccgtga

SEQ ID NO: 18028 - DNA, 38 bp, Artificial Sequence
  Synthetic oligonucleotide
gccagtcactggtccgcaggaggctggacgccctatga

SEQ ID NO: 18029 - DNA, 37 bp, Artificial Sequence
  Synthetic oligonucleotide
gtccggctgataaggtagcaacttagtcaatccacga

SEQ ID NO: 18030 - DNA, 38 bp, Artificial Sequence
  Synthetic oligonucleotide
aaagtaacgactgctcaagttggagaccggaggcctga

SEQ ID NO: 18031 - DNA, 38 bp, Artificial Sequence
  Synthetic oligonucleotide
aacaccgtggaataatgcgcccttgcgacgtacattga

SEQ ID NO: 18032 - DNA, 38 bp, Artificial Sequence
  Synthetic oligonucleotide
aagcccgcaaaaggtcaaagttacggcaacccgggtga

SEQ ID NO: 18033 - DNA, 35 bp, Artificial Sequence
  Synthetic oligonucleotide
aagtgctgaggaatcctgtccggtcccaatatgat

SEQ ID NO: 18034 - DNA, 37 bp, Artificial Sequence
  Synthetic oligonucleotide
acgcgtacacatgttacctcgggaattgtgtccagga

SEQ ID NO: 18035 - DNA, 35 bp, Artificial Sequence
  Synthetic oligonucleotide
acggaatgaattgtgttagctcactttaaggcaat

SEQ ID NO: 18036 - DNA, 37 bp, Artificial Sequence
  Synthetic oligonucleotide
acggttgtacgggaccccatcgtgacatagtcaagga

SEQ ID NO: 18037 - DNA, 36 bp, Artificial Sequence
  Synthetic oligonucleotide
agacagggcgcattacagggagaaccaggctgcata

SEQ ID NO: 18038 - DNA, 36 bp, Artificial Sequence
  Synthetic oligonucleotide
agaccgggggggctccggtattagtcggtttaagga

SEQ ID NO: 18039 - DNA, 35 bp, Artificial Sequence
  Synthetic oligonucleotide
agtacctgttcatgctcttttgggaaaaccacggc

SEQ ID NO: 18040 - DNA, 35 bp, Artificial Sequence
  Synthetic oligonucleotide
atcgaagttagctggcgtgaccacgctctattgcg

SEQ ID NO: 18041 - DNA, 36 bp, Artificial Sequence
  Synthetic oligonucleotide
atggtccggacgccttgactgtacttcaggcactaa

SEQ ID NO: 18042 - DNA, 36 bp, Artificial Sequence
  Synthetic oligonucleotide
cactggtgcctggatgctaagttcaatgcgggacaa

SEQ ID NO: 18043 - DNA, 35 bp, Artificial Sequence
  Synthetic oligonucleotide
catggaaggtctgttattgagcgttgtttttcgtc

SEQ ID NO: 18044 - DNA, 36 bp, Artificial Sequence
  Synthetic oligonucleotide
ccgagggcgatcaattttctatacccggtggaggaa

SEQ ID NO: 18045 - DNA, 37 bp, Artificial Sequence
  Synthetic oligonucleotide
cttacggatgtccctcccgcggttcagggcggaagga

SEQ ID NO: 18046 - DNA, 35 bp, Artificial Sequence
  Synthetic oligonucleotide
gaccctagtttagtcataatgtaatttagtacttg

SEQ ID NO: 18047 - DNA, 35 bp, Artificial Sequence
  Synthetic oligonucleotide
gagcgcggcctagtgtgattcataggggcgcctgt

SEQ ID NO: 18048 - DNA, 36 bp, Artificial Sequence
  Synthetic oligonucleotide
gatcttcaatatttgctgttttgtcagaagcatgca

SEQ ID NO: 18049 - DNA, 38 bp, Artificial Sequence
  Synthetic oligonucleotide
gcatgccatataactgatataaggtattacatatgtga

SEQ ID NO: 18050 - DNA, 36 bp, Artificial Sequence
  Synthetic oligonucleotide
gcccaatggcaatttgtatcccgtgcagacttgtaa

SEQ ID NO: 18051 - DNA, 38 bp, Artificial Sequence
  Synthetic oligonucleotide
gctgaacgctggtccacttgagtaggattagagtgtga

SEQ ID NO: 18052 - DNA, 38 bp, Artificial Sequence
  Synthetic oligonucleotide
gctgtacttgtagagtcaacaagtattagatcacatga

SEQ ID NO: 18053 - DNA, 35 bp, Artificial Sequence
  Synthetic oligonucleotide
gcttaagatggtttcgccagaaactagacaccaag

SEQ ID NO: 18054 - DNA, 36 bp, Artificial Sequence
  Synthetic oligonucleotide
ggacttccaaccaggtgacgccgaggtggctgagta

SEQ ID NO: 18055 - DNA, 36 bp, Artificial Sequence
  Synthetic oligonucleotide
ggtcgtaaggttaatacaacaagcagtcctaatgga

SEQ ID NO: 18056 - DNA, 38 bp, Artificial Sequence
  Synthetic oligonucleotide
ggttggaaaggtgcgcccacatttttacaacaagttga

SEQ ID NO: 18057 - DNA, 37 bp, Artificial Sequence
  Synthetic oligonucleotide
gtaagatcacggggactggtacggaggagatacatga

SEQ ID NO: 18058 - DNA, 36 bp, Artificial Sequence
  Synthetic oligonucleotide
gtcgcctgcgcggaaagaggttagggcagttgacta

SEQ ID NO: 18059 - DNA, 37 bp, Artificial Sequence
  Synthetic oligonucleotide
taatgggagccaaggtatgctagtggacagacgccga

SEQ ID NO: 18060 - DNA, 35 bp, Artificial Sequence
  Synthetic oligonucleotide
taattcacttcagtgcatgagagtaaagtcataag

SEQ ID NO: 18061 - DNA, 38 bp, Artificial Sequence
  Synthetic oligonucleotide
tacaagcaagtgatcaccgagaatcgtaaccgggatga

SEQ ID NO: 18062 - DNA, 35 bp, Artificial Sequence
  Synthetic oligonucleotide
tagtcattctcggtttgacgtcgggattggcccca

SEQ ID NO: 18063 - DNA, 36 bp, Artificial Sequence
  Synthetic oligonucleotide
tatcgagtgtgggaaatgtacggaagaggagccgta

SEQ ID NO: 18064 - DNA, 36 bp, Artificial Sequence
  Synthetic oligonucleotide
tcaatagaccggggctaacacatcgctgtgtgccaa

SEQ ID NO: 18065 - DNA, 36 bp, Artificial Sequence
  Synthetic oligonucleotide
tcagacggttccgtaatatctataagacgtgtccta

SEQ ID NO: 18066 - DNA, 35 bp, Artificial Sequence
  Synthetic oligonucleotide
tgcttagttgcaggcatggagactttgctagacgg

SEQ ID NO: 18067 - DNA, 38 bp, Artificial Sequence
  Synthetic oligonucleotide
tgggcctcctacggactgtgtctccctgctcagtatga

SEQ ID NO: 18068 - DNA, 37 bp, Artificial Sequence
  Synthetic oligonucleotide
tgtccttcacgagattctgacggaagggacgttttga

SEQ ID NO: 18069 - DNA, 37 bp, Artificial Sequence
  Synthetic oligonucleotide
tgtcgcaggttgccaaatacggaagggatgtccttga

SEQ ID NO: 18070 - DNA, 35 bp, Artificial Sequence
  Synthetic oligonucleotide
ttaacagggacaagcaactggtgtggtcaggctaa

SEQ ID NO: 18071 - DNA, 37 bp, Artificial Sequence
  Synthetic oligonucleotide
ttggggactctcagaagcatatagaccctctttgaga

SEQ ID NO: 18072 - DNA, 37 bp, Artificial Sequence
  Synthetic oligonucleotide
tttcacttctgcgagtgagtactgtgtcggtaaagga

SEQ ID NO: 18073 - DNA, 35 bp, Artificial Sequence
  Synthetic oligonucleotide
aacgcttggagtgtgtgtctagcaacagggcaaag

SEQ ID NO: 18074 - DNA, 38 bp, Artificial Sequence
  Synthetic oligonucleotide
acttgcaggctcttatttgtaacccgcgagcacggtga

SEQ ID NO: 18075 - DNA, 36 bp, Artificial Sequence
  Synthetic oligonucleotide
ttactgcgcctggtgtgtcttgatgcgagctcctca

SEQ ID NO: 18076 - DNA, 35 bp, Artificial Sequence
  Synthetic oligonucleotide
tatggttcacaggcgactgttgccgccaaaatgta

SEQ ID NO: 18077 - DNA, 35 bp, Artificial Sequence
  Synthetic oligonucleotide
gcccaacgactcgcgggacagtctgacgtaatatt

SEQ ID NO: 18078 - DNA, 38 bp, Artificial Sequence
  Synthetic oligonucleotide
gcgaactgctgaagtaggaagtagggtaacgcgagtga

SEQ ID NO: 18079 - DNA, 35 bp, Artificial Sequence
  Synthetic oligonucleotide
tctggttgaacggggtgtcagtaactgtactatgt

SEQ ID NO: 18080 - DNA, 37 bp, Artificial Sequence
  Synthetic oligonucleotide
tgccaccggattgctccctggtcgtttgaagatacga

SEQ ID NO: 18081 - DNA, 36 bp, Artificial Sequence
  Synthetic oligonucleotide
cccgaattagtcgtggacgtgtacataccgacgaca

SEQ ID NO: 18082 - DNA, 35 bp, Artificial Sequence
  Synthetic oligonucleotide
gattacagtgcagtctatgggtatgtctagtgttt

SEQ ID NO: 18083 - DNA, 37 bp, Artificial Sequence
  Synthetic oligonucleotide
ggcaaagccggtcactgacgctaggggggacgggtga

SEQ ID NO: 18084 - DNA, 37 bp, Artificial Sequence
  Synthetic oligonucleotide
gtcaccgaccctaacaagcgtcgcggtagcattacga

SEQ ID NO: 18085 - DNA, 37 bp, Artificial Sequence
  Synthetic oligonucleotide
tattgcacataacaccgatcgtaagacacggatttga

SEQ ID NO: 18086 - DNA, 35 bp, Artificial Sequence
  Synthetic oligonucleotide
tgcatgctggcaactgtatgtgggaatcgtctcac

SEQ ID NO: 18087 - DNA, 35 bp, Artificial Sequence
  Synthetic oligonucleotide
ttactaggggagccactgaataagcgactctcatg

SEQ ID NO: 18088 - DNA, 38 bp, Artificial Sequence
  Synthetic oligonucleotide
tttaagcgaggagggaaatgggtagccagcccgaatga

SEQ ID NO: 18089 - DNA, 35 bp, Artificial Sequence
  Synthetic oligonucleotide
aaaacgcgagaatgcaagatactgcacaggacgcg

SEQ ID NO: 18090 - DNA, 37 bp, Artificial Sequence
  Synthetic oligonucleotide
aactgcccatgttgaaatgattgtaatgcggggcata

SEQ ID NO: 18091 - DNA, 37 bp, Artificial Sequence
  Synthetic oligonucleotide
aagaggactaagtgtcggacgccatatacgggtgtca

SEQ ID NO: 18092 - DNA, 36 bp, Artificial Sequence
  Synthetic oligonucleotide
aatagggcctagagtcgacgaccagttgagaagcta

SEQ ID NO: 18093 - DNA, 38 bp, Artificial Sequence
  Synthetic oligonucleotide
agccaagccacaatgaggtaggccaaatccagacgtga

SEQ ID NO: 18094 - DNA, 36 bp, Artificial Sequence
  Synthetic oligonucleotide
agcggatgctcagaaactattattttgttctactaa

SEQ ID NO: 18095 - DNA, 36 bp, Artificial Sequence
  Synthetic oligonucleotide
aggtggaaggggtacatgatgaagatcggtacatta

SEQ ID NO: 18096 - DNA, 37 bp, Artificial Sequence
  Synthetic oligonucleotide
atacggtggtactttgtacctctgtagagaggtatga

SEQ ID NO: 18097 - DNA, 35 bp, Artificial Sequence
  Synthetic oligonucleotide
attgtatcggtgtaacttgaactccactccgtccg

SEQ ID NO: 18098 - DNA, 38 bp, Artificial Sequence
  Synthetic oligonucleotide
cgtgtctagtacttatgcatgacgtcggttcttaatga

SEQ ID NO: 18099 - DNA, 35 bp, Artificial Sequence
  Synthetic oligonucleotide
gacccgatggtctcaggtttagagggccaagggta

SEQ ID NO: 18100 - DNA, 38 bp, Artificial Sequence
  Synthetic oligonucleotide
gacggttcaagggaaaagctataggtccgtaagcgtga

SEQ ID NO: 18101 - DNA, 36 bp, Artificial Sequence
  Synthetic oligonucleotide
gactaccatgagggtgggctagccgcagggccaccg

SEQ ID NO: 18102 - DNA, 38 bp, Artificial Sequence
  Synthetic oligonucleotide
gctccaggcgaaagggcagggctcaacgaatatgatga

SEQ ID NO: 18103 - DNA, 37 bp, Artificial Sequence
  Synthetic oligonucleotide
ggaccagtcctagtgaatacaagggatgacgtcaaga

SEQ ID NO: 18104 - DNA, 38 bp, Artificial Sequence
  Synthetic oligonucleotide
ggatgcaggggcaactccctacggcctaatcctcgtga

SEQ ID NO: 18105 - DNA, 35 bp, Artificial Sequence
  Synthetic oligonucleotide
gggaattaaggtcagcaagagtctgggttcacaga

SEQ ID NO: 18106 - DNA, 37 bp, Artificial Sequence
  Synthetic oligonucleotide
ggtaggcgagtcatcattcgtataagcgaagtgttga

SEQ ID NO: 18107 - DNA, 36 bp, Artificial Sequence
  Synthetic oligonucleotide
ggttaacaagaagtgctatctgaccgtacactctga

SEQ ID NO: 18108 - DNA, 36 bp, Artificial Sequence
  Synthetic oligonucleotide
gtatcgttagaagggcttaaacaagtgtcgagtgga

SEQ ID NO: 18109 - DNA, 35 bp, Artificial Sequence
  Synthetic oligonucleotide
gtgttagctccgccgtaggagattcccgcattgag

SEQ ID NO: 18110 - DNA, 36 bp, Artificial Sequence
  Synthetic oligonucleotide
taatgcgaacgtgcgttgtaagtgtattttttcata

SEQ ID NO: 18111 - DNA, 37 bp, Artificial Sequence
  Synthetic oligonucleotide
tactacttctgcagttcgcacctccggatagaaccga

SEQ ID NO: 18112 - DNA, 35 bp, Artificial Sequence
  Synthetic oligonucleotide
tagcacccagggtggttccacccgctccaccgccg

SEQ ID NO: 18113 - DNA, 35 bp, Artificial Sequence
  Synthetic oligonucleotide
tagggctcgttcctacggtggtctattttgttaat

SEQ ID NO: 18114 - DNA, 37 bp, Artificial Sequence
  Synthetic oligonucleotide
tcatgggtctcagttgagggactatatatttgactga

SEQ ID NO: 18115 - DNA, 35 bp, Artificial Sequence
  Synthetic oligonucleotide
tcgtacggaatttctaacatgacaaggggggactg

SEQ ID NO: 18116 - DNA, 36 bp, Artificial Sequence
  Synthetic oligonucleotide
tctactgttagggcgtcttaataatgtttgtattga

SEQ ID NO: 18117 - DNA, 36 bp, Artificial Sequence
  Synthetic oligonucleotide
tgacttctgaacattgctgcatatagggctcggtca

SEQ ID NO: 18118 - DNA, 37 bp, Artificial Sequence
  Synthetic oligonucleotide
tgacttgttcgctcacgtgacgtaagctgacgcaaga

SEQ ID NO: 18119 - DNA, 35 bp, Artificial Sequence
  Synthetic oligonucleotide
tgcaggaagttcctacgaaagttacgctgtaaaag

SEQ ID NO: 18120 - DNA, 35 bp, Artificial Sequence
  Synthetic oligonucleotide
tggtcactcaccgatcattgacaactgcgggtccg

SEQ ID NO: 18121 - DNA, 36 bp, Artificial Sequence
  Synthetic oligonucleotide
tggtgtagacatagaggtacctcggattaagataca

SEQ ID NO: 18122 - DNA, 37 bp, Artificial Sequence
  Synthetic oligonucleotide
tgtacccttcgtatatacggcgactgttcgaagccga

SEQ ID NO: 18123 - DNA, 38 bp, Artificial Sequence
  Synthetic oligonucleotide
tttgaatagacgccgaacgttagcctagtttcttatga

SEQ ID NO: 18124 - DNA, 36 bp, Artificial Sequence
  Synthetic oligonucleotide
tcaaggagtccgggagggacccctctggagaactta

SEQ ID NO: 18125 - DNA, 35 bp, Artificial Sequence
  Synthetic oligonucleotide
acgatctttgacggttcgtacaataatcagacaag

SEQ ID NO: 18126 - DNA, 37 bp, Artificial Sequence
  Synthetic oligonucleotide
gaaccacctccgcgtagtacgggtggccgcactaaga

SEQ ID NO: 18127 - DNA, 36 bp, Artificial Sequence
  Synthetic oligonucleotide
tacgttacgttgaaccatcgttcagactgccggaca

SEQ ID NO: 18128 - DNA, 37 bp, Artificial Sequence
  Synthetic oligonucleotide
tccgtacccgtatgggtggttcctgtaccataggcga

SEQ ID NO: 18129 - DNA, 35 bp, Artificial Sequence
  Synthetic oligonucleotide
ttagcgtacgctctgaggtttaatcaggtttttaa

SEQ ID NO: 18130 - DNA, 35 bp, Artificial Sequence
  Synthetic oligonucleotide
tacttgcgaaccacgatctcatagcgggactcagt

SEQ ID NO: 18131 - DNA, 35 bp, Artificial Sequence
  Synthetic oligonucleotide
cgagcaccgattctctgcaggtgttcggtatgatg

SEQ ID NO: 18132 - DNA, 35 bp, Artificial Sequence
  Synthetic oligonucleotide
gtgaccgacaaccatgatgtgagtatcacgcgccc

SEQ ID NO: 18133 - DNA, 37 bp, Artificial Sequence
  Synthetic oligonucleotide
aaatacgtaggggggatacatttcgatacggttacga

SEQ ID NO: 18134 - DNA, 38 bp, Artificial Sequence
  Synthetic oligonucleotide
aactaccgacgattagtgtgtaagtggatcgcagaaga

SEQ ID NO: 18135 - DNA, 36 bp, Artificial Sequence
  Synthetic oligonucleotide
aagcctgttcatcgttgcacggtgaatctgggggta

SEQ ID NO: 18136 - DNA, 36 bp, Artificial Sequence
  Synthetic oligonucleotide
acaaccgaccgaactccgttaacgcgaagtggggga

SEQ ID NO: 18137 - DNA, 35 bp, Artificial Sequence
  Synthetic oligonucleotide
accatatgtacaggatgtgcactgatacgtattat

SEQ ID NO: 18138 - DNA, 37 bp, Artificial Sequence
  Synthetic oligonucleotide
accttgcaaacgcccatcacacagtcgttcacctgga

SEQ ID NO: 18139 - DNA, 36 bp, Artificial Sequence
  Synthetic oligonucleotide
actttgcggatgttcaatactgtgccagggtgcgga

SEQ ID NO: 18140 - DNA, 35 bp, Artificial Sequence
  Synthetic oligonucleotide
agattctgaccgacaccaggtacgtgaacatggga

SEQ ID NO: 18141 - DNA, 36 bp, Artificial Sequence
  Synthetic oligonucleotide
atgcatcacgaagtaattgctttattttaatgaaga

SEQ ID NO: 18142 - DNA, 35 bp, Artificial Sequence
  Synthetic oligonucleotide
ctcagccaggactgagactaagctcttgatcagtc

SEQ ID NO: 18143 - DNA, 37 bp, Artificial Sequence
  Synthetic oligonucleotide
gaactgtcaattggataggtaagttacaggagataga

SEQ ID NO: 18144 - DNA, 37 bp, Artificial Sequence
  Synthetic oligonucleotide
gaattgggccgttatttgaagtagtagctcaacgaga

SEQ ID NO: 18145 - DNA, 36 bp, Artificial Sequence
  Synthetic oligonucleotide
gactagtcgccgagggccgggaaatcacagccgaca

SEQ ID NO: 18146 - DNA, 35 bp, Artificial Sequence
  Synthetic oligonucleotide
gcacaagtacgtttgcaactttggtatgacagggg

SEQ ID NO: 18147 - DNA, 37 bp, Artificial Sequence
  Synthetic oligonucleotide
gcatgatgcgtacgtctgctggctacgtacacggaga

SEQ ID NO: 18148 - DNA, 38 bp, Artificial Sequence
  Synthetic oligonucleotide
gccatctcgataagagggtaagggggtaaggatgatga

SEQ ID NO: 18149 - DNA, 36 bp, Artificial Sequence
  Synthetic oligonucleotide
gccctgctcctgcgttcgatcctggcccacacgtga

SEQ ID NO: 18150 - DNA, 36 bp, Artificial Sequence
  Synthetic oligonucleotide
gcctgcggtcgaatgtagaaattccgctgactagga

SEQ ID NO: 18151 - DNA, 37 bp, Artificial Sequence
  Synthetic oligonucleotide
gcgcctcgtggccttatgcgcttaaaatagcgtaaga

SEQ ID NO: 18152 - DNA, 37 bp, Artificial Sequence
  Synthetic oligonucleotide
gcgtacactgcggattggggacgcccgaattaaccga

SEQ ID NO: 18153 - DNA, 36 bp, Artificial Sequence
  Synthetic oligonucleotide
ggacgaaatttttcctgacatcgaacgcatctgata

SEQ ID NO: 18154 - DNA, 38 bp, Artificial Sequence
  Synthetic oligonucleotide
gtaacgcgtgtgttacagtctaatgtattggggcttga

SEQ ID NO: 18155 - DNA, 38 bp, Artificial Sequence
  Synthetic oligonucleotide
gttcccaggacacgacttatcctgcaggcgcggagtga

SEQ ID NO: 18156 - DNA, 36 bp, Artificial Sequence
  Synthetic oligonucleotide
taaagtctgggtgccataccatcgggggaatattta

SEQ ID NO: 18157 - DNA, 35 bp, Artificial Sequence
  Synthetic oligonucleotide
tactaggccggtgggatcggggttgacagttcatg

SEQ ID NO: 18158 - DNA, 36 bp, Artificial Sequence
  Synthetic oligonucleotide
tagttcgacggggtttggtctgagaaggtcgtaaca

SEQ ID NO: 18159 - DNA, 36 bp, Artificial Sequence
  Synthetic oligonucleotide
tcccaacggatggtaaggccgagggggataacggaa

SEQ ID NO: 18160 - DNA, 35 bp, Artificial Sequence
  Synthetic oligonucleotide
tcttggtgtgcacgtatagtcaggtacgggcgttg

SEQ ID NO: 18161 - DNA, 35 bp, Artificial Sequence
  Synthetic oligonucleotide
tgctgtaacaacttgtgctataggtgctatgatac

SEQ ID NO: 18162 - DNA, 37 bp, Artificial Sequence
  Synthetic oligonucleotide
ttaaggagctgcggatatgtgtcctgataaattcgga

SEQ ID NO: 18163 - DNA, 35 bp, Artificial Sequence
  Synthetic oligonucleotide
ttattcagcacccccctctaattgcgagatactgt

SEQ ID NO: 18164 - DNA, 34 bp, Artificial Sequence
  Synthetic oligonucleotide
ttctcgagacttgacatcgcgagttgcattcccc

SEQ ID NO: 18165 - DNA, 36 bp, Artificial Sequence
  Synthetic oligonucleotide
agatcgggtgttggaccactcggtcgttgtacctga

SEQ ID NO: 18166 - DNA, 38 bp, Artificial Sequence
  Synthetic oligonucleotide
tgagatagtacgcagtcttgtgatgggtgtgctgatga

SEQ ID NO: 18167 - DNA, 35 bp, Artificial Sequence
  Synthetic oligonucleotide
agccataagtgatgacctaacgtttcgcgtcatgc

SEQ ID NO: 18168 - DNA, 37 bp, Artificial Sequence
  Synthetic oligonucleotide
atacacgtggacgttctttggtcacgtggcgaatgga

SEQ ID NO: 18169 - DNA, 37 bp, Artificial Sequence
  Synthetic oligonucleotide
gatacgcagtcatagacttaagggaataattggttga

SEQ ID NO: 18170 - DNA, 37 bp, Artificial Sequence
  Synthetic oligonucleotide
tctgctggaacgtccgcatggagatcgtattccgcga

SEQ ID NO: 18171 - DNA, 35 bp, Artificial Sequence
  Synthetic oligonucleotide
aatccgctccttatagcccgttcgagacgttattg

SEQ ID NO: 18172 - DNA, 35 bp, Artificial Sequence
  Synthetic oligonucleotide
agtacagtcgaagaacaaacgaaatggagggcgga

SEQ ID NO: 18173 - DNA, 36 bp, Artificial Sequence
  Synthetic oligonucleotide
caaacctgggagcgtgcgtatcaagcaggtaccgta

SEQ ID NO: 18174 - DNA, 36 bp, Artificial Sequence
  Synthetic oligonucleotide
tcaagtctttgcactgttactggcgtaataatgcta

SEQ ID NO: 18175 - DNA, 36 bp, Artificial Sequence
  Synthetic oligonucleotide
agcacggctagggttaaaaagatggagggttcttta

SEQ ID NO: 18176 - DNA, 35 bp, Artificial Sequence
  Synthetic oligonucleotide
atgctacggtccgtctgtgtctagtcaggtttggt

SEQ ID NO: 18177 - DNA, 36 bp, Artificial Sequence
  Synthetic oligonucleotide
attatagaagcaggtccacaattgcattgattgata

SEQ ID NO: 18178 - DNA, 38 bp, Artificial Sequence
  Synthetic oligonucleotide
cacggaactggcctgcatcaatgtggaaattatcctga

SEQ ID NO: 18179 - DNA, 35 bp, Artificial Sequence
  Synthetic oligonucleotide
gaatctgatctgcagtctagattgtaacggctcat

SEQ ID NO: 18180 - DNA, 36 bp, Artificial Sequence
  Synthetic oligonucleotide
gaattcgcgaggcgatacggaattccgtatcagcta

SEQ ID NO: 18181 - DNA, 35 bp, Artificial Sequence
  Synthetic oligonucleotide
gacaaattatcggagcgtagccctggcacgatatg

SEQ ID NO: 18182 - DNA, 37 bp, Artificial Sequence
  Synthetic oligonucleotide
gatagccttagtgttgagacggtgaggcgtgataaga

SEQ ID NO: 18183 - DNA, 36 bp, Artificial Sequence
  Synthetic oligonucleotide
gccccgggctgtttaaggggagtggggggttacaaa

SEQ ID NO: 18184 - DNA, 36 bp, Artificial Sequence
  Synthetic oligonucleotide
gctgaccatggtgatagctgtggggggtttcttata

SEQ ID NO: 18185 - DNA, 37 bp, Artificial Sequence
  Synthetic oligonucleotide
gggtcgccgccggccataggggccacggagagtacga

SEQ ID NO: 18186 - DNA, 37 bp, Artificial Sequence
  Synthetic oligonucleotide
gtaggtattgtgggatggcgctggagatcaatgttga

SEQ ID NO: 18187 - DNA, 36 bp, Artificial Sequence
  Synthetic oligonucleotide
gtcaggcctgcaagctcaaaatgtgatttattgcga

SEQ ID NO: 18188 - DNA, 35 bp, Artificial Sequence
  Synthetic oligonucleotide
gttgaccgcgtggggcacattcggcctgtaagagt

SEQ ID NO: 18189 - DNA, 37 bp, Artificial Sequence
  Synthetic oligonucleotide
tcgacgtgcccgaggttttgacagttttttaggacga

SEQ ID NO: 18190 - DNA, 36 bp, Artificial Sequence
  Synthetic oligonucleotide
tctgtcgcctactgttaacaaaaggacgaattaaga

SEQ ID NO: 18191 - DNA, 38 bp, Artificial Sequence
  Synthetic oligonucleotide
tgcacggaaaactattggaaatcctgcgtgtgacatga

SEQ ID NO: 18192 - DNA, 35 bp, Artificial Sequence
  Synthetic oligonucleotide
tgcccaactagacgatagcaaatcctgaccgcggt

SEQ ID NO: 18193 - DNA, 36 bp, Artificial Sequence
  Synthetic oligonucleotide
ttaaataggccgcctggttatacgatgcctcgagca

SEQ ID NO: 18194 - DNA, 36 bp, Artificial Sequence
  Synthetic oligonucleotide
gttgacctgcgccatgcattctcaacccgtgtgtga

SEQ ID NO: 18195 - DNA, 36 bp, Artificial Sequence
  Synthetic oligonucleotide
gttcaacactaggagtccacagatggggacttttta

SEQ ID NO: 18196 - DNA, 35 bp, Artificial Sequence; identical to SEQ ID NO: 2969
  Synthetic oligonucleotide

SEQ ID NO: 18197 - DNA, 35 bp, Artificial Sequence
  Synthetic oligonucleotide
gggtggcaatagtaagtcaatgtatgttattccga

SEQ ID NO: 18198 - DNA, 35 bp, Artificial Sequence
  Synthetic oligonucleotide
cattagcggacatgcgaaagtggtgctactgtgta

SEQ ID NO: 18199 - DNA, 36 bp, Artificial Sequence
  Synthetic oligonucleotide
cgaccctggccggatcaagtcagctggtacgcagta

SEQ ID NO: 18200 - DNA, 35 bp, Artificial Sequence
  Synthetic oligonucleotide
acatgactcactggcgtcagagatgttcactgtga

SEQ ID NO: 18201 - DNA, 37 bp, Artificial Sequence
  Synthetic oligonucleotide
agccttatagagtcccaataacgacggagtggtacga

SEQ ID NO: 18202 - DNA, 36 bp, Artificial Sequence
  Synthetic oligonucleotide
atccagagccggtaaagcctgacctttgtctgtgta

SEQ ID NO: 18203 - DNA, 38 bp, Artificial Sequence
  Synthetic oligonucleotide
ccccgtcgctctggggctacgggagatcgacagattga

SEQ ID NO: 18204 - DNA, 36 bp, Artificial Sequence
  Synthetic oligonucleotide
gctcccaaagaaggatttgtcgaaagttcgctcaaa

SEQ ID NO: 18205 - DNA, 37 bp, Artificial Sequence
  Synthetic oligonucleotide
ggatgtagcgaggcaccttcaggtgaaggcgtgtgga

SEQ ID NO: 18206 - DNA, 38 bp, Artificial Sequence
  Synthetic oligonucleotide
gttcgaggagcctacatgttgtcctggagagttgttga

SEQ ID NO: 18207 - DNA, 36 bp, Artificial Sequence
  Synthetic oligonucleotide
tacgagagtgtcggttggatctgaactccgtaagca

SEQ ID NO: 18208 - DNA, 37 bp, Artificial Sequence
  Synthetic oligonucleotide
ttacgtatggattggtgcactgggggagtgcacaaga

SEQ ID NO: 18209 - DNA, 35 bp, Artificial Sequence
  Synthetic oligonucleotide
ttactggtgtaagctgtcactgcaacccatgtgga

SEQ ID NO: 18210 - DNA, 37 bp, Artificial Sequence
  Synthetic oligonucleotide
ttaggggtggttagactctgttatactgtgtcatgga

SEQ ID NO: 18211 - DNA, 36 bp, Artificial Sequence
  Synthetic oligonucleotide
tttcgacagacctacctgtagacgtggagcaaacca

SEQ ID NO: 18212 - DNA, 37 bp, Artificial Sequence
  Synthetic oligonucleotide
gactaaaggactgtgggtggtgcagggcgtagaacga

SEQ ID NO: 18213 - DNA, 37 bp, Artificial Sequence
  Synthetic oligonucleotide
gcgaactgagtacggttttgcgaggcgaccgggtcga

SEQ ID NO: 18214 - DNA, 37 bp, Artificial Sequence
  Synthetic oligonucleotide
ggcctcgttttcgggccaacttccctgctaactgcga

SEQ ID NO: 18215 - DNA, 37 bp, Artificial Sequence
  Synthetic oligonucleotide
aagggtcgtttactttcgtcatgtcacactatcgtga

SEQ ID NO: 18216 - DNA, 37 bp, Artificial Sequence
  Synthetic oligonucleotide
acgtgggtctaggatacggcgtgttttgggtcccgga

SEQ ID NO: 18217 - DNA, 35 bp, Artificial Sequence
  Synthetic oligonucleotide
ggtcactgattcatagtgccgtgggtgatgccagt

SEQ ID NO: 18218 - DNA, 37 bp, Artificial Sequence
  Synthetic oligonucleotide
gtcgtttcacagtagttttaactaaacgttgtgcaga

SEQ ID NO: 18219 - DNA, 35 bp, Artificial Sequence
  Synthetic oligonucleotide
tcaccatcctggaatgagacgttaccgcatattgg

SEQ ID NO: 18220 - DNA, 37 bp, Artificial Sequence
  Synthetic oligonucleotide
tctttagcgctgcagaaacgcacagtggttatggcga

SEQ ID NO: 18221 - DNA, 38 bp, Artificial Sequence
  Synthetic oligonucleotide
tgaccggtccgtggccaagcaagatggtcataatatga

SEQ ID NO: 18222 - DNA, 37 bp, Artificial Sequence
  Synthetic oligonucleotide
aaccgttaggaactgactatgcgactggttataagga

SEQ ID NO: 18223 - DNA, 37 bp, Artificial Sequence
  Synthetic oligonucleotide
aatgcactctaaaacggtaagagggcgaaagtggtga

SEQ ID NO: 18224 - DNA, 35 bp, Artificial Sequence
  Synthetic oligonucleotide
acaacattgttaatatcgctcaaagtacagcctgt

SEQ ID NO: 18225 - DNA, 35 bp, Artificial Sequence
  Synthetic oligonucleotide
accaatcgcggtagacccgctgcggggcatatgga

SEQ ID NO: 18226 - DNA, 36 bp, Artificial Sequence
  Synthetic oligonucleotide
accccatattaggggattgccttgcaaccgttgcga

SEQ ID NO: 18227 - DNA, 36 bp, Artificial Sequence
  Synthetic oligonucleotide
accctgcgaggaaatttacagtacagcagtctagta

SEQ ID NO: 18228 - DNA, 36 bp, Artificial Sequence
  Synthetic oligonucleotide
accctttgggaatgtaattccgggcgtgcgcgaata

SEQ ID NO: 18229 - DNA, 34 bp, Artificial Sequence
  Synthetic oligonucleotide
accgtcccatacgaatcaacgcagagtgcccatg

SEQ ID NO: 18230 - DNA, 35 bp, Artificial Sequence
  Synthetic oligonucleotide
acgaaatctgcgaatatttcaggcacaccaggaag

SEQ ID NO: 18231 - DNA, 38 bp, Artificial Sequence
  Synthetic oligonucleotide
acgaatgcagtgctatgtaggtactaaggatatcttga

SEQ ID NO: 18232 - DNA, 35 bp, Artificial Sequence
  Synthetic oligonucleotide
acgctcaagcggtgcaaagaaaagtgtgggctaat

SEQ ID NO: 18233 - DNA, 37 bp, Artificial Sequence
  Synthetic oligonucleotide
actaggtgtcttgggtcaaagcgcacaaagccatcga

SEQ ID NO: 18234 - DNA, 38 bp, Artificial Sequence
  Synthetic oligonucleotide
actcagggactacgcggtctatggccatgctctaatga

SEQ ID NO: 18235 - DNA, 36 bp, Artificial Sequence
  Synthetic oligonucleotide
actgcatagggcatgacaagcggattagctgggaaa

SEQ ID NO: 18236 - DNA, 36 bp, Artificial Sequence
  Synthetic oligonucleotide
acttatggagtggtagggctgctgttcatcttagga

SEQ ID NO: 18237 - DNA, 36 bp, Artificial Sequence
  Synthetic oligonucleotide
agaactacgtctttcttggatcatcaccatcaggga

SEQ ID NO: 18238 - DNA, 36 bp, Artificial Sequence
  Synthetic oligonucleotide
agagcaatcagagttccgacgggaaaaagttgctga

SEQ ID NO: 18239 - DNA, 35 bp, Artificial Sequence
  Synthetic oligonucleotide
agagtgatggcggaatggttgtactcactattgtg

SEQ ID NO: 18240 - DNA, 35 bp, Artificial Sequence
  Synthetic oligonucleotide
agatctgtgaagtgggacaaatcatgttcattata

SEQ ID NO: 18241 - DNA, 37 bp, Artificial Sequence
  Synthetic oligonucleotide
agcactgcagttgtccattacagtgagccctggaaga

SEQ ID NO: 18242 - DNA, 36 bp, Artificial Sequence
  Synthetic oligonucleotide
agccatggtgttactgcgcaggtgcttcgactagga

SEQ ID NO: 18243 - DNA, 37 bp, Artificial Sequence
  Synthetic oligonucleotide
aggatctgcagatctagatattggagttagacctaga

SEQ ID NO: 18244 - DNA, 35 bp, Artificial Sequence
  Synthetic oligonucleotide
agtttgaagcacacgcgtcaaaagacaacgtacac

SEQ ID NO: 18245 - DNA, 37 bp, Artificial Sequence
  Synthetic oligonucleotide
atagcgcgagccgcgtttcggtcgtactggttcagga

SEQ ID NO: 18246 - DNA, 37 bp, Artificial Sequence
  Synthetic oligonucleotide
atagttgccaaggctagcacactattatgcgtgcgga

SEQ ID NO: 18247 - DNA, 36 bp, Artificial Sequence
  Synthetic oligonucleotide
atcacctcaaggtgcttgtcaaacttttctccgtta

SEQ ID NO: 18248 - DNA, 37 bp, Artificial Sequence
  Synthetic oligonucleotide
atcgtcctgctccctgggaaatgattggtggagacga

SEQ ID NO: 18249 - DNA, 35 bp, Artificial Sequence
  Synthetic oligonucleotide
atgtggccgatctggagtgagcgtacaaaatgaca

SEQ ID NO: 18250 - DNA, 36 bp, Artificial Sequence
  Synthetic oligonucleotide
atgttcccaaacatgctcactgtatcaaccgtacaa

SEQ ID NO: 18251 - DNA, 38 bp, Artificial Sequence
  Synthetic oligonucleotide
attcaaagctgctctggcaagtccggaggattaactga

SEQ ID NO: 18252 - DNA, 37 bp, Artificial Sequence
  Synthetic oligonucleotide
attcgaggactggcggatgcagagttgagagaaccga

SEQ ID NO: 18253 - DNA, 36 bp, Artificial Sequence
  Synthetic oligonucleotide
caatcgttagtagccatcaggacctggggcatatga

SEQ ID NO: 18254 - DNA, 36 bp, Artificial Sequence
  Synthetic oligonucleotide
cacagacatatttctctggattggggggttcttgca

SEQ ID NO: 18255 - DNA, 38 bp, Artificial Sequence
  Synthetic oligonucleotide
cactgcggtttatgcgtagtgtagaacggattgtgtga

SEQ ID NO: 18256 - DNA, 35 bp, Artificial Sequence
  Synthetic oligonucleotide
cccaccgagagtaaaagactggaggacgctggagg

SEQ ID NO: 18257 - DNA, 38 bp, Artificial Sequence
  Synthetic oligonucleotide
ctactaaggcatatagacctgtaccaagtcaagtatga

SEQ ID NO: 18258 - DNA, 35 bp, Artificial Sequence
  Synthetic oligonucleotide
ctcaacgttagtgcaggcttgattgaacatcgtac

SEQ ID NO: 18259 - DNA, 37 bp, Artificial Sequence
  Synthetic oligonucleotide
gaaagttcctatccgacgttctcgagtgtgtggagga

SEQ ID NO: 18260 - DNA, 38 bp, Artificial Sequence
  Synthetic oligonucleotide
gaaatgccttcgctgattgaaatcaagatgtcggatga

SEQ ID NO: 18261 - DNA, 35 bp, Artificial Sequence
  Synthetic oligonucleotide
gaacacggtcaggatttatgatgattttaccacgt

SEQ ID NO: 18262 - DNA, 36 bp, Artificial Sequence
  Synthetic oligonucleotide
gaagactacgctgcgtgaattcgtacgttacttaga

SEQ ID NO: 18263 - DNA, 36 bp, Artificial Sequence
  Synthetic oligonucleotide
gaagagctcctggactgggactgagatattcaaaga

SEQ ID NO: 18264 - DNA, 37 bp, Artificial Sequence
  Synthetic oligonucleotide
gaatacgtacgcggaagggagtctaatccgaaaaaga

SEQ ID NO: 18265 - DNA, 37 bp, Artificial Sequence
  Synthetic oligonucleotide
gacctacgggtccggaataattgcaagaatgtacaga

SEQ ID NO: 18266 - DNA, 36 bp, Artificial Sequence
  Synthetic oligonucleotide
gactagaaggaggtgcgtaatccgactgggagagta

SEQ ID NO: 18267 - DNA, 37 bp, Artificial Sequence
  Synthetic oligonucleotide
gagaaggcatattcctcaatactgttgtctgttccga

SEQ ID NO: 18268 - DNA, 36 bp, Artificial Sequence
  Synthetic oligonucleotide
gagaccaccgttgaaaaaggccatttttgaaaggga

SEQ ID NO: 18269 - DNA, 37 bp, Artificial Sequence
  Synthetic oligonucleotide
gagcccaaggatgcataattgatggtctgtaacacga

SEQ ID NO: 18270 - DNA, 37 bp, Artificial Sequence
  Synthetic oligonucleotide
gaggggaaacttcaacctggacctggtacaatgacga

SEQ ID NO: 18271 - DNA, 37 bp, Artificial Sequence
  Synthetic oligonucleotide
gaggttcacaacgtgcgtcaagtcgcaactcaatcga

SEQ ID NO: 18272 - DNA, 38 bp, Artificial Sequence
  Synthetic oligonucleotide
gagtaacttcgccaaattgtagattgagtggagcttga

SEQ ID NO: 18273 - DNA, 36 bp, Artificial Sequence
  Synthetic oligonucleotide
gagtaccgcggtgcagttaaattcaataattcgtca

SEQ ID NO: 18274 - DNA, 35 bp, Artificial Sequence
  Synthetic oligonucleotide
gagtctccgattgcagattacaggtaaaagaatgg

SEQ ID NO: 18275 - DNA, 35 bp, Artificial Sequence
  Synthetic oligonucleotide
gatacacaatgcgcccctcataggttagtagcacg

SEQ ID NO: 18276 - DNA, 38 bp, Artificial Sequence
  Synthetic oligonucleotide
gatgcgtgctgcgggtttctgtgaatttaccaacatga

SEQ ID NO: 18277 - DNA, 35 bp, Artificial Sequence
  Synthetic oligonucleotide
gcaagtaagcgtgttgagcgaggtcaggagaggcg

SEQ ID NO: 18278 - DNA, 36 bp, Artificial Sequence
  Synthetic oligonucleotide
gcaagtccattatttctacgctggttggaaaaggta

SEQ ID NO: 18279 - DNA, 36 bp, Artificial Sequence
  Synthetic oligonucleotide
gcaggggatgcaagacgtcagtgctgaggaccgcaa

SEQ ID NO: 18280 - DNA, 38 bp, Artificial Sequence
  Synthetic oligonucleotide
gcatataatggagtcagctggcggataagtccatttga

SEQ ID NO: 18281 - DNA, 35 bp, Artificial Sequence
  Synthetic oligonucleotide
gcattggtcaatttttagatattaacttatagtcg

SEQ ID NO: 18282 - DNA, 35 bp, Artificial Sequence
  Synthetic oligonucleotide
gcccacacaggggagctgcacgccattagcacagg

SEQ ID NO: 18283 - DNA, 36 bp, Artificial Sequence
  Synthetic oligonucleotide
gcccagagggcaggactgttgcctatctccatttga

SEQ ID NO: 18284 - DNA, 37 bp, Artificial Sequence
  Synthetic oligonucleotide
gccctagtatgttgaagttatagcgaactccgcttga

SEQ ID NO: 18285 - DNA, 35 bp, Artificial Sequence
  Synthetic oligonucleotide
gcgagcaccgagctttgccataatatacgcgcttg

SEQ ID NO: 18286 - DNA, 37 bp, Artificial Sequence
  Synthetic oligonucleotide
gcgattcgttttgtatcgtccggtgcgaatgtcgaga

SEQ ID NO: 18287 - DNA, 37 bp, Artificial Sequence
  Synthetic oligonucleotide
gcgtggtccacaagctcaggtagtagctcctaagcga

SEQ ID NO: 18288 - DNA, 36 bp, Artificial Sequence
  Synthetic oligonucleotide
gcgtttcaatggtttcccgcttatacggggatcgga

SEQ ID NO: 18289 - DNA, 37 bp, Artificial Sequence
  Synthetic oligonucleotide
gcttaatgctaattcagggtgaaaaggtcaaacctga

SEQ ID NO: 18290 - DNA, 35 bp, Artificial Sequence
  Synthetic oligonucleotide
ggaaacgttcattgaagactggtattagtgggtaa

SEQ ID NO: 18291 - DNA, 36 bp, Artificial Sequence
  Synthetic oligonucleotide
ggactatccgcataaaccccttcgagtgacggtata

SEQ ID NO: 18292 - DNA, 38 bp, Artificial Sequence
  Synthetic oligonucleotide
gggataaatgtagtctaccttagaataggtgtgcatga

SEQ ID NO: 18293 - DNA, 36 bp, Artificial Sequence
  Synthetic oligonucleotide
gggatttcattaagccgcgtactggagcgtgggtta

SEQ ID NO: 18294 - DNA, 36 bp, Artificial Sequence
  Synthetic oligonucleotide
ggtagcatttatgcaccatgctgttccccagttcca

SEQ ID NO: 18295 - DNA, 38 bp, Artificial Sequence
  Synthetic oligonucleotide
ggtcatcaaatcgtatatgctgcaatctgtatcgttga

SEQ ID NO: 18296 - DNA, 37 bp, Artificial Sequence
  Synthetic oligonucleotide
ggtgaaatccgtcacgaataggaaagactgccccgga

SEQ ID NO: 18297 - DNA, 37 bp, Artificial Sequence
  Synthetic oligonucleotide
ggttttccgtatttctcgtagtctcatggactagtga

SEQ ID NO: 18298 - DNA, 37 bp, Artificial Sequence
  Synthetic oligonucleotide
gtaaggggtcatgggtggtttacaatgggaagtgaaa

SEQ ID NO: 18299 - DNA, 38 bp, Artificial Sequence
  Synthetic oligonucleotide
gtatacattcaatgccactgaagggaatggtggcatga

SEQ ID NO: 18300 - DNA, 38 bp, Artificial Sequence
  Synthetic oligonucleotide
gtatcggatagctgaacagaaagtaaaaacggatctga

SEQ ID NO: 18301 - DNA, 35 bp, Artificial Sequence
  Synthetic oligonucleotide
gtattgacaccggacacgcaactgcacaggattct

SEQ ID NO: 18302 - DNA, 35 bp, Artificial Sequence
  Synthetic oligonucleotide
gtccactgggaagactggaagattccgactccttc

SEQ ID NO: 18303 - DNA, 35 bp, Artificial Sequence
  Synthetic oligonucleotide
gtccatgtacttaaacacctaacggtaacgcgtta

SEQ ID NO: 18304 - DNA, 36 bp, Artificial Sequence
  Synthetic oligonucleotide
gtcccaggagaagaaggcaaagagagtgcccagata

SEQ ID NO: 18305 - DNA, 37 bp, Artificial Sequence
  Synthetic oligonucleotide
gtcggaatgaagacgagcctacccctcttcgtggcga

SEQ ID NO: 18306 - DNA, 38 bp, Artificial Sequence
  Synthetic oligonucleotide
gtctgttacgctggggtcatgtagaatgtttaacctga

SEQ ID NO: 18307 - DNA, 38 bp, Artificial Sequence
  Synthetic oligonucleotide
gtcttgatggctaagttaaaatgcaccggaggacaaga

SEQ ID NO: 18308 - DNA, 35 bp, Artificial Sequence
  Synthetic oligonucleotide
gtgaccgaggcccttcggccacactgggactcgca

SEQ ID NO: 18309 - DNA, 38 bp, Artificial Sequence
  Synthetic oligonucleotide
gtgagcgtaacctgggaactgctctttgatgtaaatga

SEQ ID NO: 18310 - DNA, 37 bp, Artificial Sequence
  Synthetic oligonucleotide
gtgataatttcatcggcggagtaattggcgactcgga

SEQ ID NO: 18311 - DNA, 35 bp, Artificial Sequence
  Synthetic oligonucleotide
gttaccgtcgaaatgtccagcctccgtctccctcg

SEQ ID NO: 18312 - DNA, 36 bp, Artificial Sequence
  Synthetic oligonucleotide
gttccaatgaagaatcggcctgttggagtggtttta

SEQ ID NO: 18313 - DNA, 35 bp, Artificial Sequence
  Synthetic oligonucleotide
gttcccgagccggtaggacaaccgatgtacaccgt

SEQ ID NO: 18314 - DNA, 35 bp, Artificial Sequence
  Synthetic oligonucleotide
gttgcgtagtgatcgacgaggtaatacacgttctg

SEQ ID NO: 18315 - DNA, 36 bp, Artificial Sequence
  Synthetic oligonucleotide
gttgtcgccggtccttacacaagagtccgtaagcaa

SEQ ID NO: 18316 - DNA, 36 bp, Artificial Sequence
  Synthetic oligonucleotide
taactcccccctcccacgaaccggacgtgatttcga

SEQ ID NO: 18317 - DNA, 37 bp, Artificial Sequence
  Synthetic oligonucleotide
tacactgacggaaagggcgcactatggccttgggcga

SEQ ID NO: 18318 - DNA, 37 bp, Artificial Sequence
  Synthetic oligonucleotide
tacgagcgaagtttcatacggactgccgttccgacga

SEQ ID NO: 18319 - DNA, 36 bp, Artificial Sequence
  Synthetic oligonucleotide
tacgcgaaaattgggcgggatggcggaccggaataa

SEQ ID NO: 18320 - DNA, 35 bp, Artificial Sequence
  Synthetic oligonucleotide
tacggtctaaggttcaaagaggtgatttgctgtgg

SEQ ID NO: 18321 - DNA, 36 bp, Artificial Sequence
  Synthetic oligonucleotide
tacttaagggaacgtgggctcggtggtcttgtctaa

SEQ ID NO: 18322 - DNA, 36 bp, Artificial Sequence
  Synthetic oligonucleotide
tagggactgcaggggatttcgcaaatcctaatttga

SEQ ID NO: 18323 - DNA, 36 bp, Artificial Sequence
  Synthetic oligonucleotide
tatccgggttagtacttcggccgacggattcttaga

SEQ ID NO: 18324 - DNA, 36 bp, Artificial Sequence
  Synthetic oligonucleotide
tatgatcccgcttcccaggacgtaccgaggcattag

SEQ ID NO: 18325 - DNA, 36 bp, Artificial Sequence
  Synthetic oligonucleotide
tattgaccttacgtccgaaatgggtcgaaccactca

SEQ ID NO: 18326 - DNA, 37 bp, Artificial Sequence
  Synthetic oligonucleotide
tcaaagttaacaagacatatcgtccaagtctgagcga

SEQ ID NO: 18327 - DNA, 35 bp, Artificial Sequence
  Synthetic oligonucleotide
tcaccgtctgatcgggagggccggtgtaatgatat

SEQ ID NO: 18328 - DNA, 36 bp, Artificial Sequence
  Synthetic oligonucleotide
tcattatcgtttgagtctgcctgcccaagccgttaa

SEQ ID NO: 18329 - DNA, 36 bp, Artificial Sequence
  Synthetic oligonucleotide
tccaaattgggggtgcacctgttatggtctctcaaa

SEQ ID NO: 18330 - DNA, 35 bp, Artificial Sequence
  Synthetic oligonucleotide
tccattagcaaagaactgctaacatcaagcggtct

SEQ ID NO: 18331 - DNA, 35 bp, Artificial Sequence
  Synthetic oligonucleotide
tcccaaaaggttgtaccatttgattcgttgcaggc

SEQ ID NO: 18332 - DNA, 35 bp, Artificial Sequence
  Synthetic oligonucleotide
tcgcgggcttgcacgtaaaagcaaagggtttgctt

SEQ ID NO: 18333 - DNA, 36 bp, Artificial Sequence
  Synthetic oligonucleotide
tcgtgcgtggccacgacgtacttgataatcagctga

SEQ ID NO: 18334 - DNA, 38 bp, Artificial Sequence
  Synthetic oligonucleotide
tctaacgatatgggtgtcttggcgtcaacgttttctga

SEQ ID NO: 18335 - DNA, 37 bp, Artificial Sequence
  Synthetic oligonucleotide
tctacagcaaacaaacggacggccctgtacaaatgga

SEQ ID NO: 18336 - DNA, 37 bp, Artificial Sequence
  Synthetic oligonucleotide
tctagcggtacccccttgcgtcactctgaatagatga

SEQ ID NO: 18337 - DNA, 36 bp, Artificial Sequence
  Synthetic oligonucleotide
tctgacgagtggagggaatcacttggacttgtggta

SEQ ID NO: 18338 - DNA, 36 bp, Artificial Sequence
  Synthetic oligonucleotide
tcttaacgtgcatagtatgttttaggatcggggcga

SEQ ID NO: 18339 - DNA, 37 bp, Artificial Sequence
  Synthetic oligonucleotide
tgacgtatgggatgataaagacttaacgtgggcccga

SEQ ID NO: 18340 - DNA, 36 bp, Artificial Sequence
  Synthetic oligonucleotide
tgaggtccgatatcaggaatcctggacagcacggca

SEQ ID NO: 18341 - DNA, 35 bp, Artificial Sequence
  Synthetic oligonucleotide
tgatgacatcattgcaaaccccgacttcaaagcgc

SEQ ID NO: 18342 - DNA, 36 bp, Artificial Sequence
  Synthetic oligonucleotide
tgatttggtgctgatatctacgtttgctattgctta

SEQ ID NO: 18343 - DNA, 34 bp, Artificial Sequence
  Synthetic oligonucleotide
tgctgaagggcgacacgcatgactgaatatgatc

SEQ ID NO: 18344 - DNA, 35 bp, Artificial Sequence
  Synthetic oligonucleotide
tggaagtggtcgtaggctcttaccactctaatgtg

SEQ ID NO: 18345 - DNA, 38 bp, Artificial Sequence
  Synthetic oligonucleotide
tggacgagtagacccgcgaactagatttcagagtgtga

SEQ ID NO: 18346 - DNA, 35 bp, Artificial Sequence
  Synthetic oligonucleotide
tgtacaataaaaaatgttggcctgactggctgata

SEQ ID NO: 18347 - DNA, 36 bp, Artificial Sequence
  Synthetic oligonucleotide
tgtacgtccgagcatttaggggatcaggactgtata

SEQ ID NO: 18348 - DNA, 35 bp, Artificial Sequence
  Synthetic oligonucleotide
tgtttggccttctatttgctaaacacctgtcacgt

SEQ ID NO: 18349 - DNA, 37 bp, Artificial Sequence
  Synthetic oligonucleotide
ttaagtggaattaagcaggaatactgagcaaaggcga

SEQ ID NO: 18350 - DNA, 37 bp, Artificial Sequence
  Synthetic oligonucleotide
ttacgcgtgagattatatgacatggcttacggtagga

SEQ ID NO: 18351 - DNA, 38 bp, Artificial Sequence
  Synthetic oligonucleotide
ttcctaggctgactgtgcgtagctgcataacaaggtga

SEQ ID NO: 18352 - DNA, 37 bp, Artificial Sequence
  Synthetic oligonucleotide
ttcgtcgcgggttctcctcgcggtgcagtgcactgga

SEQ ID NO: 18353 - DNA, 36 bp, Artificial Sequence
  Synthetic oligonucleotide
ttgacaaaatcacgctcggatagctcgcaccaatga

SEQ ID NO: 18354 - DNA, 35 bp, Artificial Sequence
  Synthetic oligonucleotide
ttgagacaatgacgttggcgtgaagtcgactatgg

SEQ ID NO: 18355 - DNA, 37 bp, Artificial Sequence
  Synthetic oligonucleotide
ttgcacgttctagaagcttgggtttattcaaagtgga

SEQ ID NO: 18356 - DNA, 38 bp, Artificial Sequence
  Synthetic oligonucleotide
ttgcataacgactccatacgtctctgatcttcgaatga

SEQ ID NO: 18357 - DNA, 35 bp, Artificial Sequence
  Synthetic oligonucleotide
ttgctgaaacacgacggagtagatttctgtggtca

SEQ ID NO: 18358 - DNA, 38 bp, Artificial Sequence
  Synthetic oligonucleotide
ttggtgcgccatccagaggggctagtacctgaacgtga

SEQ ID NO: 18359 - DNA, 36 bp, Artificial Sequence
  Synthetic oligonucleotide
ttgtacgtgtgagattgatgggtacctctgtgccta

SEQ ID NO: 18360 - DNA, 36 bp, Artificial Sequence
  Synthetic oligonucleotide
tttccattcatgcgtgcggatgactggatcgctcaa

SEQ ID NO: 18361 - DNA, 38 bp, Artificial Sequence
  Synthetic oligonucleotide
tttggaatatgccatggcatggttgttcacggatatga

SEQ ID NO: 18362 - DNA, 38 bp, Artificial Sequence
  Synthetic oligonucleotide
tttgtcgaaatgggggctaacaagttatagctttgtga

SEQ ID NO: 18363 - DNA, 37 bp, Artificial Sequence
  Synthetic oligonucleotide
gccgctataggaacgtcaaggtgattaattctcggga

SEQ ID NO: 18364 - DNA, 36 bp, Artificial Sequence
  Synthetic oligonucleotide
acctatccggactaaacgagggtcttgacggaagta

SEQ ID NO: 18365 - DNA, 36 bp, Artificial Sequence
  Synthetic oligonucleotide
gccggagcggcgcagttattttaccattggaagata

SEQ ID NO: 18366 - DNA, 36 bp, Artificial Sequence
  Synthetic oligonucleotide
agcccggaaggtaataggcgctcgttccagcctatc

SEQ ID NO: 18367 - DNA, 36 bp, Artificial Sequence
  Synthetic oligonucleotide
aagtggacccggcaactacactcaatgccaggggaa

SEQ ID NO: 18368 - DNA, 35 bp, Artificial Sequence
  Synthetic oligonucleotide
gagtacggaggttattatacccggtcatatgtgaa

SEQ ID NO: 18369 - DNA, 35 bp, Artificial Sequence
  Synthetic oligonucleotide
gccgtagcttgcacactctcctgtgattcgatgtg

SEQ ID NO: 18370 - DNA, 35 bp, Artificial Sequence
  Synthetic oligonucleotide
gtgcgggccttttgtacgtaatttgatgggcgcta

SEQ ID NO: 18371 - DNA, 36 bp, Artificial Sequence
  Synthetic oligonucleotide
tagttgtcagtcaagatcctaatattctccactcca

SEQ ID NO: 18372 - DNA, 36 bp, Artificial Sequence
  Synthetic oligonucleotide
tatctcggcgatgagcctcgtcagaggcgtatgaga

SEQ ID NO: 18373 - DNA, 35 bp, Artificial Sequence
  Synthetic oligonucleotide
tatgcgtccccgcaaaacacgtgagtacgggcact

SEQ ID NO: 18374 - DNA, 35 bp, Artificial Sequence
  Synthetic oligonucleotide
tcttccaaggccattactgctgagatgcgacctag

SEQ ID NO: 18375 - DNA, 35 bp, Artificial Sequence
  Synthetic oligonucleotide
tgccacaggatgggttttgagcggattccggatga

SEQ ID NO: 18376 - DNA, 36 bp, Artificial Sequence
  Synthetic oligonucleotide
tagaaggcttcggcctgttgtaacgtctgcctggta

SEQ ID NO: 18377 - DNA, 35 bp, Artificial Sequence
  Synthetic oligonucleotide
aaaagcctactcacataaactcgctcaaggcgctc

SEQ ID NO: 18378 - DNA, 35 bp, Artificial Sequence
  Synthetic oligonucleotide
aacaagcgtaactaattatcgacggtacgacccaa

SEQ ID NO: 18379 - DNA, 38 bp, Artificial Sequence
  Synthetic oligonucleotide
aacaccaaaagtggcgtgccccccttcggtaggcatga

SEQ ID NO: 18380 - DNA, 37 bp, Artificial Sequence
  Synthetic oligonucleotide
aacggtataccagcctggtaacacgtcgggtaatcga

SEQ ID NO: 18381 - DNA, 37 bp, Artificial Sequence
  Synthetic oligonucleotide
aagcgaattactagtaatgcgtcgagctgtagacgga

SEQ ID NO: 18382 - DNA, 38 bp, Artificial Sequence
  Synthetic oligonucleotide
acacgaccatccgcctccgtggtgcgtttactgcttga

SEQ ID NO: 18383 - DNA, 35 bp, Artificial Sequence
  Synthetic oligonucleotide
acatgagtacgggtgggaattcgttattaataacg

SEQ ID NO: 18384 - DNA, 37 bp, Artificial Sequence
  Synthetic oligonucleotide
acccatggctactcctaagttctaggtcgttatatga

SEQ ID NO: 18385 - DNA, 37 bp, Artificial Sequence
  Synthetic oligonucleotide
accctgcaagtgggagtagggtggtagacttgtctga

SEQ ID NO: 18386 - DNA, 36 bp, Artificial Sequence
  Synthetic oligonucleotide
acgaaacccatctagtagtctggagggctacgggga

SEQ ID NO: 18387 - DNA, 36 bp, Artificial Sequence
  Synthetic oligonucleotide
acgatccggtgctcgatctgtagccctactcatcga

SEQ ID NO: 18388 - DNA, 38 bp, Artificial Sequence
  Synthetic oligonucleotide
actcaacttgcgtacacccccaaaaggggacgtcatga

SEQ ID NO: 18389 - DNA, 35 bp, Artificial Sequence
  Synthetic oligonucleotide
actcattaatgttcgtactagggttcaactcattc

SEQ ID NO: 18390 - DNA, 37 bp, Artificial Sequence
  Synthetic oligonucleotide
actgaaagcagttagatttcttattcagggatgggga

SEQ ID NO: 18391 - DNA, 38 bp, Artificial Sequence
  Synthetic oligonucleotide
acttggtgttcacgtggttagatccaacgctgtagtga

SEQ ID NO: 18392 - DNA, 36 bp, Artificial Sequence
  Synthetic oligonucleotide
acttgtatgggatctggcacttgaaggtactgtaga

SEQ ID NO: 18393 - DNA, 35 bp, Artificial Sequence
  Synthetic oligonucleotide
agacaacgaggggcaccgcatcacgagcaagttat

SEQ ID NO: 18394 - DNA, 37 bp, Artificial Sequence
  Synthetic oligonucleotide
agacggctgtcgagctctcgcttgcacgagactcgga

SEQ ID NO: 18395 - DNA, 36 bp, Artificial Sequence
  Synthetic oligonucleotide
agagtatgtcgtatgggttctggaatttggaggata

SEQ ID NO: 18396 - DNA, 37 bp, Artificial Sequence
  Synthetic oligonucleotide
agcaagaaggctcacgaggagacgaagcgagcaatga

SEQ ID NO: 18397 - DNA, 38 bp, Artificial Sequence
  Synthetic oligonucleotide
agcccgaagatgtcgggggcaacatcacagtccaaaga

SEQ ID NO: 18398 - DNA, 34 bp, Artificial Sequence
  Synthetic oligonucleotide
agctctgttgacggtacgttaatctctatagcta

SEQ ID NO: 18399 - DNA, 37 bp, Artificial Sequence
  Synthetic oligonucleotide
agcttggggggagttgtgagcctaagacctattttga

SEQ ID NO: 18400 - DNA, 35 bp, Artificial Sequence
  Synthetic oligonucleotide
agtcttgcgcctattgttccatcaatttgggattc

SEQ ID NO: 18401 - DNA, 37 bp, Artificial Sequence
  Synthetic oligonucleotide
agtggtttggccagctcacgagtgctgatgctgggga

SEQ ID NO: 18402 - DNA, 35 bp, Artificial Sequence
  Synthetic oligonucleotide
atagaaccagttagcaagtgcattacatctgctac

SEQ ID NO: 18403 - DNA, 36 bp, Artificial Sequence
  Synthetic oligonucleotide
ataggccaggccgagtcttattgaaggacacccgta

SEQ ID NO: 18404 - DNA, 36 bp, Artificial Sequence
  Synthetic oligonucleotide
atattagcctcggatgcacacgtgttcatgctgcca

SEQ ID NO: 18405 - DNA, 37 bp, Artificial Sequence
  Synthetic oligonucleotide
atcacgtactaattcgatgggtcatttacaccggaga

SEQ ID NO: 18406 - DNA, 37 bp, Artificial Sequence
  Synthetic oligonucleotide
atctgtagcggtgccgaggctggtgtacgatttgcga

SEQ ID NO: 18407 - DNA, 37 bp, Artificial Sequence
  Synthetic oligonucleotide
atcttagttggatgctaacttaggttacagtacgcga

SEQ ID NO: 18408 - DNA, 38 bp, Artificial Sequence
  Synthetic oligonucleotide
atggtacggttcgggaggaaagttaaagaccggactga

SEQ ID NO: 18409 - DNA, 35 bp, Artificial Sequence
  Synthetic oligonucleotide
cacatgagggtgatgggctccttaatcctaagttg

SEQ ID NO: 18410 - DNA, 36 bp, Artificial Sequence
  Synthetic oligonucleotide
catccagtcaatcttgtgtgtatcccggggggtgaa

SEQ ID NO: 18411 - DNA, 35 bp, Artificial Sequence
  Synthetic oligonucleotide
ccaaacgagtggccccagaatagaagtcatgtgaa

SEQ ID NO: 18412 - DNA, 36 bp, Artificial Sequence
  Synthetic oligonucleotide
cccgttatgggaccggtcgacaattttaaggtgtga

SEQ ID NO: 18413 - DNA, 36 bp, Artificial Sequence
  Synthetic oligonucleotide
ccctcatgagtaacggctgagggagacgcaatcaga

SEQ ID NO: 18414 - DNA, 37 bp, Artificial Sequence
  Synthetic oligonucleotide
cccttcggacctcaatatatgatgcagtcttccgcga

SEQ ID NO: 18415 - DNA, 38 bp, Artificial Sequence
  Synthetic oligonucleotide
cctcctgccaggcgaacgcagaatacggctctcgatga

SEQ ID NO: 18416 - DNA, 36 bp, Artificial Sequence
  Synthetic oligonucleotide
cgtgtggggggctcggagacgctcgccagcgacgta

SEQ ID NO: 18417 - DNA, 35 bp, Artificial Sequence
  Synthetic oligonucleotide
ctttgagcaaactggttctgtcattaattgagtgg

SEQ ID NO: 18418 - DNA, 36 bp, Artificial Sequence
  Synthetic oligonucleotide
gaaaccagggaggatacccccgccttccgtttgaga

SEQ ID NO: 18419 - DNA, 37 bp, Artificial Sequence
  Synthetic oligonucleotide
gaaagcaacgtgcaaatcggctttcactccaatgcga

SEQ ID NO: 18420 - DNA, 37 bp, Artificial Sequence
  Synthetic oligonucleotide
gactacaacggacttgacgcgtgggtgttgttacaga

SEQ ID NO: 18421 - DNA, 37 bp, Artificial Sequence
  Synthetic oligonucleotide
gagcacaaaactgcaattgccgccacgagcttggaga

SEQ ID NO: 18422 - DNA, 38 bp, Artificial Sequence
  Synthetic oligonucleotide
gagccgtactgcgagatgtcggattgcgggaggcctga

SEQ ID NO: 18423 - DNA, 35 bp, Artificial Sequence
  Synthetic oligonucleotide
gaggtttagcctcttgaattttcgattaggtgtgt

SEQ ID NO: 18424 - DNA, 37 bp, Artificial Sequence
  Synthetic oligonucleotide
gagttcggtaaatccgttgtgcttaagcgacttacga

SEQ ID NO: 18425 - DNA, 38 bp, Artificial Sequence
  Synthetic oligonucleotide
gatgaccctagaggcaactagttatggacgatgcgtga

SEQ ID NO: 18426 - DNA, 35 bp, Artificial Sequence
  Synthetic oligonucleotide
gattcttccagcaaggaattacctcattcactggg

SEQ ID NO: 18427 - DNA, 37 bp, Artificial Sequence
  Synthetic oligonucleotide
gcaagaatcgcgatcaagaccggacgtctaccaggga

SEQ ID NO: 18428 - DNA, 37 bp, Artificial Sequence
  Synthetic oligonucleotide
gcacagggctgtcgaaagggcatgggggtactcttga

SEQ ID NO: 18429 - DNA, 35 bp, Artificial Sequence
  Synthetic oligonucleotide
gcagtccacgcaggctttcctgagagaccttagcc

SEQ ID NO: 18430 - DNA, 35 bp, Artificial Sequence
  Synthetic oligonucleotide
gccctgggaccagcactgcaagagtgcggctaccg

SEQ ID NO: 18431 - DNA, 38 bp, Artificial Sequence
  Synthetic oligonucleotide
gccgctaatcattacaggtaacacgtttgttggagtga

SEQ ID NO: 18432 - DNA, 36 bp, Artificial Sequence
  Synthetic oligonucleotide
gcctaatatccgagatgtagctggttattagcgata

SEQ ID NO: 18433 - DNA, 38 bp, Artificial Sequence
  Synthetic oligonucleotide
gcctggtggggcaccttgcgccgggactttaaggatga

SEQ ID NO: 18434 - DNA, 36 bp, Artificial Sequence
  Synthetic oligonucleotide
gcgcaaagccatacatcggcgcctgcgctgcaatga

SEQ ID NO: 18435 - DNA, 37 bp, Artificial Sequence
  Synthetic oligonucleotide
gctaagttcctgaggaaatgcggtccagaatagacga

SEQ ID NO: 18436 - DNA, 35 bp, Artificial Sequence
  Synthetic oligonucleotide
gctacccgtaaccgtcaagggagcactgtgctaag

SEQ ID NO: 18437 - DNA, 36 bp, Artificial Sequence
  Synthetic oligonucleotide
gctatggtacccggggcctagtgagacggaaaacga

SEQ ID NO: 18438 - DNA, 38 bp, Artificial Sequence
  Synthetic oligonucleotide
gctgctgtcgtgatggcgctaatctaacatactgctga

SEQ ID NO: 18439 - DNA, 37 bp, Artificial Sequence
  Synthetic oligonucleotide
gctggtcaatctagtaccgagatacggttccttgaga

SEQ ID NO: 18440 - DNA, 34 bp, Artificial Sequence
  Synthetic oligonucleotide
ggagaccccaatggaggaggtacctcatgcgacc

SEQ ID NO: 18441 - DNA, 35 bp, Artificial Sequence
  Synthetic oligonucleotide
ggagtgtacggtaaaagtgtatggattactatgta

SEQ ID NO: 18442 - DNA, 37 bp, Artificial Sequence
  Synthetic oligonucleotide
ggatacgacccgggcaaagcctagtcaccgtaggaga

SEQ ID NO: 18443 - DNA, 36 bp, Artificial Sequence
  Synthetic oligonucleotide
ggatgaactctgggttcgggggaacaaagtgttcga

SEQ ID NO: 18444 - DNA, 36 bp, Artificial Sequence
  Synthetic oligonucleotide
ggctcaagcctcggttactgatttcatccgatttta

SEQ ID NO: 18445 - DNA, 35 bp, Artificial Sequence
  Synthetic oligonucleotide
gggattctgtgaggcatgtgggccgaggaactacc

SEQ ID NO: 18446 - DNA, 35 bp, Artificial Sequence
  Synthetic oligonucleotide
gggctacactgtattatcaagtacgcgactcttta

SEQ ID NO: 18447 - DNA, 38 bp, Artificial Sequence
  Synthetic oligonucleotide
ggggacaaagcgggtaagagttttttcgtctattctga

SEQ ID NO: 18448 - DNA, 36 bp, Artificial Sequence
  Synthetic oligonucleotide
gggtgggagtgtgaatggtacgatatctgagtcgca

SEQ ID NO: 18449 - DNA, 37 bp, Artificial Sequence
  Synthetic oligonucleotide
gggttacgcagaagacgattacagtgggatggggtga

SEQ ID NO: 18450 - DNA, 38 bp, Artificial Sequence
  Synthetic oligonucleotide
ggtcgtaagggcataattctagaagcttcttccgatga

SEQ ID NO: 18451 - DNA, 36 bp, Artificial Sequence
  Synthetic oligonucleotide
ggtgttcgggtgtaacactgcacgggattctggcga

SEQ ID NO: 18452 - DNA, 35 bp, Artificial Sequence
  Synthetic oligonucleotide
ggttttaccacggtctactcatacgttgaatttgc

SEQ ID NO: 18453 - DNA, 36 bp, Artificial Sequence
  Synthetic oligonucleotide
gtatggacacgattaggggcggctacaaacatgcaa

SEQ ID NO: 18454 - DNA, 36 bp, Artificial Sequence
  Synthetic oligonucleotide
gtattgcaatcaaccggtgtagacttttgtatgatc

SEQ ID NO: 18455 - DNA, 36 bp, Artificial Sequence
  Synthetic oligonucleotide
gtcaagtgctatggtgcgctgactccaagacgcgca

SEQ ID NO: 18456 - DNA, 37 bp, Artificial Sequence
  Synthetic oligonucleotide
gtcaatgtgactaagtgcacccctggaattagtttga

SEQ ID NO: 18457 - DNA, 35 bp, Artificial Sequence
  Synthetic oligonucleotide
gtcccgggcgccaagggataccggcacagggtggt

SEQ ID NO: 18458 - DNA, 35 bp, Artificial Sequence
  Synthetic oligonucleotide
gtctagtatgccctgacgtctcccctgaaaccgga

SEQ ID NO: 18459 - DNA, 37 bp, Artificial Sequence
  Synthetic oligonucleotide
gtggatacaggatgtataaggcgtggtttgaatacga

SEQ ID NO: 18460 - DNA, 35 bp, Artificial Sequence
  Synthetic oligonucleotide
gtgtactatacgtggcttcggattctaactagtta

SEQ ID NO: 18461 - DNA, 36 bp, Artificial Sequence
  Synthetic oligonucleotide
gtgtcgttagcatggctacgaaacgagttatacgta

SEQ ID NO: 18462 - DNA, 36 bp, Artificial Sequence
  Synthetic oligonucleotide
gtgtgttaacgttattagtaatggtctcgccaagga

SEQ ID NO: 18463 - DNA, 35 bp, Artificial Sequence
  Synthetic oligonucleotide
gttatattacgtgtaagcaccatcgtcgttagaac

SEQ ID NO: 18464 - DNA, 38 bp, Artificial Sequence
  Synthetic oligonucleotide
gttcaacaggttccatacaaaaagggatccgtcaatga

SEQ ID NO: 18465 - DNA, 38 bp, Artificial Sequence
  Synthetic oligonucleotide
gttttgacaatggactatcagttgcacccacgtattga

SEQ ID NO: 18466 - DNA, 38 bp, Artificial Sequence
  Synthetic oligonucleotide
taacgcgatgcagaggcttgtaggtgggaccgggttga

SEQ ID NO: 18467 - DNA, 35 bp, Artificial Sequence
  Synthetic oligonucleotide
taccccaaagctgtcaacgttgtagtcgactcccc

SEQ ID NO: 18468 - DNA, 37 bp, Artificial Sequence
  Synthetic oligonucleotide
tactgttctcgaggagtggtaggaagacccgacaaga

SEQ ID NO: 18469 - DNA, 37 bp, Artificial Sequence
  Synthetic oligonucleotide
tacttagtaaggtcgtccgtgctcgaacgcgtatcga

SEQ ID NO: 18470 - DNA, 35 bp, Artificial Sequence
  Synthetic oligonucleotide
taggtctacctgagcaaagtggtgggtagtagggc

SEQ ID NO: 18471 - DNA, 37 bp, Artificial Sequence
  Synthetic oligonucleotide
tatacagcaccgatcttcctagaggatgggatcaaga

SEQ ID NO: 18472 - DNA, 36 bp, Artificial Sequence
  Synthetic oligonucleotide
tcaccgtggaatgtaaaatgtacacgcagaccataa

SEQ ID NO: 18473 - DNA, 35 bp, Artificial Sequence
  Synthetic oligonucleotide
tcactgggcatgtccgttcccccgtgtcggtatga

SEQ ID NO: 18474 - DNA, 36 bp, Artificial Sequence
  Synthetic oligonucleotide
tcagaccaccgccccgggcccctcagaggtggacaa

SEQ ID NO: 18475 - DNA, 37 bp, Artificial Sequence
  Synthetic oligonucleotide
tcaggctggcactgcgtaaaacgtcaggcatcagaga

SEQ ID NO: 18476 - DNA, 36 bp, Artificial Sequence
  Synthetic oligonucleotide
tcccaagttgacgcacgcgtacgccccgaaaagcaa

SEQ ID NO: 18477 - DNA, 37 bp, Artificial Sequence
  Synthetic oligonucleotide
tccgaccggtcattgaaggatcgtgtgagcccgcgga

SEQ ID NO: 18478 - DNA, 38 bp, Artificial Sequence
  Synthetic oligonucleotide
tccgcattggcgagttgcgcgctgcagtggcgcaatga

SEQ ID NO: 18479 - DNA, 35 bp, Artificial Sequence
  Synthetic oligonucleotide
tctgcgggaggttgacgtgggagagtctgttggca

SEQ ID NO: 18480 - DNA, 36 bp, Artificial Sequence
  Synthetic oligonucleotide
tctggttgtcgcggcccgttctacacggacaatcca

SEQ ID NO: 18481 - DNA, 35 bp, Artificial Sequence
  Synthetic oligonucleotide
tgaaaaacgactgaacatttgtaggtcatttgcga

SEQ ID NO: 18482 - DNA, 35 bp, Artificial Sequence
  Synthetic oligonucleotide
tgacagttcggtatccgttctcgagatactaagcc

SEQ ID NO: 18483 - DNA, 35 bp, Artificial Sequence
  Synthetic oligonucleotide
tgacgtagcgggcgagttgttcaaactgatgctgg

SEQ ID NO: 18484 - DNA, 35 bp, Artificial Sequence
  Synthetic oligonucleotide
tgcatcaattgggctcctcgagatcgcctgatctc

SEQ ID NO: 18485 - DNA, 36 bp, Artificial Sequence
  Synthetic oligonucleotide
tgggagctattcggatgtgtcagatagccgtcgata

SEQ ID NO: 18486 - DNA, 37 bp, Artificial Sequence
  Synthetic oligonucleotide
tgtaactagtcactggcatctatggaccttgcggaga

SEQ ID NO: 18487 - DNA, 35 bp, Artificial Sequence
  Synthetic oligonucleotide
tgttgggcatatatactggttggcttattcgctat

SEQ ID NO: 18488 - DNA, 36 bp, Artificial Sequence
  Synthetic oligonucleotide
ttaggcaggtaggttaccctatacatgctaaaaata

SEQ ID NO: 18489 - DNA, 36 bp, Artificial Sequence
  Synthetic oligonucleotide
ttatggggacagatggggcgtgtgcctgtttgtaaa

SEQ ID NO: 18490 - DNA, 35 bp, Artificial Sequence
  Synthetic oligonucleotide
ttcaactctgggagcctggttaacgtatggctact

SEQ ID NO: 18491 - DNA, 35 bp, Artificial Sequence
  Synthetic oligonucleotide
ttcatctacgcttccgtagggcaagaccggtcggt

SEQ ID NO: 18492 - DNA, 35 bp, Artificial Sequence
  Synthetic oligonucleotide
ttcattccaatcaggcactgcgctggatatgcgtg

SEQ ID NO: 18493 - DNA, 37 bp, Artificial Sequence
  Synthetic oligonucleotide
ttgagaacaaacaccgaaatggactgctagtcgttga

SEQ ID NO: 18494 - DNA, 37 bp, Artificial Sequence
  Synthetic oligonucleotide
tttaaggtggatcacttgtagcagtcataaggggtga

SEQ ID NO: 18495 - DNA, 35 bp, Artificial Sequence
  Synthetic oligonucleotide
tttcagagtaccaatgaccgtgttaatctagttac

SEQ ID NO: 18496 - DNA, 36 bp, Artificial Sequence
  Synthetic oligonucleotide
tttcatcacatgcccattatttgggaccgctgaaca

SEQ ID NO: 18497 - DNA, 35 bp, Artificial Sequence
  Synthetic oligonucleotide
tttggacctgcgacgccgccaaatcgccggggggt

SEQ ID NO: 18498 - DNA, 36 bp, Artificial Sequence
  Synthetic oligonucleotide
gaggtacagctctgagacggattaatggcgcatcta

SEQ ID NO: 18499 - DNA, 36 bp, Artificial Sequence
  Synthetic oligonucleotide
tacagaactgtaatgaatcctgatcttggctcatga

SEQ ID NO: 18500 - DNA, 36 bp, Artificial Sequence
  Synthetic oligonucleotide
acatagcgagcttgtacttagccttactaatacata

SEQ ID NO: 18501 - DNA, 36 bp, Artificial Sequence
  Synthetic oligonucleotide
acccgatgtggtactcctcgagtgaagttggtgtga

SEQ ID NO: 18502 - DNA, 35 bp, Artificial Sequence
  Synthetic oligonucleotide
agttcaagggaaaggagcagttgcgcgtgggattt

SEQ ID NO: 18503 - DNA, 35 bp, Artificial Sequence
  Synthetic oligonucleotide
ggacggtctagacaattttcccatagctaagcggg

SEQ ID NO: 18504 - DNA, 35 bp, Artificial Sequence
  Synthetic oligonucleotide
tagacaccttgaagcagtcccccgggtcaaactcc

SEQ ID NO: 18505 - DNA, 37 bp, Artificial Sequence
  Synthetic oligonucleotide
tatattccccgtacgctagtggtggtcctaggcgaga

SEQ ID NO: 18506 - DNA, 35 bp, Artificial Sequence
  Synthetic oligonucleotide
tctcactcgccgttcgaatgtctgtaggcgggtgg

SEQ ID NO: 18507 - DNA, 36 bp, Artificial Sequence
  Synthetic oligonucleotide
ttaaaggcaattaatgtactgcgtagactacaccga

SEQ ID NO: 18508 - DNA, 38 bp, Artificial Sequence
  Synthetic oligonucleotide
tgattaccggtaaattacgttattagtactgtaagtga

SEQ ID NO: 18509 - DNA, 37 bp, Artificial Sequence
  Synthetic oligonucleotide
agtatctgcaggagatacatggtctcaccataaaaga

SEQ ID NO: 18510 - DNA, 38 bp, Artificial Sequence
  Synthetic oligonucleotide
gaatgttcgcacacgcagatatattcaagtgtctttga

SEQ ID NO: 18511 - DNA, 38 bp, Artificial Sequence
  Synthetic oligonucleotide
gagtttgtcactctattcgtactacagacgcgccctga

SEQ ID NO: 18512 - DNA, 35 bp, Artificial Sequence
  Synthetic oligonucleotide
gtgccaaccacaggtagtagtctatgtctcctggt

SEQ ID NO: 18513 - DNA, 36 bp, Artificial Sequence
  Synthetic oligonucleotide
gtgtgacgtactggggtcttccatggttaaaggcaa

SEQ ID NO: 18514 - DNA, 37 bp, Artificial Sequence
  Synthetic oligonucleotide
tctatcgtgtgttgctaggccataatggtcgatgaga

SEQ ID NO: 18515 - DNA, 37 bp, Artificial Sequence
  Synthetic oligonucleotide
tgtaaaacttggagcgaactcagctggttcacacgga

SEQ ID NO: 18516 - DNA, 37 bp, Artificial Sequence
  Synthetic oligonucleotide
ttaaacggaatcgagcttgctgtggaacaattgtaga

SEQ ID NO: 18517 - DNA, 37 bp, Artificial Sequence
  Synthetic oligonucleotide
tttgagatcactacgcggtagtccagagggacataga

SEQ ID NO: 18518 - DNA, 37 bp, Artificial Sequence
  Synthetic oligonucleotide
aatcccccaggggttccggtttgcatgtcgcgtgcga

SEQ ID NO: 18519 - DNA, 38 bp, Artificial Sequence
  Synthetic oligonucleotide
acactaccgagagtattggtatagtctcgtcatcatga

SEQ ID NO: 18520 - DNA, 36 bp, Artificial Sequence
  Synthetic oligonucleotide
acagcattgtcgcgcaactctaagggacccttgtaa

SEQ ID NO: 18521 - DNA, 35 bp, Artificial Sequence
  Synthetic oligonucleotide
accagcggagcaaactctattttgcgccgagattc

SEQ ID NO: 18522 - DNA, 36 bp, Artificial Sequence
  Synthetic oligonucleotide
accgatacctaaggggcgctagcaaagcaggcctaa

SEQ ID NO: 18523 - DNA, 38 bp, Artificial Sequence
  Synthetic oligonucleotide
acgacatgattagcatatcagacgacgtaaagcggtga

SEQ ID NO: 18524 - DNA, 35 bp, Artificial Sequence
  Synthetic oligonucleotide
acgtcaaccggtaggtgcgtgaggtacgaaaactg

SEQ ID NO: 18525 - DNA, 38 bp, Artificial Sequence
  Synthetic oligonucleotide
actgccagtatgcggtaatagattcggaagttttgtga

SEQ ID NO: 18526 - DNA, 37 bp, Artificial Sequence
  Synthetic oligonucleotide
actggataggacgggtttccactcttgcgaatcggga

SEQ ID NO: 18527 - DNA, 37 bp, Artificial Sequence
  Synthetic oligonucleotide
acttacggtggtccgtactggggataaacctggtgga

SEQ ID NO: 18528 - DNA, 36 bp, Artificial Sequence
  Synthetic oligonucleotide
agaggcggatttcaggttggtaggcatatcctttaa

SEQ ID NO: 18529 - DNA, 35 bp, Artificial Sequence
  Synthetic oligonucleotide
agcacactaataatgctcagatcagctcctgagat

SEQ ID NO: 18530 - DNA, 35 bp, Artificial Sequence
  Synthetic oligonucleotide
agcggggcgcctgactgctatcaagtatacaaagt

SEQ ID NO: 18531 - DNA, 35 bp, Artificial Sequence
  Synthetic oligonucleotide
agcgtacctgggaaggggcaattgtagcaacgggg

SEQ ID NO: 18532 - DNA, 36 bp, Artificial Sequence
  Synthetic oligonucleotide
aggtactagcgaagcggggaatcatacatacggaga

SEQ ID NO: 18533 - DNA, 38 bp, Artificial Sequence
  Synthetic oligonucleotide
agtggtgtttcaagaaacgtatcatatgggtcctgtga

SEQ ID NO: 18534 - DNA, 35 bp, Artificial Sequence
  Synthetic oligonucleotide
agttaacagacaatagtcgattcaaatagcgcctc

SEQ ID NO: 18535 - DNA, 37 bp, Artificial Sequence
  Synthetic oligonucleotide
atacgttactgtgtcagccatatgaagatgaatacga

SEQ ID NO: 18536 - DNA, 36 bp, Artificial Sequence
  Synthetic oligonucleotide
atatcaaggagtccagaaagatgggccgtgtaataa

SEQ ID NO: 18537 - DNA, 37 bp, Artificial Sequence
  Synthetic oligonucleotide
atatcggacttgcggtttaacaaggatcaaattgcga

SEQ ID NO: 18538 - DNA, 35 bp, Artificial Sequence
  Synthetic oligonucleotide
atccggtgtcctattctaaaggctggaccactatg

SEQ ID NO: 18539 - DNA, 37 bp, Artificial Sequence
  Synthetic oligonucleotide
atcgccttctgacagagtgggacgttgatgccgccga

SEQ ID NO: 18540 - DNA, 35 bp, Artificial Sequence
  Synthetic oligonucleotide
atgaacgctttgcggaaatatagtgactttagctt

SEQ ID NO: 18541 - DNA, 36 bp, Artificial Sequence
  Synthetic oligonucleotide
atgaatgctggttgaccgaggcggatgatctaaata

SEQ ID NO: 18542 - DNA, 38 bp, Artificial Sequence
  Synthetic oligonucleotide
atgaggcactaaaatcagaggctagggaatagggttga

SEQ ID NO: 18543 - DNA, 37 bp, Artificial Sequence
  Synthetic oligonucleotide
atgagtcagttcaggtccattgactcgccatgcgaga

SEQ ID NO: 18544 - DNA, 36 bp, Artificial Sequence
  Synthetic oligonucleotide
atgatggactggcggacgttatacatgcggtcacga

SEQ ID NO: 18545 - DNA, 38 bp, Artificial Sequence
  Synthetic oligonucleotide
atgcagtcacgttgtatgatacatgtaacctagtctga

SEQ ID NO: 18546 - DNA, 35 bp, Artificial Sequence
  Synthetic oligonucleotide
caatattctcgggaccatgtgtgcgattctatatg

SEQ ID NO: 18547 - DNA, 35 bp, Artificial Sequence
  Synthetic oligonucleotide
ccagatctacagtgtgccccgctcccaagaacgat

SEQ ID NO: 18548 - DNA, 35 bp, Artificial Sequence
  Synthetic oligonucleotide
ccgaataggctttgttgcaggctctaattcacgcc

SEQ ID NO: 18549 - DNA, 35 bp, Artificial Sequence
  Synthetic oligonucleotide
cgggggcacggaccatcgaggttgtgccctcggta

SEQ ID NO: 18550 - DNA, 37 bp, Artificial Sequence
  Synthetic oligonucleotide
ctgcgcgggttagcccgctactcgcttgaattacgga

SEQ ID NO: 18551 - DNA, 37 bp, Artificial Sequence
  Synthetic oligonucleotide
gaaagatccaatgaacgtactgggggcattaagtaga

SEQ ID NO: 18552 - DNA, 35 bp, Artificial Sequence
  Synthetic oligonucleotide
gaaccaaatggacaaaggagtagaccacgctcttg

SEQ ID NO: 18553 - DNA, 36 bp, Artificial Sequence
  Synthetic oligonucleotide
gaagctgagcataccaccgtgcgctatcggatcaaa

SEQ ID NO: 18554 - DNA, 36 bp, Artificial Sequence
  Synthetic oligonucleotide
gaaggaccgaggattttgtaaaagtggtcgaacgta

SEQ ID NO: 18555 - DNA, 37 bp, Artificial Sequence
  Synthetic oligonucleotide
gaataggtcttgcgtgttgatttctatagttattgga

SEQ ID NO: 18556 - DNA, 37 bp, Artificial Sequence
  Synthetic oligonucleotide
gaattgatatgggcctaacgattcggtcgcttgggga

SEQ ID NO: 18557 - DNA, 32 bp, Artificial Sequence
  Synthetic oligonucleotide
gacccggatcatggttttcccgcgtctaagca

SEQ ID NO: 18558 - DNA, 37 bp, Artificial Sequence
  Synthetic oligonucleotide
gacctgggggggaaaaacatatatatgtcatcacgga

SEQ ID NO: 18559 - DNA, 35 bp, Artificial Sequence
  Synthetic oligonucleotide
gagtggaagcaccatcctacgttcccttgagcgcg

SEQ ID NO: 18560 - DNA, 36 bp, Artificial Sequence
  Synthetic oligonucleotide
gatgtaagggcataagaaacaatccgattcgtagta

SEQ ID NO: 18561 - DNA, 35 bp, Artificial Sequence
  Synthetic oligonucleotide
gattatattgggagacaacgatgggggtaacggat

SEQ ID NO: 18562 - DNA, 38 bp, Artificial Sequence
  Synthetic oligonucleotide
gcacagtcagacgttaatgggatcgagtggacggatga

SEQ ID NO: 18563 - DNA, 36 bp, Artificial Sequence
  Synthetic oligonucleotide
gccatcagagaggtggtgttaattacaggatgttga

SEQ ID NO: 18564 - DNA, 36 bp, Artificial Sequence
  Synthetic oligonucleotide
gcccattactgtctatcgaagtcgtatagctagtta

SEQ ID NO: 18565 - DNA, 37 bp, Artificial Sequence
  Synthetic oligonucleotide
gccctatttgatttcattcacgaaagataaagatcga

SEQ ID NO: 18566 - DNA, 37 bp, Artificial Sequence
  Synthetic oligonucleotide
gcctatgtatagaacgagctcagtccggtactacgga

SEQ ID NO: 18567 - DNA, 36 bp, Artificial Sequence
  Synthetic oligonucleotide
gcgcgccgtaggcgaaaatattctctgtggggcaca

SEQ ID NO: 18568 - DNA, 36 bp, Artificial Sequence
  Synthetic oligonucleotide
gcgttggctcaagtccgcttaaggaacaggcaagga

SEQ ID NO: 18569 - DNA, 35 bp, Artificial Sequence
  Synthetic oligonucleotide
ggaccttagtcatcaggcctgacaagcattttgct

SEQ ID NO: 18570 - DNA, 36 bp, Artificial Sequence
  Synthetic oligonucleotide
ggccaattatttcatcgagaaacaggttcaggttaa

SEQ ID NO: 18571 - DNA, 36 bp, Artificial Sequence
  Synthetic oligonucleotide
gggtcatcacagtctcccattgtctatgatgcgtca

SEQ ID NO: 18572 - DNA, 34 bp, Artificial Sequence
  Synthetic oligonucleotide
ggttctaaacgagcgtgaggacgcacttgcgctt

SEQ ID NO: 18573 - DNA, 36 bp, Artificial Sequence
  Synthetic oligonucleotide
ggtttgagcaaatcaagatcgcacagtgggatgcta

SEQ ID NO: 18574 - DNA, 35 bp, Artificial Sequence
  Synthetic oligonucleotide
gtaacatgctctgaattttcctggaggttgaccaa

SEQ ID NO: 18575 - DNA, 35 bp, Artificial Sequence
  Synthetic oligonucleotide
gtaacggggccatacgggaaagggtaacagccctc

SEQ ID NO: 18576 - DNA, 35 bp, Artificial Sequence
  Synthetic oligonucleotide
gtcaggcatagctatgctggttcctttcttgctgt

SEQ ID NO: 18577 - DNA, 38 bp, Artificial Sequence
  Synthetic oligonucleotide
gtcattcaaagggtacgtactgtgttaagaccagatga

SEQ ID NO: 18578 - DNA, 36 bp, Artificial Sequence
  Synthetic oligonucleotide
gtctcgcgatcttttcggtaatagaagtagcttcta

SEQ ID NO: 18579 - DNA, 37 bp, Artificial Sequence
  Synthetic oligonucleotide
gtgcactaatcttggaaggttaacccatgttctgtga

SEQ ID NO: 18580 - DNA, 37 bp, Artificial Sequence
  Synthetic oligonucleotide
gtgccgggcatacgtaaagtacttggtcgtcaaatga

SEQ ID NO: 18581 - DNA, 37 bp, Artificial Sequence
  Synthetic oligonucleotide
gtggtctacactgactcagttgccattcaacggggga

SEQ ID NO: 18582 - DNA, 36 bp, Artificial Sequence
  Synthetic oligonucleotide
gtgtccacgaataagtggatacgcaatcttggagga

SEQ ID NO: 18583 - DNA, 35 bp, Artificial Sequence
  Synthetic oligonucleotide
gttggggggtagtttactggtgctcacggatgggg

SEQ ID NO: 18584 - DNA, 35 bp, Artificial Sequence
  Synthetic oligonucleotide
gttgggggtgccgtgtgaggtcgaccccttcttgg

SEQ ID NO: 18585 - DNA, 35 bp, Artificial Sequence
  Synthetic oligonucleotide
gtttcgaaccgtgtaggttgcgtggttttactggc

SEQ ID NO: 18586 - DNA, 35 bp, Artificial Sequence
  Synthetic oligonucleotide
gtttgttagtcaaggctcggggaggtgaataaagt

SEQ ID NO: 18587 - DNA, 38 bp, Artificial Sequence
  Synthetic oligonucleotide
tacatgttccgcgggcgttgggccttcgaagggactga

SEQ ID NO: 18588 - DNA, 36 bp, Artificial Sequence
  Synthetic oligonucleotide
tacgaggggacacacatgcattcgtcgtagatacaa

SEQ ID NO: 18589 - DNA, 36 bp, Artificial Sequence
  Synthetic oligonucleotide
tacgccgcccacgaggggtattcgctgcaggtttga

SEQ ID NO: 18590 - DNA, 37 bp, Artificial Sequence
  Synthetic oligonucleotide
tacgcgggcgcttaggtactggctgggaggcttggga

SEQ ID NO: 18591 - DNA, 37 bp, Artificial Sequence
  Synthetic oligonucleotide
taggatgctcccgacgaagtaacccataacgctgcga

SEQ ID NO: 18592 - DNA, 38 bp, Artificial Sequence
  Synthetic oligonucleotide
tagtggctcgctaactggtgtactaacacatgtagtga

SEQ ID NO: 18593 - DNA, 36 bp, Artificial Sequence
  Synthetic oligonucleotide
tatagccaaagaagcaaggttggtacaggtcgtagg

SEQ ID NO: 18594 - DNA, 37 bp, Artificial Sequence
  Synthetic oligonucleotide
tgaaagctgtcagggaagttacgtcgttgctggtaga

SEQ ID NO: 18595 - DNA, 36 bp, Artificial Sequence
  Synthetic oligonucleotide
tgatcgctaatttgtcatgcggaattctataacaga

SEQ ID NO: 18596 - DNA, 36 bp, Artificial Sequence
  Synthetic oligonucleotide
tgcatatcagtgaatatgtaaagtgaccgcagaaca

SEQ ID NO: 18597 - DNA, 36 bp, Artificial Sequence
  Synthetic oligonucleotide
tgccagcaacctcgggagcgcaagagcaaaaaacga

SEQ ID NO: 18598 - DNA, 35 bp, Artificial Sequence
  Synthetic oligonucleotide
tggagtccagtgcacaagtagtaaccggcttctta

SEQ ID NO: 18599 - DNA, 38 bp, Artificial Sequence
  Synthetic oligonucleotide
tggtggtgccgctgtactgccccccttaggaggtctga

SEQ ID NO: 18600 - DNA, 38 bp, Artificial Sequence
  Synthetic oligonucleotide
tgtcctgccgtggcgcacgggtggcacctgcgtaatga

SEQ ID NO: 18601 - DNA, 35 bp, Artificial Sequence
  Synthetic oligonucleotide
tgttcctaacgggaaacggcgctcaatcgttgtag

SEQ ID NO: 18602 - DNA, 38 bp, Artificial Sequence
  Synthetic oligonucleotide
ttagttcagcgatgattgttggagccttttacccgtga

SEQ ID NO: 18603 - DNA, 37 bp, Artificial Sequence
  Synthetic oligonucleotide
ttcgttggctgaaaatcctttgtaggtagtagtggga

SEQ ID NO: 18604 - DNA, 37 bp, Artificial Sequence
  Synthetic oligonucleotide
ttgtagtaaggggtggcattgtaaaatatggcttgga

SEQ ID NO: 18605 - DNA, 35 bp, Artificial Sequence
  Synthetic oligonucleotide
gttgttcggaatgttgattatgtgactaattccgg

SEQ ID NO: 18606 - DNA, 35 bp, Artificial Sequence
  Synthetic oligonucleotide
gctagtctcccggtgtcggtatacttcccgcaatg

SEQ ID NO: 18607 - DNA, 38 bp, Artificial Sequence
  Synthetic oligonucleotide
aaaatcgtataactgctataggaggtgacgacccttga

SEQ ID NO: 18608 - DNA, 36 bp, Artificial Sequence
  Synthetic oligonucleotide
gtcacgtcaagcggaagttgagacgacggggtccaa

SEQ ID NO: 18609 - DNA, 37 bp, Artificial Sequence
  Synthetic oligonucleotide
ttatgccgcggtaggcacccgtgtacggattccctga

SEQ ID NO: 18610 - DNA, 37 bp, Artificial Sequence
  Synthetic oligonucleotide
agagcttaggttgaaagattaaccggcgcacgttgga

SEQ ID NO: 18611 - DNA, 35 bp, Artificial Sequence
  Synthetic oligonucleotide
agcaagcacctctggggcgagctataagactttgt

SEQ ID NO: 18612 - DNA, 35 bp, Artificial Sequence
  Synthetic oligonucleotide
agtagaccggcgttcacagaacgctactttggcct

SEQ ID NO: 18613 - DNA, 37 bp, Artificial Sequence
  Synthetic oligonucleotide
atgtcacgcatatttgataatgtctggatttcgccga

SEQ ID NO: 18614 - DNA, 37 bp, Artificial Sequence
  Synthetic oligonucleotide
gtaggtgacaagggtatggtacacgtgctggatatga

SEQ ID NO: 18615 - DNA, 36 bp, Artificial Sequence
  Synthetic oligonucleotide
gtcccgcaaggataggagtggtcagacaggctcgta

SEQ ID NO: 18616 - DNA, 36 bp, Artificial Sequence
  Synthetic oligonucleotide
tacgcacgactacttgtgtgttgttcaagtggcaaa

SEQ ID NO: 18617 - DNA, 35 bp, Artificial Sequence
  Synthetic oligonucleotide
tagtcgaattcgatgtggttgtctctgcacctgca

SEQ ID NO: 18618 - DNA, 38 bp, Artificial Sequence
  Synthetic oligonucleotide
tcaccgcattcgactgtgacttgctgcattgtttgtga

SEQ ID NO: 18619 - DNA, 37 bp, Artificial Sequence
  Synthetic oligonucleotide
ccctcttactggaagaagttcacgggaagaggggcga

SEQ ID NO: 18620 - DNA, 35 bp, Artificial Sequence
  Synthetic oligonucleotide
ggacgtttgatagtctcagacatccaagcacgggg

SEQ ID NO: 18621 - DNA, 37 bp, Artificial Sequence
  Synthetic oligonucleotide
aaacataggtggtgccccgttaagggtagatggggga

SEQ ID NO: 18622 - DNA, 35 bp, Artificial Sequence
  Synthetic oligonucleotide
aacggtccaacgtacaatcgagagcttgcgcaatc

SEQ ID NO: 18623 - DNA, 37 bp, Artificial Sequence
  Synthetic oligonucleotide
acaggtatgagcatccaattaatctaggtttgttcga

SEQ ID NO: 18624 - DNA, 35 bp, Artificial Sequence
  Synthetic oligonucleotide
acatcaagcgatacataggggccggcttccgcgat

SEQ ID NO: 18625 - DNA, 38 bp, Artificial Sequence
  Synthetic oligonucleotide
accctttcgggatcagtgttgacgagttcggtgagtga

SEQ ID NO: 18626 - DNA, 38 bp, Artificial Sequence
  Synthetic oligonucleotide
actccggctaaaccttggtcctggtcgtttgatcatga

SEQ ID NO: 18627 - DNA, 35 bp, Artificial Sequence
  Synthetic oligonucleotide
acttgaggacatggaacgcgtgtgggtgagtgttg

SEQ ID NO: 18628 - DNA, 36 bp, Artificial Sequence
  Synthetic oligonucleotide
agatggctcttaaccacgtttagggtgtccgggtta

SEQ ID NO: 18629 - DNA, 36 bp, Artificial Sequence
  Synthetic oligonucleotide
aggcgcttgcacgaggagtacaacaaacaatgccta

SEQ ID NO: 18630 - DNA, 35 bp, Artificial Sequence
  Synthetic oligonucleotide
agttcaggttgcagtctggaatgtattaaacacgg

SEQ ID NO: 18631 - DNA, 35 bp, Artificial Sequence
  Synthetic oligonucleotide
atcaagacgtagctgtatgatccgtgtgcgggata

SEQ ID NO: 18632 - DNA, 35 bp, Artificial Sequence
  Synthetic oligonucleotide
atcgatagggtggtcaacaaacaatcggagttcgg

SEQ ID NO: 18633 - DNA, 37 bp, Artificial Sequence
  Synthetic oligonucleotide
atcgctgcattttagttgaagaaaaggcggtggacga

SEQ ID NO: 18634 - DNA, 37 bp, Artificial Sequence
  Synthetic oligonucleotide
atctatctgatacggcactaaagccaggttaacagga

SEQ ID NO: 18635 - DNA, 38 bp, Artificial Sequence
  Synthetic oligonucleotide
atggaattgcaacagcaaccaaggagattggactatga

SEQ ID NO: 18636 - DNA, 36 bp, Artificial Sequence
  Synthetic oligonucleotide
atggtgggtcccccccgcacatctatccagagtaga

SEQ ID NO: 18637 - DNA, 35 bp, Artificial Sequence
  Synthetic oligonucleotide
attgggtttagaaggggtttatagggggcttctgg

SEQ ID NO: 18638 - DNA, 35 bp, Artificial Sequence
  Synthetic oligonucleotide
attgtacttgtgccctcagtgggacgagacgagtc

SEQ ID NO: 18639 - DNA, 35 bp, Artificial Sequence
  Synthetic oligonucleotide
caactagggggatcattcagtcatgtgaccaagag

SEQ ID NO: 18640 - DNA, 36 bp, Artificial Sequence
  Synthetic oligonucleotide
catgatggcatcgatttaaaaggggtatgaaaccta

SEQ ID NO: 18641 - DNA, 35 bp, Artificial Sequence
  Synthetic oligonucleotide
catgatttgcggaccgtggagtggtgctttcaacc

SEQ ID NO: 18642 - DNA, 38 bp, Artificial Sequence
  Synthetic oligonucleotide
cgcgacttgtcgatgattcccgcgactttatatcgtga

SEQ ID NO: 18643 - DNA, 37 bp, Artificial Sequence
  Synthetic oligonucleotide
gaaacaagcgtcacttcctcgcgggtattctatggga

SEQ ID NO: 18644 - DNA, 37 bp, Artificial Sequence
  Synthetic oligonucleotide
gaaagtactggaagtggcttaaaaggggtatcattga

SEQ ID NO: 18645 - DNA, 38 bp, Artificial Sequence
  Synthetic oligonucleotide
gaacgcaaagctcgcgtaccacattggggggtgcctga

SEQ ID NO: 18646 - DNA, 35 bp, Artificial Sequence
  Synthetic oligonucleotide
gacaggtaagcttatgagctccgtgatctcggtcg

SEQ ID NO: 18647 - DNA, 37 bp, Artificial Sequence
  Synthetic oligonucleotide
gacgctggcgccacctgcacattatgggacctcctga

SEQ ID NO: 18648 - DNA, 36 bp, Artificial Sequence
  Synthetic oligonucleotide
gattgcgcacgctcgtcgccatttagcactatctaa

SEQ ID NO: 18649 - DNA, 36 bp, Artificial Sequence
  Synthetic oligonucleotide
gcagcccgctgtatgatgatttggggtccctatgtt

SEQ ID NO: 18650 - DNA, 37 bp, Artificial Sequence
  Synthetic oligonucleotide
gccgatacttaaggagaagtcataggattgctcttga

SEQ ID NO: 18651 - DNA, 38 bp, Artificial Sequence
  Synthetic oligonucleotide
gccgcaggtgtaatcatcatgaaggtcttgactcttga

SEQ ID NO: 18652 - DNA, 35 bp, Artificial Sequence
  Synthetic oligonucleotide
gcgacgggccggcgcatagcactggctctagacaa

SEQ ID NO: 18653 - DNA, 35 bp, Artificial Sequence
  Synthetic oligonucleotide
gcggtacgtttacgatggagagtgaggaagataca

SEQ ID NO: 18654 - DNA, 38 bp, Artificial Sequence
  Synthetic oligonucleotide
gcgtatcccgagtcgaaataagagtcataaccgattga

SEQ ID NO: 18655 - DNA, 35 bp, Artificial Sequence
  Synthetic oligonucleotide
gcttgtcagccccctttatcggttatacgagccat

SEQ ID NO: 18656 - DNA, 38 bp, Artificial Sequence
  Synthetic oligonucleotide
ggaaaagtgcaagccatgacctgtagggcgagagttga

SEQ ID NO: 18657 - DNA, 36 bp, Artificial Sequence
  Synthetic oligonucleotide
ggctgaggggtaggcacatcagacaggaggttgcta

SEQ ID NO: 18658 - DNA, 37 bp, Artificial Sequence
  Synthetic oligonucleotide
gggatagtaattacggcatcacaacgcgagtaaatga

SEQ ID NO: 18659 - DNA, 38 bp, Artificial Sequence
  Synthetic oligonucleotide
ggtgccttgccgacccgatgtaaggttactctatgtga

SEQ ID NO: 18660 - DNA, 35 bp, Artificial Sequence
  Synthetic oligonucleotide
ggtgggggccttccgcgtccatggcctctgtccac

SEQ ID NO: 18661 - DNA, 37 bp, Artificial Sequence
  Synthetic oligonucleotide
ggttgctacataacgcgccccctcagtcttggtgcga

SEQ ID NO: 18662 - DNA, 35 bp, Artificial Sequence
  Synthetic oligonucleotide
gtaaaccatcggagctcttgtgccaggtttcgtgt

SEQ ID NO: 18663 - DNA, 37 bp, Artificial Sequence
  Synthetic oligonucleotide
gtagggagtcatggttgatactcccgagcatgattga

SEQ ID NO: 18664 - DNA, 37 bp, Artificial Sequence
  Synthetic oligonucleotide
gtcgcggtactaggtgggaatacagtaccctgtacga

SEQ ID NO: 18665 - DNA, 38 bp, Artificial Sequence
  Synthetic oligonucleotide
gtgcgttaatgggtaagtcagtgcgttgtatcaattga

SEQ ID NO: 18666 - DNA, 36 bp, Artificial Sequence
  Synthetic oligonucleotide
gtgtggcgtgagtttatagccacgctcacagtgtga

SEQ ID NO: 18667 - DNA, 38 bp, Artificial Sequence
  Synthetic oligonucleotide
gtgtgggatcattagtgtggaagagttccatcatgtga

SEQ ID NO: 18668 - DNA, 37 bp, Artificial Sequence
  Synthetic oligonucleotide
gttgaactgcatgcgccgcggtgaatgtacctgcaga

SEQ ID NO: 18669 - DNA, 37 bp, Artificial Sequence
  Synthetic oligonucleotide
taaccagttccgcaaactataacatggaacgtgctga

SEQ ID NO: 18670 - DNA, 35 bp, Artificial Sequence
  Synthetic oligonucleotide
taattcgccgaaggcatggtttatacacgggttgg

SEQ ID NO: 18671 - DNA, 36 bp, Artificial Sequence
  Synthetic oligonucleotide
tacagcctgacagtcctctgaattatatcggatgtg

SEQ ID NO: 18672 - DNA, 38 bp, Artificial Sequence
  Synthetic oligonucleotide
tcacggagcagtctgggcgggtatggccatcgtactga

SEQ ID NO: 18673 - DNA, 36 bp, Artificial Sequence
  Synthetic oligonucleotide
tcataggtggttctattgaggttgagggtcggaaga

SEQ ID NO: 18674 - DNA, 37 bp, Artificial Sequence
  Synthetic oligonucleotide
tcccaccagtacggtttatctgcgttttcaagattga

SEQ ID NO: 18675 - DNA, 34 bp, Artificial Sequence
  Synthetic oligonucleotide
tgacggcggagatcctcaagattgggctagtctg

SEQ ID NO: 18676 - DNA, 36 bp, Artificial Sequence
  Synthetic oligonucleotide
tgagtgcgagcacttgttatataaccccttcagtca

SEQ ID NO: 18677 - DNA, 38 bp, Artificial Sequence
  Synthetic oligonucleotide
tgagtgttcctttatgaaaggagcggtccccggtctga

SEQ ID NO: 18678 - DNA, 35 bp, Artificial Sequence
  Synthetic oligonucleotide
tgatttgcgggcatgacggtatggagattgtagtg

SEQ ID NO: 18679 - DNA, 38 bp, Artificial Sequence
  Synthetic oligonucleotide
tgctttgaagaatatccagttagatgcgagacttgcga

SEQ ID NO: 18680 - DNA, 35 bp, Artificial Sequence
  Synthetic oligonucleotide
tggtgtgcctaggtatgcgtacgggattccacagt

SEQ ID NO: 18681 - DNA, 35 bp, Artificial Sequence
  Synthetic oligonucleotide
ttatcaaaggggttgatggtgtcgtgtaacacacg

SEQ ID NO: 18682 - DNA, 38 bp, Artificial Sequence
  Synthetic oligonucleotide
ttcacgctgtatgacttcgtttgcgtatacgctggtga

SEQ ID NO: 18683 - DNA, 37 bp, Artificial Sequence
  Synthetic oligonucleotide
ttcctcaccaccttgcccgaagtataatagtggaaga

SEQ ID NO: 18684 - DNA, 35 bp, Artificial Sequence
  Synthetic oligonucleotide
gttggtatcttgtgcgtccggataccgggtggacg

SEQ ID NO: 18685 - DNA, 37 bp, Artificial Sequence
  Synthetic oligonucleotide
gcaatcagaatttagaaacgtcagcgcattggatcga

SEQ ID NO: 18686 - DNA, 36 bp, Artificial Sequence
  Synthetic oligonucleotide
gtttgcccgggcctatccacttcgatatgagggtga

SEQ ID NO: 18687 - DNA, 37 bp, Artificial Sequence
  Synthetic oligonucleotide
agtcagccctgaagtaagtagatcggctcccccccga

SEQ ID NO: 18688 - DNA, 35 bp, Artificial Sequence
  Synthetic oligonucleotide
cacccctccccgccggagtcaaatcgtcgcgatga

SEQ ID NO: 18689 - DNA, 35 bp, Artificial Sequence
  Synthetic oligonucleotide
gacgtctgggtggagactcaaaatatcgcaacaat

SEQ ID NO: 18690 - DNA, 36 bp, Artificial Sequence
  Synthetic oligonucleotide
gtaacggtcgctttagctagactgcttagctcataa

SEQ ID NO: 18691 - DNA, 36 bp, Artificial Sequence
  Synthetic oligonucleotide
aacgcgcaagtgaggcggagttaagtaactgtgcaa

SEQ ID NO: 18692 - DNA, 38 bp, Artificial Sequence
  Synthetic oligonucleotide
aagtcggggcttgtttcgggctgatacgtggacaatga

SEQ ID NO: 18693 - DNA, 36 bp, Artificial Sequence
  Synthetic oligonucleotide
aagtgctggtaaattccaatgaaattgtgcctagca

SEQ ID NO: 18694 - DNA, 37 bp, Artificial Sequence
  Synthetic oligonucleotide
aatcacgttattaagctaaacggagccagatatcgga

SEQ ID NO: 18695 - DNA, 35 bp, Artificial Sequence
  Synthetic oligonucleotide
aatctaggcccagatacgcctaagagtacgcagta

SEQ ID NO: 18696 - DNA, 38 bp, Artificial Sequence
  Synthetic oligonucleotide
acaacagccacgtggagggatcatgcgaagcgatgtga

SEQ ID NO: 18697 - DNA, 35 bp, Artificial Sequence
  Synthetic oligonucleotide
acaggagctctgataatgaccttcagtacgggttg

SEQ ID NO: 18698 - DNA, 35 bp, Artificial Sequence
  Synthetic oligonucleotide
acatctgtataatgtactcatacaggagctttatg

SEQ ID NO: 18699 - DNA, 36 bp, Artificial Sequence
  Synthetic oligonucleotide
accccgcatatagttgagttcacggatcttgcgtaa

SEQ ID NO: 18700 - DNA, 35 bp, Artificial Sequence
  Synthetic oligonucleotide
acggagttatagcgttcacgaacagggccatgcga

SEQ ID NO: 18701 - DNA, 36 bp, Artificial Sequence
  Synthetic oligonucleotide
acgtgagctctagtacgtttgggatgtagagttgga

SEQ ID NO: 18702 - DNA, 37 bp, Artificial Sequence
  Synthetic oligonucleotide
actcgtaggtccgagtactcgttgttgaacgctccga

SEQ ID NO: 18703 - DNA, 36 bp, Artificial Sequence
  Synthetic oligonucleotide
agaataacagacgttttcatctttaagtcagccgta

SEQ ID NO: 18704 - DNA, 36 bp, Artificial Sequence
  Synthetic oligonucleotide
agggtggtttaaggtacatgctccccccatttttca

SEQ ID NO: 18705 - DNA, 38 bp, Artificial Sequence
  Synthetic oligonucleotide
agtcgcgtacttactatgagagttgggggcacatgtga

SEQ ID NO: 18706 - DNA, 37 bp, Artificial Sequence
  Synthetic oligonucleotide
atactgcatctgttacaatatagatcagcctgggcga

SEQ ID NO: 18707 - DNA, 35 bp, Artificial Sequence
  Synthetic oligonucleotide
atacttgcacaattgcgtacgacgggtcgaccaaa

SEQ ID NO: 18708 - DNA, 36 bp, Artificial Sequence
  Synthetic oligonucleotide
atagcgatcaaagttaatgtgatcaattacgaggta

SEQ ID NO: 18709 - DNA, 37 bp, Artificial Sequence
  Synthetic oligonucleotide
atcggtgcaccgcactcacgcatttctctagacgaga

SEQ ID NO: 18710 - DNA, 37 bp, Artificial Sequence
  Synthetic oligonucleotide
atgggacttactgtgttagggtcatgggtgcgaccga

SEQ ID NO: 18711 - DNA, 38 bp, Artificial Sequence
  Synthetic oligonucleotide
atggtcatgcaaacgtattgcagggggtaataatgtga

SEQ ID NO: 18712 - DNA, 36 bp, Artificial Sequence
  Synthetic oligonucleotide
atgttacatcagatcgctgtagcatataccaccgca

SEQ ID NO: 18713 - DNA, 37 bp, Artificial Sequence
  Synthetic oligonucleotide
caactgagcgagtgcatgatgggaggggcttactcga

SEQ ID NO: 18714 - DNA, 38 bp, Artificial Sequence
  Synthetic oligonucleotide
cacatacgagggtgcagacagcatcttaacttcgttga

SEQ ID NO: 18715 - DNA, 35 bp, Artificial Sequence
  Synthetic oligonucleotide
catggacgatgcccgtcaatatgttttccttatcg

SEQ ID NO: 18716 - DNA, 36 bp, Artificial Sequence
  Synthetic oligonucleotide
ccatccggacaatccataggtaataacacttcagca

SEQ ID NO: 18717 - DNA, 35 bp, Artificial Sequence
  Synthetic oligonucleotide
gaactgcatggtgcggggtttgtccggggccaact

SEQ ID NO: 18718 - DNA, 37 bp, Artificial Sequence
  Synthetic oligonucleotide
gaagaccagtacgagaatccgttgtgatttcaataga

SEQ ID NO: 18719 - DNA, 35 bp, Artificial Sequence
  Synthetic oligonucleotide
gaatgggaccactatgtgcgattgggtaccctctt

SEQ ID NO: 18720 - DNA, 37 bp, Artificial Sequence
  Synthetic oligonucleotide
gaccgagaggctcacggcactcaagaaagattagcga

SEQ ID NO: 18721 - DNA, 36 bp, Artificial Sequence
  Synthetic oligonucleotide
gactgacatgtagatcggaatgtagtacccttaaga

SEQ ID NO: 18722 - DNA, 38 bp, Artificial Sequence
  Synthetic oligonucleotide
gatatgcccgtgctctgtgctactcgggcatcatatga

SEQ ID NO: 18723 - DNA, 37 bp, Artificial Sequence
  Synthetic oligonucleotide
gctagaggtacaataagaagcattactatacgttcga

SEQ ID NO: 18724 - DNA, 38 bp, Artificial Sequence
  Synthetic oligonucleotide
ggatcgaagaaacagtgcatatccgactcgttggatga

SEQ ID NO: 18725 - DNA, 38 bp, Artificial Sequence
  Synthetic oligonucleotide
ggccgcctcggagcgggcggatgaatccctggtcttga

SEQ ID NO: 18726 - DNA, 36 bp, Artificial Sequence
  Synthetic oligonucleotide
gggatgaatacgtatcgaatttaactttagccagta

SEQ ID NO: 18727 - DNA, 37 bp, Artificial Sequence
  Synthetic oligonucleotide
ggggtcctagatatagaaggctgaaggtcgtttggga

SEQ ID NO: 18728 - DNA, 35 bp, Artificial Sequence
  Synthetic oligonucleotide
ggtaggattaaaggcctgtggtagtgaccagggag

SEQ ID NO: 18729 - DNA, 36 bp, Artificial Sequence
  Synthetic oligonucleotide
gtaaacgtctcagcagatcacttcacacgttaccta

SEQ ID NO: 18730 - DNA, 36 bp, Artificial Sequence
  Synthetic oligonucleotide
gttaagtaaaagtgaagctatcggactatatgatga

SEQ ID NO: 18731 - DNA, 37 bp, Artificial Sequence
  Synthetic oligonucleotide
gttttgacgaggtcggaggaataaatggaacggtaga

SEQ ID NO: 18732 - DNA, 35 bp, Artificial Sequence
  Synthetic oligonucleotide
tacacgaacgtacgaaggcatggtttttagttttc

SEQ ID NO: 18733 - DNA, 38 bp, Artificial Sequence
  Synthetic oligonucleotide
tatggtctggccatagccagcaatgttactgttcgtga

SEQ ID NO: 18734 - DNA, 35 bp, Artificial Sequence
  Synthetic oligonucleotide
tatttacgggcggggagcgcaagtccttgttctac

SEQ ID NO: 18735 - DNA, 38 bp, Artificial Sequence
  Synthetic oligonucleotide
tcaaactcgatgcttaacgctccgcgatacgggcgtga

SEQ ID NO: 18736 - DNA, 35 bp, Artificial Sequence
  Synthetic oligonucleotide
tcaacggtacttggctactccgtcgtggtgccatg

SEQ ID NO: 18737 - DNA, 37 bp, Artificial Sequence
  Synthetic oligonucleotide
tcaccgggcttggtttcgccactgccaatcatgagga

SEQ ID NO: 18738 - DNA, 37 bp, Artificial Sequence
  Synthetic oligonucleotide
tcactgttggtagcacatgctaacgtttgtcacatga

SEQ ID NO: 18739 - DNA, 36 bp, Artificial Sequence
  Synthetic oligonucleotide
tcattgaggagtaggtgagataacatccagtcacga

SEQ ID NO: 18740 - DNA, 35 bp, Artificial Sequence
  Synthetic oligonucleotide
tccaacatcatgcttagtcatgttggcacaggggt

SEQ ID NO: 18741 - DNA, 37 bp, Artificial Sequence
  Synthetic oligonucleotide
tcccagtgacagtctcaattttctgctcgtgaactga

SEQ ID NO: 18742 - DNA, 38 bp, Artificial Sequence
  Synthetic oligonucleotide
tgaaggagcatcacttgtgacccaagattctcaggtga

SEQ ID NO: 18743 - DNA, 36 bp, Artificial Sequence
  Synthetic oligonucleotide
tgctggggaggtttggaatttatctgcggttctgga

SEQ ID NO: 18744 - DNA, 35 bp, Artificial Sequence
  Synthetic oligonucleotide
tggagtccgagcatatatgtgagagcattttaaat

SEQ ID NO: 18745 - DNA, 36 bp, Artificial Sequence
  Synthetic oligonucleotide
ttaatctgtggcctatatcacttgatcgtacgttca

SEQ ID NO: 18746 - DNA, 36 bp, Artificial Sequence
  Synthetic oligonucleotide
ttcatctaggcggtacagagctcgcaatgtgctcta

SEQ ID NO: 18747 - DNA, 38 bp, Artificial Sequence
  Synthetic oligonucleotide
ttgcatccaaagatttacctgtcccgatgaggcgttga

SEQ ID NO: 18748 - DNA, 38 bp, Artificial Sequence
  Synthetic oligonucleotide
ttgtcattatcctgcgtacgggtgttgcagttgcttga

SEQ ID NO: 18749 - DNA, 37 bp, Artificial Sequence
  Synthetic oligonucleotide
tttctggagggagagcggttccgtgtaacatcagtga

SEQ ID NO: 18750 - DNA, 35 bp, Artificial Sequence
  Synthetic oligonucleotide
aactgctcatccgggtattcattgataagctgtag

SEQ ID NO: 18751 - DNA, 36 bp, Artificial Sequence
  Synthetic oligonucleotide
agccacgctgggtggacgctacgggctaggtgggta

SEQ ID NO: 18752 - DNA, 37 bp, Artificial Sequence
  Synthetic oligonucleotide
actgcgtggcgaccgtgggtactgtagtctgggtaga

SEQ ID NO: 18753 - DNA, 35 bp, Artificial Sequence
  Synthetic oligonucleotide
acttgccgccctgggattacgcgactcgcaattta

SEQ ID NO: 18754 - DNA, 38 bp, Artificial Sequence
  Synthetic oligonucleotide
gtactggtcgctgaataaggttaatgtggtatgtttga

SEQ ID NO: 18755 - DNA, 37 bp, Artificial Sequence
  Synthetic oligonucleotide
catatagcagttaggctgaaggtcgaacctggcatga

SEQ ID NO: 18756 - DNA, 38 bp, Artificial Sequence
  Synthetic oligonucleotide
gactaccaatgtagtctaaacgctattgcaatgtctga

SEQ ID NO: 18757 - DNA, 37 bp, Artificial Sequence
  Synthetic oligonucleotide
ggtcccgagagtgcgcctcgggacaagttctaaacga

SEQ ID NO: 18758 - DNA, 35 bp, Artificial Sequence
  Synthetic oligonucleotide
gttaagtatcgttaatgcttactgacaggcgcctg

SEQ ID NO: 18759 - DNA, 35 bp, Artificial Sequence
  Synthetic oligonucleotide
aaaaaggcgctccccagcattgtaggttttgaaag

SEQ ID NO: 18760 - DNA, 38 bp, Artificial Sequence
  Synthetic oligonucleotide
aaaactcgaagtcctgcacggatttatgtccattttga

SEQ ID NO: 18761 - DNA, 36 bp, Artificial Sequence
  Synthetic oligonucleotide
aaactgctgggccactctgaatattagctcctagca

SEQ ID NO: 18762 - DNA, 37 bp, Artificial Sequence
  Synthetic oligonucleotide
aagcactgtgacgcgtgagtctaggatgctacaggga

SEQ ID NO: 18763 - DNA, 37 bp, Artificial Sequence
  Synthetic oligonucleotide
aaggcttacacatatagcgtctgctcgagtgcctaga

SEQ ID NO: 18764 - DNA, 38 bp, Artificial Sequence
  Synthetic oligonucleotide
aagtaggcttcgtccagcgggatcaagtcctatggtga

SEQ ID NO: 18765 - DNA, 36 bp, Artificial Sequence
  Synthetic oligonucleotide
aagtgtactacagagcgggagataacaagatactta

SEQ ID NO: 18766 - DNA, 38 bp, Artificial Sequence
  Synthetic oligonucleotide
aatcctgtgtggttttcaaggaaatactccgcatgtga

SEQ ID NO: 18767 - DNA, 37 bp, Artificial Sequence
  Synthetic oligonucleotide
actgatacgtacaggtagactgtctgtctactgctga

SEQ ID NO: 18768 - DNA, 37 bp, Artificial Sequence
  Synthetic oligonucleotide
agaaaggtcaacctggcgctacgaataatttgtgaga

SEQ ID NO: 18769 - DNA, 36 bp, Artificial Sequence
  Synthetic oligonucleotide
agaagcactacagactatttgtaattgcgagctcca

SEQ ID NO: 18770 - DNA, 35 bp, Artificial Sequence
  Synthetic oligonucleotide
agggatgttaagcgtggctaactagggactatgcc

SEQ ID NO: 18771 - DNA, 38 bp, Artificial Sequence
  Synthetic oligonucleotide
aggtccgacctattgatatcttagtcatggttgtatga

SEQ ID NO: 18772 - DNA, 35 bp, Artificial Sequence
  Synthetic oligonucleotide
agtcggatgacgttcgacttagtatagactacgtc

SEQ ID NO: 18773 - DNA, 36 bp, Artificial Sequence
  Synthetic oligonucleotide
atcacctacacgagtggtaggacttgtgcgggacca

SEQ ID NO: 18774 - DNA, 36 bp, Artificial Sequence
  Synthetic oligonucleotide
catcgtggtaccaaaagattctttctctttagtgaa

SEQ ID NO: 18775 - DNA, 38 bp, Artificial Sequence
  Synthetic oligonucleotide
gactagagctcgatacgataaagcattgttaccagtga

SEQ ID NO: 18776 - DNA, 36 bp, Artificial Sequence
  Synthetic oligonucleotide
gacttgaatccactgtccgttatcgagaaagcagta

SEQ ID NO: 18777 - DNA, 37 bp, Artificial Sequence
  Synthetic oligonucleotide
gatcgcctactgcagataacgccttatcccgtagaga

SEQ ID NO: 18778 - DNA, 35 bp, Artificial Sequence
  Synthetic oligonucleotide
gcaatcagggatgcggcgccagcaaattatcgcgt

SEQ ID NO: 18779 - DNA, 35 bp, Artificial Sequence
  Synthetic oligonucleotide
gccgggtgaacgcgggcacgtggatatgcctggaa

SEQ ID NO: 18780 - DNA, 36 bp, Artificial Sequence
  Synthetic oligonucleotide
ggactaaaaggagtcatttggaagattgtataacta

SEQ ID NO: 18781 - DNA, 38 bp, Artificial Sequence
  Synthetic oligonucleotide
ggactgggccgtgaaattatgctgggcgtttcaagtga

SEQ ID NO: 18782 - DNA, 36 bp, Artificial Sequence
  Synthetic oligonucleotide
ggcacatgccatcctagatgcccccgcccccccata

SEQ ID NO: 18783 - DNA, 35 bp, Artificial Sequence
  Synthetic oligonucleotide
gggaattgcgttggaagatcatatatttgaacaat

SEQ ID NO: 18784 - DNA, 37 bp, Artificial Sequence
  Synthetic oligonucleotide
ggtgaagctggtctggacgccttggtaacgtaggaga

SEQ ID NO: 18785 - DNA, 38 bp, Artificial Sequence
  Synthetic oligonucleotide
ggtgagcgcatcgtgcgctgataacaatgctacagtga

SEQ ID NO: 18786 - DNA, 35 bp, Artificial Sequence
  Synthetic oligonucleotide
gttagcgaaagttttaagggaacggatccaacttc

SEQ ID NO: 18787 - DNA, 37 bp, Artificial Sequence
  Synthetic oligonucleotide
gtttgttcaacagcacggacctcacagtcttgataga

SEQ ID NO: 18788 - DNA, 37 bp, Artificial Sequence
  Synthetic oligonucleotide
taagcaatagaggttcagtggggttggtggaatgcga

SEQ ID NO: 18789 - DNA, 36 bp, Artificial Sequence
  Synthetic oligonucleotide
taagcaatcatgaacgtatggcatctgcgctgcaga

SEQ ID NO: 18790 - DNA, 38 bp, Artificial Sequence
  Synthetic oligonucleotide
tacagtcatgaaccgaaccgcgctgtatataacgatga

SEQ ID NO: 18791 - DNA, 38 bp, Artificial Sequence
  Synthetic oligonucleotide
taccttgtcgtcatagcagggattttatggctggatga

SEQ ID NO: 18792 - DNA, 36 bp, Artificial Sequence
  Synthetic oligonucleotide
tagatccattcaggccctctcctccaattaggtaca

SEQ ID NO: 18793 - DNA, 36 bp, Artificial Sequence
  Synthetic oligonucleotide
tagcgccttacgcattgccaggattggcggactaaa

SEQ ID NO: 18794 - DNA, 36 bp, Artificial Sequence
  Synthetic oligonucleotide
taggtcgccgccagtatgctcgtacttgaactcgga

SEQ ID NO: 18795 - DNA, 37 bp, Artificial Sequence
  Synthetic oligonucleotide
tagtcacgcggaacggttcgtcataccaggttgtcga

SEQ ID NO: 18796 - DNA, 36 bp, Artificial Sequence
  Synthetic oligonucleotide
tcacacccccctctatggaggcatgtccttgagata

SEQ ID NO: 18797 - DNA, 35 bp, Artificial Sequence
  Synthetic oligonucleotide
tcatgtctcattcgtaacccttggaacgtgggttc

SEQ ID NO: 18798 - DNA, 37 bp, Artificial Sequence
  Synthetic oligonucleotide
tcccaagcagatgcatgggtacattgacaagtggaga

SEQ ID NO: 18799 - DNA, 37 bp, Artificial Sequence
  Synthetic oligonucleotide
tccgccctacgagtaatgaacctattgccattaacga

SEQ ID NO: 18800 - DNA, 37 bp, Artificial Sequence
  Synthetic oligonucleotide
tctaaaaaatggttattctgttaggcatgttccaaga

SEQ ID NO: 18801 - DNA, 37 bp, Artificial Sequence
  Synthetic oligonucleotide
tctatgggaactggcgccattcgtctttggggaaaga

SEQ ID NO: 18802 - DNA, 36 bp, Artificial Sequence
  Synthetic oligonucleotide
tctatgttagcaactgacctgtcctgtttcggacca

SEQ ID NO: 18803 - DNA, 35 bp, Artificial Sequence
  Synthetic oligonucleotide
tgaggactcaacgttatcatgagaaagggggcaaa

SEQ ID NO: 18804 - DNA, 36 bp, Artificial Sequence
  Synthetic oligonucleotide
tgccgaatatcttgaaaggaggctccggtgggccta

SEQ ID NO: 18805 - DNA, 37 bp, Artificial Sequence
  Synthetic oligonucleotide
tgtctgccatgggtatttggaggtggaactactcgga

SEQ ID NO: 18806 - DNA, 37 bp, Artificial Sequence
  Synthetic oligonucleotide
ttccgggtcccggcattggccgatttatcacttcgga

SEQ ID NO: 18807 - DNA, 38 bp, Artificial Sequence
  Synthetic oligonucleotide
ttggatgctctcccaggtcacgcagagccctccggtga

SEQ ID NO: 18808 - DNA, 38 bp, Artificial Sequence
  Synthetic oligonucleotide
ttgttgcgggtgtctcagaggcatttagcggacattga

SEQ ID NO: 18809 - DNA, 37 bp, Artificial Sequence
  Synthetic oligonucleotide
attggtccgagggtggcatgctgtatacggtttcaga

SEQ ID NO: 18810 - DNA, 38 bp, Artificial Sequence
  Synthetic oligonucleotide
agagtggctgtagtgaatctaaatagggccgaaactga

SEQ ID NO: 18811 - DNA, 35 bp, Artificial Sequence
  Synthetic oligonucleotide
taccgctaaggaacgtccatgactttggtctgtta

SEQ ID NO: 18812 - DNA, 38 bp, Artificial Sequence
  Synthetic oligonucleotide
tcacgtaaagcgctaggataacacatcaccggacgtga

SEQ ID NO: 18813 - DNA, 35 bp, Artificial Sequence
  Synthetic oligonucleotide
ttgtgactgctagatggatggaaggtacagacgta

SEQ ID NO: 18814 - DNA, 37 bp, Artificial Sequence
  Synthetic oligonucleotide
agattgttgatacgtgtggtcattatagacacgtcga

SEQ ID NO: 18815 - DNA, 35 bp, Artificial Sequence
  Synthetic oligonucleotide
gagcatccaagatctatggacttgccaggtctaga

SEQ ID NO: 18816 - DNA, 35 bp, Artificial Sequence
  Synthetic oligonucleotide
tacacgattgagtctagatgaaggagtatcggtca

SEQ ID NO: 18817 - DNA, 37 bp, Artificial Sequence
  Synthetic oligonucleotide
tacgaagtcctagcacacaggggtaccttactgcgga

SEQ ID NO: 18818 - DNA, 37 bp, Artificial Sequence
  Synthetic oligonucleotide
tctacaaccgagatggctggtcgtgtgtactacgcga

SEQ ID NO: 18819 - DNA, 35 bp, Artificial Sequence
  Synthetic oligonucleotide
aaccgaccgagattgcattgaaacgctcagtgttt

SEQ ID NO: 18820 - DNA, 35 bp, Artificial Sequence
  Synthetic oligonucleotide
gctaggcatggaaaagtaagatagacgtttttgtt

SEQ ID NO: 18821 - DNA, 37 bp, Artificial Sequence
  Synthetic oligonucleotide
aaaccctgcaggccttgagattgcatacgcttcaaga

SEQ ID NO: 18822 - DNA, 37 bp, Artificial Sequence
  Synthetic oligonucleotide
aaaggagctagccgacacatgtgtgccctcacgcgga

SEQ ID NO: 18823 - DNA, 36 bp, Artificial Sequence
  Synthetic oligonucleotide
aacgactttgcagtatccaggggtgcgtgtcctcta

SEQ ID NO: 18824 - DNA, 36 bp, Artificial Sequence
  Synthetic oligonucleotide
aagaacatgtctggattacctctacgggatagatca

SEQ ID NO: 18825 - DNA, 35 bp, Artificial Sequence
  Synthetic oligonucleotide
aattgctgctaacagcggctctagtttgcgagggt

SEQ ID NO: 18826 - DNA, 37 bp, Artificial Sequence
  Synthetic oligonucleotide
accgtcggaatagaagggcaccaatcgagccgcgaga

SEQ ID NO: 18827 - DNA, 37 bp, Artificial Sequence
  Synthetic oligonucleotide
agccgctcgaggttgcgtaatgtcggttaataaggga

SEQ ID NO: 18828 - DNA, 35 bp, Artificial Sequence
  Synthetic oligonucleotide
aggacggctacagccgactgtttattgtttaggtt

SEQ ID NO: 18829 - DNA, 35 bp, Artificial Sequence
  Synthetic oligonucleotide
agtcccggtgcaataaaagcaccggtgggggccat

SEQ ID NO: 18830 - DNA, 38 bp, Artificial Sequence
  Synthetic oligonucleotide
ataacaaaggagtcgggtacacgggttttcaatcgtga

SEQ ID NO: 18831 - DNA, 35 bp, Artificial Sequence
  Synthetic oligonucleotide
atcatgaacgtaaatcgtcataagcccacccaagt

SEQ ID NO: 18832 - DNA, 37 bp, Artificial Sequence
  Synthetic oligonucleotide
atgtcgagggcgtggtgtattgttgtgatgtgcaaga

SEQ ID NO: 18833 - DNA, 36 bp, Artificial Sequence
  Synthetic oligonucleotide
attcctcaaggtgatgtatgggtctgctccatatga

SEQ ID NO: 18834 - DNA, 38 bp, Artificial Sequence
  Synthetic oligonucleotide
cgctgtgccgggcattgcgacgtgcaggggtactgtga

SEQ ID NO: 18835 - DNA, 35 bp, Artificial Sequence
  Synthetic oligonucleotide
cgttctgcggtcgatgcgaggtaaagtacgctccc

SEQ ID NO: 18836 - DNA, 36 bp, Artificial Sequence
  Synthetic oligonucleotide
gacattcaccttgttaacgttactgtggggatgata

SEQ ID NO: 18837 - DNA, 28 bp, Artificial Sequence
  Synthetic oligonucleotide
gactagggctaaacagcctatcactgcc

SEQ ID NO: 18838 - DNA, 38 bp, Artificial Sequence
  Synthetic oligonucleotide
gagacgtttcgttctcaagaattacttcccactgttga

SEQ ID NO: 18839 - DNA, 37 bp, Artificial Sequence
  Synthetic oligonucleotide
gagggttatccttacctcagccatagcatgcgggcga

SEQ ID NO: 18840 - DNA, 35 bp, Artificial Sequence
  Synthetic oligonucleotide
gcattactagacaatataaaattgggcacgggctc

SEQ ID NO: 18841 - DNA, 38 bp, Artificial Sequence
  Synthetic oligonucleotide
gccgttgcatcgttcttatagcctgttatccatgttga

SEQ ID NO: 18842 - DNA, 35 bp, Artificial Sequence
  Synthetic oligonucleotide
gctacttggcatgactagagatttgcgaacattgg

SEQ ID NO: 18843 - DNA, 35 bp, Artificial Sequence
  Synthetic oligonucleotide
gctagggtaaaagagtgttctgtgtagctaaagta

SEQ ID NO: 18844 - DNA, 37 bp, Artificial Sequence
  Synthetic oligonucleotide
ggcctagagactccttcttagtcccccccgtttagga

SEQ ID NO: 18845 - DNA, 35 bp, Artificial Sequence
  Synthetic oligonucleotide
gggacaggcacacaccgcgcctggtgttgtttatg

SEQ ID NO: 18846 - DNA, 37 bp, Artificial Sequence
  Synthetic oligonucleotide
ggtatagcttgcggcacgtagtgttgcgtgtcaatga

SEQ ID NO: 18847 - DNA, 35 bp, Artificial Sequence
  Synthetic oligonucleotide
ggtcatagatgtacggtgcttcctgagggttgaat

SEQ ID NO: 18848 - DNA, 36 bp, Artificial Sequence
  Synthetic oligonucleotide
ggtgccacggaatcaacgactagtaggaccaggcta

SEQ ID NO: 18849 - DNA, 35 bp, Artificial Sequence
  Synthetic oligonucleotide
ggttacattagcggtgaaccggacgtaccccctgg

SEQ ID NO: 18850 - DNA, 36 bp, Artificial Sequence
  Synthetic oligonucleotide
gtcgacgtattaatagtaggaaattcaaacccgcga

SEQ ID NO: 18851 - DNA, 38 bp, Artificial Sequence
  Synthetic oligonucleotide
gtgaatgaaaaagctactgacgagtcgcgggacaatga

SEQ ID NO: 18852 - DNA, 35 bp, Artificial Sequence
  Synthetic oligonucleotide
gtgaatgggaattcacttgttccttctagccgagc

SEQ ID NO: 18853 - DNA, 38 bp, Artificial Sequence
  Synthetic oligonucleotide
gtggcctgaacaaagctggctcccatctgaggaggtga

SEQ ID NO: 18854 - DNA, 34 bp, Artificial Sequence
  Synthetic oligonucleotide
gtgtctgcacggatgatctgcgtcccaactcctt

SEQ ID NO: 18855 - DNA, 37 bp, Artificial Sequence
  Synthetic oligonucleotide
taagagggggtgcgtttaggtcaatgtacctggatga

SEQ ID NO: 18856 - DNA, 36 bp, Artificial Sequence
  Synthetic oligonucleotide
tacataggaagggatcataactgaaggcatctataa

SEQ ID NO: 18857 - DNA, 36 bp, Artificial Sequence
  Synthetic oligonucleotide
tacgcgttgcgacgtgaggccttactatgatcacga

SEQ ID NO: 18858 - DNA, 36 bp, Artificial Sequence
  Synthetic oligonucleotide
tacgcttgtactcccgcccccacgcaagatatgaca

SEQ ID NO: 18859 - DNA, 35 bp, Artificial Sequence
  Synthetic oligonucleotide
tactcagagatattctccatggcggttgttccgct

SEQ ID NO: 18860 - DNA, 36 bp, Artificial Sequence
  Synthetic oligonucleotide
tagccattagtcactcccgacgtacgttgcgcaaaa

SEQ ID NO: 18861 - DNA, 37 bp, Artificial Sequence
  Synthetic oligonucleotide
tagtgcactccaggcctcatttcaattcaacgtggga

SEQ ID NO: 18862 - DNA, 37 bp, Artificial Sequence
  Synthetic oligonucleotide
tatgggttaggtgtcggccaagagaattgagacagga

SEQ ID NO: 18863 - DNA, 36 bp, Artificial Sequence
  Synthetic oligonucleotide
tccgcattaggcaacgctagacacgcacgtgcaaaa

SEQ ID NO: 18864 - DNA, 37 bp, Artificial Sequence
  Synthetic oligonucleotide
tcgtgcggaatacaaagtattacacacaaggtcacga

SEQ ID NO: 18865 - DNA, 36 bp, Artificial Sequence
  Synthetic oligonucleotide
tgaaaggtgattccattctataccgaagcagacgta

SEQ ID NO: 18866 - DNA, 35 bp, Artificial Sequence
  Synthetic oligonucleotide
tgacgggaacgatccgcattggcgggcatccctag

SEQ ID NO: 18867 - DNA, 35 bp, Artificial Sequence
  Synthetic oligonucleotide
tgatgcatgtgctatcgacagttctgcaatgcgga

SEQ ID NO: 18868 - DNA, 36 bp, Artificial Sequence
  Synthetic oligonucleotide
ttcgtaaagcccggcctcaaagacttcactttcgta

SEQ ID NO: 18869 - DNA, 36 bp, Artificial Sequence
  Synthetic oligonucleotide
ttgagtctgtacccagctgcgaatcccatgatagaa

SEQ ID NO: 18870 - DNA, 37 bp, Artificial Sequence
  Synthetic oligonucleotide
ttgcggagggacgtactgtgcagggtagctacttgga

SEQ ID NO: 18871 - DNA, 35 bp, Artificial Sequence
  Synthetic oligonucleotide
tttagagccagaatctcgagtgtttggtttaaaag

SEQ ID NO: 18872 - DNA, 35 bp, Artificial Sequence
  Synthetic oligonucleotide
ttttgagcaaatccggttagtatcatctgtgttgg

SEQ ID NO: 18873 - DNA, 35 bp, Artificial Sequence
  Synthetic oligonucleotide
tttgaaggaacacatgtatcatcagccctacgcgc

SEQ ID NO: 18874 - DNA, 36 bp, Artificial Sequence
  Synthetic oligonucleotide
agtctgcggtctcttatttacgagcaaagtcttgga

SEQ ID NO: 18875 - DNA, 35 bp, Artificial Sequence
  Synthetic oligonucleotide
aagctaggggtcaaaacgtaacctggtggggacgg

SEQ ID NO: 18876 - DNA, 35 bp, Artificial Sequence
  Synthetic oligonucleotide
gtcaagatctgtgcttaagcccttcgaaaggcgta

SEQ ID NO: 18877 - DNA, 37 bp, Artificial Sequence
  Synthetic oligonucleotide
gtcatgtactaggaacaagcgaccgggtgacagttga

SEQ ID NO: 18878 - DNA, 36 bp, Artificial Sequence
  Synthetic oligonucleotide
tacgtgagtctactccccagggggcccacgtaccgc

SEQ ID NO: 18879 - DNA, 36 bp, Artificial Sequence
  Synthetic oligonucleotide
aacagttcgcgggtgttcagacaagtgtccgttcta

SEQ ID NO: 18880 - DNA, 37 bp, Artificial Sequence
  Synthetic oligonucleotide
aacggatctcaggaagacatgtgagataaagggtaga

SEQ ID NO: 18881 - DNA, 36 bp, Artificial Sequence
  Synthetic oligonucleotide
aagggtgggaccgcttccgtgctagccggggtataa

SEQ ID NO: 18882 - DNA, 37 bp, Artificial Sequence
  Synthetic oligonucleotide
aaggttttgctacaggccttagcgagttcttgggtga

SEQ ID NO: 18883 - DNA, 36 bp, Artificial Sequence
  Synthetic oligonucleotide
aatccgaaggggggctaagtgtgtgcgtgcgataga

SEQ ID NO: 18884 - DNA, 37 bp, Artificial Sequence
  Synthetic oligonucleotide
actggagtccctttgtctatccgaatacgtactttga

SEQ ID NO: 18885 - DNA, 36 bp, Artificial Sequence
  Synthetic oligonucleotide
ataagacgcgcgtaaatagtaaggtgcaatgataaa

SEQ ID NO: 18886 - DNA, 35 bp, Artificial Sequence
  Synthetic oligonucleotide
atatactgcacactcgcgcgtgaacgaatttgtaa

SEQ ID NO: 18887 - DNA, 35 bp, Artificial Sequence
  Synthetic oligonucleotide
atcaccgaagctctgagacgagcttacataaaggg

SEQ ID NO: 18888 - DNA, 37 bp, Artificial Sequence
  Synthetic oligonucleotide
cagtagacgccactgatcgggaagtgaatcgtgaaga

SEQ ID NO: 18889 - DNA, 35 bp, Artificial Sequence
  Synthetic oligonucleotide
gacatctggagtcgtggacttgcatgtgaaggggt

SEQ ID NO: 18890 - DNA, 35 bp, Artificial Sequence
  Synthetic oligonucleotide
gagttatccctcagtgagtttgttatggaggtgag

SEQ ID NO: 18891 - DNA, 37 bp, Artificial Sequence
  Synthetic oligonucleotide
gccaggttagagtcctgaaaagctgatgaccatagga

SEQ ID NO: 18892 - DNA, 35 bp, Artificial Sequence
  Synthetic oligonucleotide
gttacggctcccattccttcccccgacctgacggg

SEQ ID NO: 18893 - DNA, 35 bp, Artificial Sequence
  Synthetic oligonucleotide
tacagcttataactcgtagggagtagctcaaggag

SEQ ID NO: 18894 - DNA, 36 bp, Artificial Sequence
  Synthetic oligonucleotide
tcgaggaacatgggggcatgtatttgttgcacctga

SEQ ID NO: 18895 - DNA, 35 bp, Artificial Sequence
  Synthetic oligonucleotide
tctatgcgctgagtagaaaccgtactggatttggt

SEQ ID NO: 18896 - DNA, 37 bp, Artificial Sequence
  Synthetic oligonucleotide
ttggggtgacgctcgagaatgcggcccatgggggaga

SEQ ID NO: 18897 - DNA, 35 bp, Artificial Sequence
  Synthetic oligonucleotide
actacggagtacctttcgcctaagagtgtagggag

SEQ ID NO: 18898 - DNA, 36 bp, Artificial Sequence
  Synthetic oligonucleotide
agtgacccagctggtggggggtttacttcgttagga

SEQ ID NO: 18899 - DNA, 36 bp, Artificial Sequence
  Synthetic oligonucleotide
gataggtcgaatttaagagctagtggcctgcactta

SEQ ID NO: 18900 - DNA, 35 bp, Artificial Sequence
  Synthetic oligonucleotide
tgatgcgcctgcaaaatgttctcatataatagttc

SEQ ID NO: 18901 - DNA, 38 bp, Artificial Sequence
  Synthetic oligonucleotide
aaccccggtgctcattgcgtgtccggttcgaggcttga

SEQ ID NO: 18902 - DNA, 35 bp, Artificial Sequence
  Synthetic oligonucleotide
aattagccaagtatggtccttcgtgttccgcagtg

SEQ ID NO: 18903 - DNA, 35 bp, Artificial Sequence
  Synthetic oligonucleotide
accaggtgggcgtatggaggtgggatcatcccaat

SEQ ID NO: 18904 - DNA, 35 bp, Artificial Sequence
  Synthetic oligonucleotide
accatgacggtggtaggttagtgctaccctggaga

SEQ ID NO: 18905 - DNA, 36 bp, Artificial Sequence
  Synthetic oligonucleotide
actctgtacttatttcggacatgaggctttgaaaga

SEQ ID NO: 18906 - DNA, 38 bp, Artificial Sequence
  Synthetic oligonucleotide
atacgcctcatggtgttcctggagttaccagtgtttga

SEQ ID NO: 18907 - DNA, 35 bp, Artificial Sequence
  Synthetic oligonucleotide
atcgactgccctccccaccccatctcagactcagc

SEQ ID NO: 18908 - DNA, 36 bp, Artificial Sequence
  Synthetic oligonucleotide
ccgtgcaacggacgagtgctacagacttggtgacaa

SEQ ID NO: 18909 - DNA, 35 bp, Artificial Sequence
  Synthetic oligonucleotide
cgacttcaggtagcaataaactgaaaacagtacgg

SEQ ID NO: 18910 - DNA, 35 bp, Artificial Sequence
  Synthetic oligonucleotide
gattgagcccttcaactgctttggaattttacatg

SEQ ID NO: 18911 - DNA, 37 bp, Artificial Sequence
  Synthetic oligonucleotide
gctcagtgaaaagtggaccactaacacgtatgcgcga

SEQ ID NO: 18912 - DNA, 36 bp, Artificial Sequence
  Synthetic oligonucleotide
ggaagttactgccggaataccttgtcgagatagtta

SEQ ID NO: 18913 - DNA, 37 bp, Artificial Sequence
  Synthetic oligonucleotide
gtgagacgctcagagagcaggcgggcggagacacgga

SEQ ID NO: 18914 - DNA, 37 bp, Artificial Sequence
  Synthetic oligonucleotide
gttgttccaaaagtcggtatatggagacggggtgagg

SEQ ID NO: 18915 - DNA, 35 bp, Artificial Sequence
  Synthetic oligonucleotide
gtttcactggaagcttggggtgaaagggccgagtt

SEQ ID NO: 18916 - DNA, 36 bp, Artificial Sequence
  Synthetic oligonucleotide
taaagacaggggtccgtgagattttgcacgagtgga

SEQ ID NO: 18917 - DNA, 35 bp, Artificial Sequence
  Synthetic oligonucleotide
tacatgttggggttgtaatcggtttgtgagtgggg

SEQ ID NO: 18918 - DNA, 36 bp, Artificial Sequence
  Synthetic oligonucleotide
tacgacccttatgtcgacgtatggtgtggataaaaa

SEQ ID NO: 18919 - DNA, 35 bp, Artificial Sequence
  Synthetic oligonucleotide
tagcaaaagtgattttaccctgatatcaacgctgt

SEQ ID NO: 18920 - DNA, 36 bp, Artificial Sequence
  Synthetic oligonucleotide
tgacgcgtttttagttatagaaacatgatgttacga

SEQ ID NO: 18921 - DNA, 36 bp, Artificial Sequence
  Synthetic oligonucleotide
tgcgaaaggttaaaggtcgtacgtatctgttgttga

SEQ ID NO: 18922 - DNA, 35 bp, Artificial Sequence
  Synthetic oligonucleotide
tgctcaccggacctatcacgttcgggtcgtataga

SEQ ID NO: 18923 - DNA, 36 bp, Artificial Sequence
  Synthetic oligonucleotide
tgtatcgccaatgttaactctcaatggtatgtggta

SEQ ID NO: 18924 - DNA, 36 bp, Artificial Sequence
  Synthetic oligonucleotide
ttaactagctgctgcggggggttttgtcatgtcgta

SEQ ID NO: 18925 - DNA, 36 bp, Artificial Sequence
  Synthetic oligonucleotide
ttgagccccggctactgaagaccgggatcatgttga

SEQ ID NO: 18926 - DNA, 35 bp, Artificial Sequence
  Synthetic oligonucleotide
ttgtcaatgtacaaacttcccacgatatttacggt

SEQ ID NO: 18927 - DNA, 36 bp, Artificial Sequence
  Synthetic oligonucleotide
agctatcacagcaagagatgcgaatgcggtgaagga

SEQ ID NO: 18928 - DNA, 37 bp, Artificial Sequence
  Synthetic oligonucleotide
ctacaggttgcgagcacctcttctccccccgcgctga

SEQ ID NO: 18929 - DNA, 35 bp, Artificial Sequence
  Synthetic oligonucleotide
gagttgaccgctgcctccgccgtgcggtacatctg

SEQ ID NO: 18930 - DNA, 36 bp, Artificial Sequence
  Synthetic oligonucleotide
gcgacctctgtcatagcattcatatgagaaggtaca

SEQ ID NO: 18931 - DNA, 36 bp, Artificial Sequence
  Synthetic oligonucleotide
aaaacgttatgaaagttcatgtttcagtgcatggta

SEQ ID NO: 18932 - DNA, 38 bp, Artificial Sequence
  Synthetic oligonucleotide
aagtggacccggtgccaacgggtaaagagtcttcgtga

SEQ ID NO: 18933 - DNA, 35 bp, Artificial Sequence
  Synthetic oligonucleotide
gagcataagcatctgtcggatttcttatctacggg

SEQ ID NO: 18934 - DNA, 35 bp, Artificial Sequence
  Synthetic oligonucleotide
gattcgctcgcgagtcagtatcgtgaaatgtctcg

SEQ ID NO: 18935 - DNA, 38 bp, Artificial Sequence
  Synthetic oligonucleotide
gccaaacaccaaacctacaggagagctgtgtcaactga

SEQ ID NO: 18936 - DNA, 35 bp, Artificial Sequence
  Synthetic oligonucleotide
gcgtgtggatcacgttatagactctgtcagagaag

SEQ ID NO: 18937 - DNA, 35 bp, Artificial Sequence
  Synthetic oligonucleotide
ggatatcaggcaagatggattactggggtgctata

SEQ ID NO: 18938 - DNA, 37 bp, Artificial Sequence
  Synthetic oligonucleotide
ggtccagtggatatcagtaatatcgtcatgctgcgga

SEQ ID NO: 18939 - DNA, 35 bp, Artificial Sequence
  Synthetic oligonucleotide
ggtgccaaaaggatacagggtcgtagtctagcgta

SEQ ID NO: 18940 - DNA, 37 bp, Artificial Sequence
  Synthetic oligonucleotide
gtctaacaggtgcaggaaggatatgagcttggttcga

SEQ ID NO: 18941 - DNA, 35 bp, Artificial Sequence
  Synthetic oligonucleotide
gtgtacatacccatcagggggttggcatcacgttg

SEQ ID NO: 18942 - DNA, 38 bp, Artificial Sequence
  Synthetic oligonucleotide
tatggcagatgatactaggctgtccgtcgactatctga

SEQ ID NO: 18943 - DNA, 37 bp, Artificial Sequence
  Synthetic oligonucleotide
tcatgcgaatgggacagcggtgcaattaagatttgga

SEQ ID NO: 18944 - DNA, 35 bp, Artificial Sequence
  Synthetic oligonucleotide
tcctagagattagctccaaggtaagagaagcgggt

SEQ ID NO: 18945 - DNA, 35 bp, Artificial Sequence
  Synthetic oligonucleotide
tggaaggcagatgtgcaacgactaggccatttacg

SEQ ID NO: 18946 - DNA, 37 bp, Artificial Sequence
  Synthetic oligonucleotide
tggtccacgagctcggatagtgggtatgtggggcgga

SEQ ID NO: 18947 - DNA, 38 bp, Artificial Sequence
  Synthetic oligonucleotide
tgtgagtgctacggcggtgcactgttatgctgggatga

SEQ ID NO: 18948 - DNA, 36 bp, Artificial Sequence
  Synthetic oligonucleotide
ttcacgatgtgatgggtcataccgggtcatagcaaa

SEQ ID NO: 18949 - DNA, 38 bp, Artificial Sequence
  Synthetic oligonucleotide
ttgcccactaatatgaggtgcatgctgaccaagactga

SEQ ID NO: 18950 - DNA, 37 bp, Artificial Sequence
  Synthetic oligonucleotide
ttgccgcgacgagtggaatcagctgcaatgggaccga

SEQ ID NO: 18951 - DNA, 35 bp, Artificial Sequence
  Synthetic oligonucleotide
ttgctgagcgaacgttagggaccatggggttccgt

SEQ ID NO: 18952 - DNA, 37 bp, Artificial Sequence
  Synthetic oligonucleotide
tttaactcgaagtgctaatgacttcgaccttgtaaga

SEQ ID NO: 18953 - DNA, 38 bp, Artificial Sequence
  Synthetic oligonucleotide
ttggtgctgcggaggcaaatgaagggtcacagcagtga

SEQ ID NO: 18954 - DNA, 36 bp, Artificial Sequence
  Synthetic oligonucleotide
tgggttgtccggtcataggtttgggtcatccgggga

SEQ ID NO: 18955 - DNA, 36 bp, Artificial Sequence
  Synthetic oligonucleotide
ttggtaaggcgcaatggcggtaattattcgttctga

SEQ ID NO: 18956 - DNA, 37 bp, Artificial Sequence
  Synthetic oligonucleotide
aaatcggtgattgtggtcaaaagtgggaattccggga

SEQ ID NO: 18957 - DNA, 38 bp, Artificial Sequence
  Synthetic oligonucleotide
aagtggtcttagcaggtactcagacaacgacggactga

SEQ ID NO: 18958 - DNA, 37 bp, Artificial Sequence
  Synthetic oligonucleotide
acgagcggtacggggtttctgagaagctaccgcatga

SEQ ID NO: 18959 - DNA, 35 bp, Artificial Sequence
  Synthetic oligonucleotide
gaacgctaacttaatgaatgacgtgaggcatgata

SEQ ID NO: 18960 - DNA, 36 bp, Artificial Sequence
  Synthetic oligonucleotide
gacgctcaacatgagccacgcaaccaagtatccaaa

SEQ ID NO: 18961 - DNA, 36 bp, Artificial Sequence
  Synthetic oligonucleotide
gcactaggccgaacgagttggcattacactaacgta

SEQ ID NO: 18962 - DNA, 35 bp, Artificial Sequence
  Synthetic oligonucleotide
gcgtggatacgcaggggttcatctgttcatgtgat

SEQ ID NO: 18963 - DNA, 38 bp, Artificial Sequence
  Synthetic oligonucleotide
gggaatcgtatacgatgcttgcgtgagctacttgctga

SEQ ID NO: 18964 - DNA, 37 bp, Artificial Sequence
  Synthetic oligonucleotide
gtgttcctcgagagcgcacgagccatctaatcctgga

SEQ ID NO: 18965 - DNA, 36 bp, Artificial Sequence
  Synthetic oligonucleotide
tcccgcttcaattaaggttcacttggaacgcacgaa

SEQ ID NO: 18966 - DNA, 35 bp, Artificial Sequence
  Synthetic oligonucleotide
tccggaagatcctacttgtaggggtgactagtcgt

SEQ ID NO: 18967 - DNA, 36 bp, Artificial Sequence
  Synthetic oligonucleotide
tctccgtgaagacggtatacgtaggttgcattgcta

SEQ ID NO: 18968 - DNA, 37 bp, Artificial Sequence
  Synthetic oligonucleotide
attagagcgtagctaaagatacgtactgaggaggtga

SEQ ID NO: 18969 - DNA, 38 bp, Artificial Sequence
  Synthetic oligonucleotide
aaagtactgatccccacgccatgttcattaagtattga

SEQ ID NO: 18970 - DNA, 35 bp, Artificial Sequence
  Synthetic oligonucleotide
tcagcgatactgttgggtcatggttattcttgaaa

SEQ ID NO: 18971 - DNA, 35 bp, Artificial Sequence
  Synthetic oligonucleotide
aaactttaaggccagttccgatccggccgtctctc

SEQ ID NO: 18972 - DNA, 35 bp, Artificial Sequence
  Synthetic oligonucleotide
atccaaagactatgaaccacctgggcctcacctgt

SEQ ID NO: 18973 - DNA, 35 bp, Artificial Sequence
  Synthetic oligonucleotide
atgtgcccgtaacgccttccccagaggtcaatgga

SEQ ID NO: 18974 - DNA, 35 bp, Artificial Sequence
  Synthetic oligonucleotide
gatggaggttataggaatgtgcaagataccgtccg

SEQ ID NO: 18975 - DNA, 38 bp, Artificial Sequence
  Synthetic oligonucleotide
ggaactaaccagcatatgtgaaagttttgtgtacgtga

SEQ ID NO: 18976 - DNA, 37 bp, Artificial Sequence
  Synthetic oligonucleotide
ggtttgctctggatagtattggaggtccgtgcaccga

SEQ ID NO: 18977 - DNA, 35 bp, Artificial Sequence
  Synthetic oligonucleotide
gtgatcagaagttgtgaaggtctcaccgtgcgtgc

SEQ ID NO: 18978 - DNA, 36 bp, Artificial Sequence
  Synthetic oligonucleotide
gaacgggggacgggagtctgtggaatcgaccaaata

SEQ ID NO: 18979 - DNA, 36 bp, Artificial Sequence
  Synthetic oligonucleotide
acaaccgctatcgacctagagggagtatgaggtgaa

SEQ ID NO: 18980 - DNA, 36 bp, Artificial Sequence
  Synthetic oligonucleotide
agaattcgcccctggggtcctactaagtaaggagaa

SEQ ID NO: 18981 - DNA, 35 bp, Artificial Sequence
  Synthetic oligonucleotide
attcgtacacggcactggcgttttaaagtgtcacc

SEQ ID NO: 18982 - DNA, 35 bp, Artificial Sequence
  Synthetic oligonucleotide
gcaaggttgtaaatttgtaggcaaggccgttgata

SEQ ID NO: 18983 - DNA, 35 bp, Artificial Sequence
  Synthetic oligonucleotide
ggttacatgcaccggccgtattgagtacttcggga

SEQ ID NO: 18984 - DNA, 38 bp, Artificial Sequence
  Synthetic oligonucleotide
taaaacggtttgcagagcccgggaacggacgcagttga

SEQ ID NO: 18985 - DNA, 38 bp, Artificial Sequence
  Synthetic oligonucleotide
taatggcgcacagatagcctatcgcgttcaatcgttga

SEQ ID NO: 18986 - DNA, 38 bp, Artificial Sequence
  Synthetic oligonucleotide
tactattggaagagggacttgaagagaccagcccttga

SEQ ID NO: 18987 - DNA, 38 bp, Artificial Sequence
  Synthetic oligonucleotide
tcagtgcagggtgcttccgtagttaagtgttagcgtga

SEQ ID NO: 18988 - DNA, 35 bp, Artificial Sequence
  Synthetic oligonucleotide
tccgacagacaacattgaggactttataggacaca

SEQ ID NO: 18989 - DNA, 37 bp, Artificial Sequence
  Synthetic oligonucleotide
tgtccccccaggtagtataatataggcctccagcaga

SEQ ID NO: 18990 - DNA, 35 bp, Artificial Sequence
  Synthetic oligonucleotide
agaatctgcttatactttttcggagccaggattgc

SEQ ID NO: 18991 - DNA, 38 bp, Artificial Sequence
  Synthetic oligonucleotide
gaatgctcgattctgtcattcgcgggcggactacctga

SEQ ID NO: 18992 - DNA, 37 bp, Artificial Sequence
  Synthetic oligonucleotide
gttagatcgaggggtagcatttttctatattgctcga

SEQ ID NO: 18993 - DNA, 35 bp, Artificial Sequence
  Synthetic oligonucleotide
accgttacttagtggacagttcggagatgcaaagg

SEQ ID NO: 18994 - DNA, 35 bp, Artificial Sequence
  Synthetic oligonucleotide
agacacttcggaactgtcggatgggcggttagcgc

SEQ ID NO: 18995 - DNA, 37 bp, Artificial Sequence
  Synthetic oligonucleotide
gctgtgcacgtctgggtgccaaattggggttcgtgga

SEQ ID NO: 18996 - DNA, 36 bp, Artificial Sequence
  Synthetic oligonucleotide
tatcgcctaggaatccgggccagataaacggtagta

SEQ ID NO: 18997 - DNA, 37 bp, Artificial Sequence
  Synthetic oligonucleotide
tcaagctatgagtggacgcatcttctttactctggga

SEQ ID NO: 18998 - DNA, 35 bp, Artificial Sequence
  Synthetic oligonucleotide
tgcctgcgatcactccacacggatgcttcgggata

SEQ ID NO: 18999 - DNA, 38 bp, Artificial Sequence
  Synthetic oligonucleotide
aaacgataggcaaggcgggagttgagtctgagtgctga

SEQ ID NO: 19000 - DNA, 36 bp, Artificial Sequence
  Synthetic oligonucleotide
agaatccagtaaaggagagctggggcgccactggaa

SEQ ID NO: 19001 - DNA, 32 bp, Artificial Sequence
  Synthetic oligonucleotide
gtcaacgtacatgtcttgatggagagtgcatc

SEQ ID NO: 19002 - DNA, 37 bp, Artificial Sequence
  Synthetic oligonucleotide
tatccgcgcgtgggacgcgcacgaatagtacttgaga

SEQ ID NO: 19003 - DNA, 36 bp, Artificial Sequence
  Synthetic oligonucleotide
aatgcatcacgtttcgagtgttgcgagtgagccgta

SEQ ID NO: 19004 - DNA, 35 bp, Artificial Sequence
  Synthetic oligonucleotide
acaagctctcgcgtcgcactcgcggattgttgttg

SEQ ID NO: 19005 - DNA, 35 bp, Artificial Sequence
  Synthetic oligonucleotide
gactacatttcgaatgtatcatgaagacatctacg

SEQ ID NO: 19006 - DNA, 36 bp, Artificial Sequence
  Synthetic oligonucleotide
gatagtgttggtgcccgccacacgtactacgtatta

SEQ ID NO: 19007 - DNA, 38 bp, Artificial Sequence
  Synthetic oligonucleotide
ggtgactgttgatttgtctccaaaactttaccccgtga

SEQ ID NO: 19008 - DNA, 35 bp, Artificial Sequence
  Synthetic oligonucleotide
gtagcacctgccgaatgggttttcctataggaatt

SEQ ID NO: 19009 - DNA, 37 bp, Artificial Sequence
  Synthetic oligonucleotide
gttacgtgtacgggggagtgaatgttactggtcaaga

SEQ ID NO: 19010 - DNA, 35 bp, Artificial Sequence
  Synthetic oligonucleotide
tagtacttagacagccggatattcttggcggatta

SEQ ID NO: 19011 - DNA, 35 bp, Artificial Sequence
  Synthetic oligonucleotide
tatcgctgcgaccgtcatgatgaaaactattacct

SEQ ID NO: 19012 - DNA, 35 bp, Artificial Sequence
  Synthetic oligonucleotide
ttgtcaggcggaccgtacaggcactagtccaagta

SEQ ID NO: 19013 - DNA, 36 bp, Artificial Sequence
  Synthetic oligonucleotide
aataactactgcgtaactgcgtcaacctggtagaga

SEQ ID NO: 19014 - DNA, 35 bp, Artificial Sequence
  Synthetic oligonucleotide
gtccagttcctgagtcttggctcccctactccccc

SEQ ID NO: 19015 - DNA, 36 bp, Artificial Sequence
  Synthetic oligonucleotide
atacgacatggtcggctacgccatcatttaatctca

SEQ ID NO: 19016 - DNA, 37 bp, Artificial Sequence
  Synthetic oligonucleotide
gccgttttaacgcactggagacacctgggctttgcga

SEQ ID NO: 19017 - DNA, 38 bp, Artificial Sequence
  Synthetic oligonucleotide
gctaggaacggtctcaggtctacgcctcaggcttttga

SEQ ID NO: 19018 - DNA, 38 bp, Artificial Sequence
  Synthetic oligonucleotide
ggtgtgatccactgttcgagcactaatgcggggtatga

SEQ ID NO: 19019 - DNA, 37 bp, Artificial Sequence
  Synthetic oligonucleotide
ttgacacttaagggagtaaaaccacctggtctatgga

SEQ ID NO: 19020 - DNA, 36 bp, Artificial Sequence
  Synthetic oligonucleotide
ttgtactgctcgtctattctatgggtaccgtgtgga

SEQ ID NO: 19021 - DNA, 36 bp, Artificial Sequence
  Synthetic oligonucleotide
acgagccctggcgttatggagcattctcaggtatta

SEQ ID NO: 19022 - DNA, 36 bp, Artificial Sequence
  Synthetic oligonucleotide
tctcgacgtatgagttcagatctatcgcgtacgtaa

SEQ ID NO: 19023 - DNA, 37 bp, Artificial Sequence
  Synthetic oligonucleotide
aagccgcaggccaacgttgtgtaggaattcatggaga

SEQ ID NO: 19024 - DNA, 35 bp, Artificial Sequence
  Synthetic oligonucleotide
aataaaggcatgctaatcgagtgtttgtcagatta

SEQ ID NO: 19025 - DNA, 37 bp, Artificial Sequence
  Synthetic oligonucleotide
atttagactaggacaagactctacaggtagtgcccga

SEQ ID NO: 19026 - DNA, 36 bp, Artificial Sequence
  Synthetic oligonucleotide
gcgtagaatcgagttgaccttgggtcggagcacgta

SEQ ID NO: 19027 - DNA, 35 bp, Artificial Sequence
  Synthetic oligonucleotide
aacgagtcgtagtttaggtgatcgaggatatacag

SEQ ID NO: 19028 - DNA, 37 bp, Artificial Sequence
  Synthetic oligonucleotide
aatactagtcggtcgatatttgtccgtagatgagcga

SEQ ID NO: 19029 - DNA, 37 bp, Artificial Sequence
  Synthetic oligonucleotide
agtggaaggtcgtactgcaggtttgttgtgcaagaga

SEQ ID NO: 19030 - DNA, 36 bp, Artificial Sequence
  Synthetic oligonucleotide
atagccacctggtgtcgacaactaaagcgacgtgca

SEQ ID NO: 19031 - DNA, 35 bp, Artificial Sequence
  Synthetic oligonucleotide
tacaacaacgtacaggaatatgggtgttgtgcggc

SEQ ID NO: 19032 - DNA, 35 bp, Artificial Sequence
  Synthetic oligonucleotide
tacgagtccgcgccacatgtgggaacggacaacgt

SEQ ID NO: 19033 - DNA, 36 bp, Artificial Sequence
  Synthetic oligonucleotide
taggtggacgaatgtcaactatggatagggatagaa

SEQ ID NO: 19034 - DNA, 35 bp, Artificial Sequence
  Synthetic oligonucleotide
tctctcgacactatggtctccatctgataaactgg

SEQ ID NO: 19035 - DNA, 35 bp, Artificial Sequence
  Synthetic oligonucleotide
ttatcgagcataaagagtcatttgcggaaagcgag

SEQ ID NO: 19036 - DNA, 36 bp, Artificial Sequence
  Synthetic oligonucleotide
tccaaatactgaacggtatatccctggggggtgaaa

SEQ ID NO: 19037 - DNA, 36 bp, Artificial Sequence
  Synthetic oligonucleotide
gaacttagcccgacattggagggttgctcactctga

SEQ ID NO: 19038 - DNA, 35 bp, Artificial Sequence
  Synthetic oligonucleotide
gaaggcatcagtctccagtaaatatcttgacggga

SEQ ID NO: 19039 - DNA, 38 bp, Artificial Sequence
  Synthetic oligonucleotide
ggatgccaactagagttcgcgacgtaggtggcatctga

SEQ ID NO: 19040 - DNA, 38 bp, Artificial Sequence
  Synthetic oligonucleotide
gcactgcaagggccatgacgagaatatactcgaagtga

SEQ ID NO: 19041 - DNA, 35 bp, Artificial Sequence
  Synthetic oligonucleotide
tcacaatctcagtgccttacgaactgcagggctaa

SEQ ID NO: 19042 - DNA, 36 bp, Artificial Sequence
  Synthetic oligonucleotide
actaacatcgccatgggagacgtcgagacactggga

SEQ ID NO: 19043 - DNA, 36 bp, Artificial Sequence
  Synthetic oligonucleotide
atgaaacacaacggggcggtcatcgtgaggatagca

SEQ ID NO: 19044 - DNA, 38 bp, Artificial Sequence
  Synthetic oligonucleotide
ttgttagcttatgcagtcaggacgctggacgttcgtga

SEQ ID NO: 19045 - DNA, 36 bp, Artificial Sequence
  Synthetic oligonucleotide
tgcacgtgatggggcttcttatgtggcaaagagata

SEQ ID NO: 19046 - DNA, 38 bp, Artificial Sequence
  Synthetic oligonucleotide
agggagccaacaccagtggtcttagagtgcaataatga

SEQ ID NO: 19047 - DNA, 38 bp, Artificial Sequence
  Synthetic oligonucleotide
tccccccgaagatttcgtgttgtacgcatagacagtga

SEQ ID NO: 19048 - DNA, 37 bp, Artificial Sequence
  Synthetic oligonucleotide
ttagtgtattgcgtccatgggagaattattaccgcga

SEQ ID NO: 19049 - DNA, 38 bp, Artificial Sequence
  Synthetic oligonucleotide
aaaccgcaggaaggcaacgcgcccactgaaagctctga

SEQ ID NO: 19050 - DNA, 35 bp, Artificial Sequence
  Synthetic oligonucleotide
aaacgtccatattgaggtagtcaggggaggggggc

SEQ ID NO: 19051 - DNA, 36 bp, Artificial Sequence
  Synthetic oligonucleotide
aaccgtttggtgtgccctgtatgggaagacacacga

SEQ ID NO: 19052 - DNA, 38 bp, Artificial Sequence
  Synthetic oligonucleotide
aagatcgaccttgcaggacgaaagggcgttcgagctga

SEQ ID NO: 19053 - DNA, 37 bp, Artificial Sequence
  Synthetic oligonucleotide
aagcaaagtaggtcgatgtatcagtaaattcgcaaga

SEQ ID NO: 19054 - DNA, 38 bp, Artificial Sequence
  Synthetic oligonucleotide
aaggctatcaggctccggaggatggcgttaatacgtga

SEQ ID NO: 19055 - DNA, 35 bp, Artificial Sequence
  Synthetic oligonucleotide
aatctgcgcccggatagcggctcgcttagtctcgt

SEQ ID NO: 19056 - DNA, 37 bp, Artificial Sequence
  Synthetic oligonucleotide
acatgcggaggtccgtcttgctatatatgcgtattga

SEQ ID NO: 19057 - DNA, 35 bp, Artificial Sequence
  Synthetic oligonucleotide
accgaagaggtgcccttagtagacatcttgttccg

SEQ ID NO: 19058 - DNA, 37 bp, Artificial Sequence
  Synthetic oligonucleotide
accgcaaacgtaaatggggggtatgtttggtcatcga

SEQ ID NO: 19059 - DNA, 38 bp, Artificial Sequence
  Synthetic oligonucleotide
acgacggccactgataggcactccgatgtcggacgtga

SEQ ID NO: 19060 - DNA, 37 bp, Artificial Sequence
  Synthetic oligonucleotide
acgcgtagttggagaatataacagagtgcaagtgtga

SEQ ID NO: 19061 - DNA, 36 bp, Artificial Sequence
  Synthetic oligonucleotide
actagctatcatagtcaatggtgtatgagtggttga

SEQ ID NO: 19062 - DNA, 37 bp, Artificial Sequence
  Synthetic oligonucleotide
actcctaccgcgcacggtaaatgagggtactccgtga

SEQ ID NO: 19063 - DNA, 35 bp, Artificial Sequence
  Synthetic oligonucleotide
actgcggggtcaacagtccaaacgagctctcacga

SEQ ID NO: 19064 - DNA, 36 bp, Artificial Sequence
  Synthetic oligonucleotide
acttgttctataacaggttctactgcggcccaggta

SEQ ID NO: 19065 - DNA, 37 bp, Artificial Sequence
  Synthetic oligonucleotide
agacggtcccagaggactaaaactattcccgtgtcga

SEQ ID NO: 19066 - DNA, 38 bp, Artificial Sequence
  Synthetic oligonucleotide
agactctcggctagaaatcgggtgtatgaggtagttga

SEQ ID NO: 19067 - DNA, 36 bp, Artificial Sequence
  Synthetic oligonucleotide
agagccctgtcagtcaaggcgttctccggggtatga

SEQ ID NO: 19068 - DNA, 35 bp, Artificial Sequence
  Synthetic oligonucleotide
agccgcatgcattatgggttagtgccgtgttttag

SEQ ID NO: 19069 - DNA, 35 bp, Artificial Sequence
  Synthetic oligonucleotide
aggtttgagtgacacttcagggcggaagggttgtc

SEQ ID NO: 19070 - DNA, 36 bp, Artificial Sequence
  Synthetic oligonucleotide
agtacgggagcatagtcatacggacagtgctgtata

SEQ ID NO: 19071 - DNA, 36 bp, Artificial Sequence
  Synthetic oligonucleotide
agtatctggcggggaaccagctccaggcaagcatca

SEQ ID NO: 19072 - DNA, 37 bp, Artificial Sequence
  Synthetic oligonucleotide
agtgagctggctataggccgatagttcattatcgaga

SEQ ID NO: 19073 - DNA, 38 bp, Artificial Sequence
  Synthetic oligonucleotide
agtgcaagtaggtgctcagtaattgcggatcttggtga

SEQ ID NO: 19074 - DNA, 37 bp, Artificial Sequence
  Synthetic oligonucleotide
agtgcatcccctggttgtgattttggggatacagtga

SEQ ID NO: 19075 - DNA, 37 bp, Artificial Sequence
  Synthetic oligonucleotide
agtggtacattgcagtttacgggcgtggtcaccaaga

SEQ ID NO: 19076 - DNA, 37 bp, Artificial Sequence
  Synthetic oligonucleotide
agttcgtcacccactagtatgtgccagtgtttgcgga

SEQ ID NO: 19077 - DNA, 37 bp, Artificial Sequence
  Synthetic oligonucleotide
agttctgggtgtacaacaggttcttagacctattaga

SEQ ID NO: 19078 - DNA, 36 bp, Artificial Sequence
  Synthetic oligonucleotide
ataagacttgggcgtggaaatgggcggctcttgaga

SEQ ID NO: 19079 - DNA, 36 bp, Artificial Sequence
  Synthetic oligonucleotide
atagaagttaggcctcccaaacgggtatttacacga

SEQ ID NO: 19080 - DNA, 36 bp, Artificial Sequence
  Synthetic oligonucleotide
atagtgcgttagaatggtttattttcgctgatcata

SEQ ID NO: 19081 - DNA, 35 bp, Artificial Sequence
  Synthetic oligonucleotide
atctgacaatagacgagaacgcttgcggacgaatt

SEQ ID NO: 19082 - DNA, 34 bp, Artificial Sequence
  Synthetic oligonucleotide
atgagcacgttcaaacgcttcagggcccggatcg

SEQ ID NO: 19083 - DNA, 34 bp, Artificial Sequence
  Synthetic oligonucleotide
attccgacagatcagtatcaggccccacgtatga

SEQ ID NO: 19084 - DNA, 37 bp, Artificial Sequence
  Synthetic oligonucleotide
attggacgtgttagataacgtagtgtatcgttacgga

SEQ ID NO: 19085 - DNA, 36 bp, Artificial Sequence
  Synthetic oligonucleotide
attggtcggaagtggactttttattcaattacacca

SEQ ID NO: 19086 - DNA, 38 bp, Artificial Sequence
  Synthetic oligonucleotide
caagatttacgaaaaacccttggattacggtatcttga

SEQ ID NO: 19087 - DNA, 36 bp, Artificial Sequence
  Synthetic oligonucleotide
cacgcaccggctcgagccctaggctgatcggtttca

SEQ ID NO: 19088 - DNA, 38 bp, Artificial Sequence
  Synthetic oligonucleotide
cataggaaactcccagttgttagcagatcacgcgttga

SEQ ID NO: 19089 - DNA, 36 bp, Artificial Sequence
  Synthetic oligonucleotide
ccaccggtcataggcaaatagcggtgtctgtggcca

SEQ ID NO: 19090 - DNA, 36 bp, Artificial Sequence
  Synthetic oligonucleotide
ccactacgggctggtcgcgactaggtaggtacttca

SEQ ID NO: 19091 - DNA, 36 bp, Artificial Sequence
  Synthetic oligonucleotide
cccacccgcgagactccccggcgcgggggggggaca

SEQ ID NO: 19092 - DNA, 37 bp, Artificial Sequence
  Synthetic oligonucleotide
ccccccccctgtgcattccgcaaaataccgatgtcga

SEQ ID NO: 19093 - DNA, 34 bp, Artificial Sequence
  Synthetic oligonucleotide
cccctttcgcggtcgatcgtgcataccgccttga

SEQ ID NO: 19094 - DNA, 38 bp, Artificial Sequence
  Synthetic oligonucleotide
cccgagttagtcatattgccccgctacgggaatactga

SEQ ID NO: 19095 - DNA, 36 bp, Artificial Sequence
  Synthetic oligonucleotide
ctggtaagcgtttgactttaccccgttagactgcta

SEQ ID NO: 19096 - DNA, 36 bp, Artificial Sequence
  Synthetic oligonucleotide
gaacgtgatgaggaaggtcagtcaattattgtgaca

SEQ ID NO: 19097 - DNA, 35 bp, Artificial Sequence
  Synthetic oligonucleotide
gaagcttggacgacagacgagatggggataacgga

SEQ ID NO: 19098 - DNA, 36 bp, Artificial Sequence
  Synthetic oligonucleotide
gaatgcaatcgttggctgaatagtatccgtggatga

SEQ ID NO: 19099 - DNA, 36 bp, Artificial Sequence
  Synthetic oligonucleotide
gactgacagtgttcaatattggatgcctcccttaga

SEQ ID NO: 19100 - DNA, 35 bp, Artificial Sequence
  Synthetic oligonucleotide
gactgcaagcattattcggttcggactcccccgct

SEQ ID NO: 19101 - DNA, 35 bp, Artificial Sequence
  Synthetic oligonucleotide
gagaaagtaaccacgtcttagagcacatgcaaccg

SEQ ID NO: 19102 - DNA, 36 bp, Artificial Sequence
  Synthetic oligonucleotide
gaggacccgatgtgtcatgctgacgtttcagcaggc

SEQ ID NO: 19103 - DNA, 35 bp, Artificial Sequence
  Synthetic oligonucleotide
gagttggggcagaattctcaggtgtacaccgctta

SEQ ID NO: 19104 - DNA, 35 bp, Artificial Sequence
  Synthetic oligonucleotide
gatagcacagcaccctggaggctactcacattcag

SEQ ID NO: 19105 - DNA, 37 bp, Artificial Sequence
  Synthetic oligonucleotide
gcaaccgctaatgtccgactcagccgatggccgagga

SEQ ID NO: 19106 - DNA, 37 bp, Artificial Sequence
  Synthetic oligonucleotide
gcacgtatagcgctaggtgatacgggcatgtaaagga

SEQ ID NO: 19107 - DNA, 37 bp, Artificial Sequence
  Synthetic oligonucleotide
gcagtagagagtaacagcaaattatggtttatcatga

SEQ ID NO: 19108 - DNA, 36 bp, Artificial Sequence
  Synthetic oligonucleotide
gcattagtagtgaagtcatgtcgaaccagttgacaa

SEQ ID NO: 19109 - DNA, 36 bp, Artificial Sequence
  Synthetic oligonucleotide
gccactagaatacaagtatagagcaaagttaagtta

SEQ ID NO: 19110 - DNA, 36 bp, Artificial Sequence
  Synthetic oligonucleotide
gccaggaggcatcagacgtgaacgtccgagtggcga

SEQ ID NO: 19111 - DNA, 36 bp, Artificial Sequence
  Synthetic oligonucleotide
gcccaatgctggttggcttgctgtaccaaagccaaa

SEQ ID NO: 19112 - DNA, 38 bp, Artificial Sequence
  Synthetic oligonucleotide
gcccgattccatctgagggtacgtcttcgtttcagtga

SEQ ID NO: 19113 - DNA, 36 bp, Artificial Sequence
  Synthetic oligonucleotide
gcccgccagacgccacgtggacgcctatcgtcacaa

SEQ ID NO: 19114 - DNA, 38 bp, Artificial Sequence
  Synthetic oligonucleotide
gcggggccatccacagtgattccccatgatcagtctga

SEQ ID NO: 19115 - DNA, 35 bp, Artificial Sequence
  Synthetic oligonucleotide
gcgtagatccaattgaggtcaccgccatgtacccg

SEQ ID NO: 19116 - DNA, 36 bp, Artificial Sequence
  Synthetic oligonucleotide
gcttccagtgctatatggactgctgacagcggagca

SEQ ID NO: 19117 - DNA, 37 bp, Artificial Sequence
  Synthetic oligonucleotide
ggaattgcatattattaaggacgcgaatgttatgcga

SEQ ID NO: 19118 - DNA, 37 bp, Artificial Sequence
  Synthetic oligonucleotide
ggaccggacacgccggttaacgttatttcggccctga

SEQ ID NO: 19119 - DNA, 37 bp, Artificial Sequence
  Synthetic oligonucleotide
ggagcacccgggaatggttggatgtccgcggggcgga

SEQ ID NO: 19120 - DNA, 35 bp, Artificial Sequence
  Synthetic oligonucleotide
ggatgaagatttaagcgtttgatgcacgggactga

SEQ ID NO: 19121 - DNA, 38 bp, Artificial Sequence
  Synthetic oligonucleotide
ggcacatgaggtatggggaaaactcaggtctgccttga

SEQ ID NO: 19122 - DNA, 37 bp, Artificial Sequence
  Synthetic oligonucleotide
ggggctcaaactcgcggcatccggacttagatggaga

SEQ ID NO: 19123 - DNA, 35 bp, Artificial Sequence
  Synthetic oligonucleotide
ggggtaccacatgttggaaggccgttcttgaagta

SEQ ID NO: 19124 - DNA, 37 bp, Artificial Sequence
  Synthetic oligonucleotide
gggtacgaaatacagcgtggagtcatggtctaatgga

SEQ ID NO: 19125 - DNA, 35 bp, Artificial Sequence
  Synthetic oligonucleotide
gggtgtcgtgctgcagtacttgggggtccatataa

SEQ ID NO: 19126 - DNA, 37 bp, Artificial Sequence
  Synthetic oligonucleotide
ggtcatttttcggtgcggacaatcaacgagcctcgga

SEQ ID NO: 19127 - DNA, 37 bp, Artificial Sequence
  Synthetic oligonucleotide
ggtctatcactcaggtttagagctataagaccaggga

SEQ ID NO: 19128 - DNA, 36 bp, Artificial Sequence
  Synthetic oligonucleotide
ggtctcatgaagtgtgatgggataaatccagggaaa

SEQ ID NO: 19129 - DNA, 37 bp, Artificial Sequence
  Synthetic oligonucleotide
ggtgcaggctaggttggataaagggtatggtttttga

SEQ ID NO: 19130 - DNA, 36 bp, Artificial Sequence
  Synthetic oligonucleotide
ggttagttacgtggtgggagatatcggtgaaccgga

SEQ ID NO: 19131 - DNA, 36 bp, Artificial Sequence
  Synthetic oligonucleotide
ggttgcccttgtgtaagtctggtatcccaatttcga

SEQ ID NO: 19132 - DNA, 37 bp, Artificial Sequence
  Synthetic oligonucleotide
gtaaggtgcaagtccacagagccgttatcgatcatga

SEQ ID NO: 19133 - DNA, 36 bp, Artificial Sequence
  Synthetic oligonucleotide
gtcaagagcctggcctgccacacgtgacggagcgta

SEQ ID NO: 19134 - DNA, 38 bp, Artificial Sequence
  Synthetic oligonucleotide
gtcagagttggcacttacgcgcaggttgtcatgtttga

SEQ ID NO: 19135 - DNA, 38 bp, Artificial Sequence
  Synthetic oligonucleotide
gtcatgggtcaagattgctttcgccaatgttcgagtga

SEQ ID NO: 19136 - DNA, 37 bp, Artificial Sequence
  Synthetic oligonucleotide
gtccttgaagaagagcacgctttcatggttccactga

SEQ ID NO: 19137 - DNA, 38 bp, Artificial Sequence
  Synthetic oligonucleotide
gtctatattgactgccgaaatatcgtatcgatctctga

SEQ ID NO: 19138 - DNA, 38 bp, Artificial Sequence
  Synthetic oligonucleotide
gtctcagagaaatacgtgcgggagacttgcaaagttga

SEQ ID NO: 19139 - DNA, 37 bp, Artificial Sequence
  Synthetic oligonucleotide
gtgactctgacctgataagtaccgaggcataggaaga

SEQ ID NO: 19140 - DNA, 36 bp, Artificial Sequence
  Synthetic oligonucleotide
gtgaggaacgtgcgttgatgccgcacgaggggttta

SEQ ID NO: 19141 - DNA, 38 bp, Artificial Sequence
  Synthetic oligonucleotide
gtgggattgcgtggctggactttcgcctatgttattga

SEQ ID NO: 19142 - DNA, 35 bp, Artificial Sequence
  Synthetic oligonucleotide
gtggttgggttgctccggctattggctgactgtaa

SEQ ID NO: 19143 - DNA, 37 bp, Artificial Sequence
  Synthetic oligonucleotide
gttactacggcgttaatccgctgaagattgctacgga

SEQ ID NO: 19144 - DNA, 35 bp, Artificial Sequence
  Synthetic oligonucleotide
gttgaacgtcgactcactggtaacactgatgtcaa

SEQ ID NO: 19145 - DNA, 38 bp, Artificial Sequence
  Synthetic oligonucleotide
gttgcacatgtgatttctgatgtccgcgtataatctga

SEQ ID NO: 19146 - DNA, 35 bp, Artificial Sequence
  Synthetic oligonucleotide
gtttatctggccatcattgagtcgaaggtgtgaag

SEQ ID NO: 19147 - DNA, 36 bp, Artificial Sequence
  Synthetic oligonucleotide
gtttcacatcggtaggtttataatgttaagggctta

SEQ ID NO: 19148 - DNA, 36 bp, Artificial Sequence
  Synthetic oligonucleotide
gtttggcataatttctgcacgttggagtcatacgga

SEQ ID NO: 19149 - DNA, 35 bp, Artificial Sequence
  Synthetic oligonucleotide
taaaagcgaaccaaggccgtactgtgcgttctgga

SEQ ID NO: 19150 - DNA, 35 bp, Artificial Sequence
  Synthetic oligonucleotide
tacaatggttctaccattctcttgcacttccgtcg

SEQ ID NO: 19151 - DNA, 36 bp, Artificial Sequence
  Synthetic oligonucleotide
taccatggtatgtttctgcccagatatttgtcctga

SEQ ID NO: 19152 - DNA, 37 bp, Artificial Sequence
  Synthetic oligonucleotide
tacccgcgggaaggcatgagagaccagttggactgga

SEQ ID NO: 19153 - DNA, 37 bp, Artificial Sequence
  Synthetic oligonucleotide
tactctgacgtggttaaatgtcctggactgaggggga

SEQ ID NO: 19154 - DNA, 36 bp, Artificial Sequence
  Synthetic oligonucleotide
tagaccgttgaatcgatctgtggccacatcattgca

SEQ ID NO: 19155 - DNA, 35 bp, Artificial Sequence
  Synthetic oligonucleotide
tagtccactcacaggtgatctatatgtggcttgtt

SEQ ID NO: 19156 - DNA, 38 bp, Artificial Sequence
  Synthetic oligonucleotide
tagtctgaatcaagcgccagccgtcgttagaggcttga

SEQ ID NO: 19157 - DNA, 35 bp, Artificial Sequence
  Synthetic oligonucleotide
tataagtacgggttatagatctctgctaggacctg

SEQ ID NO: 19158 - DNA, 36 bp, Artificial Sequence
  Synthetic oligonucleotide
tcaactaatgcacaggcattcagtgatgagggtgta

SEQ ID NO: 19159 - DNA, 37 bp, Artificial Sequence
  Synthetic oligonucleotide
tcaggccccgcaactgctatcaggccgcagtatacga

SEQ ID NO: 19160 - DNA, 36 bp, Artificial Sequence
  Synthetic oligonucleotide
tccgcacctaaggggagtaggtagattgagcgttca

SEQ ID NO: 19161 - DNA, 38 bp, Artificial Sequence
  Synthetic oligonucleotide
tccgggaatagcttcgtaccgagcgacgcactaggtga

SEQ ID NO: 19162 - DNA, 35 bp, Artificial Sequence
  Synthetic oligonucleotide
tcgatttacccccgtacaggtggactgctgaatcg

SEQ ID NO: 19163 - DNA, 35 bp, Artificial Sequence
  Synthetic oligonucleotide
tcgcaaccgaagcatattgccgtcaccacgaagat

SEQ ID NO: 19164 - DNA, 37 bp, Artificial Sequence
  Synthetic oligonucleotide
tgacgaagcgctgcacaagtaccacggtcgctaatga

SEQ ID NO: 19165 - DNA, 36 bp, Artificial Sequence
  Synthetic oligonucleotide
tggagggcatcatggtgggagccctgccgaaacgga

SEQ ID NO: 19166 - DNA, 35 bp, Artificial Sequence
  Synthetic oligonucleotide
tgggaaagcggtcattatctctgccacaactccac

SEQ ID NO: 19167 - DNA, 38 bp, Artificial Sequence
  Synthetic oligonucleotide
tgtggactgagttacgattatcaggcgccggactttga

SEQ ID NO: 19168 - DNA, 37 bp, Artificial Sequence
  Synthetic oligonucleotide
ttagggacatacagtctaaagagactatgcctgtgga

SEQ ID NO: 19169 - DNA, 35 bp, Artificial Sequence
  Synthetic oligonucleotide
ttatacttttcgacgttccgagcaatgttacgctg

SEQ ID NO: 19170 - DNA, 38 bp, Artificial Sequence
  Synthetic oligonucleotide
ttatgtccgcggacgtactccaacgactgggcgggtga

SEQ ID NO: 19171 - DNA, 35 bp, Artificial Sequence
  Synthetic oligonucleotide
ttccggtcacaacgatgcgaggaaacttactttgg

SEQ ID NO: 19172 - DNA, 38 bp, Artificial Sequence
  Synthetic oligonucleotide
ttctttcccggcaaaggggaatggtattcgttaactga

SEQ ID NO: 19173 - DNA, 38 bp, Artificial Sequence
  Synthetic oligonucleotide
ttgaaagtttggcctacgggggtggaaaggcggatcga

SEQ ID NO: 19174 - DNA, 36 bp, Artificial Sequence
  Synthetic oligonucleotide
ttgtcatgtggtactaaggaatgtccaaggtctaca

SEQ ID NO: 19175 - DNA, 38 bp, Artificial Sequence
  Synthetic oligonucleotide
ttgttgttccgcacactgtttgtagtgaacgacgatga

SEQ ID NO: 19176 - DNA, 36 bp, Artificial Sequence
  Synthetic oligonucleotide
tttaagccgcacgagacttaaaggcaacgttgcaga

SEQ ID NO: 19177 - DNA, 33 bp, Artificial Sequence
  Synthetic oligonucleotide
tttgtggtccaggacgcgaagttccggatcagt

SEQ ID NO: 19178 - DNA, 37 bp, Artificial Sequence
  Synthetic oligonucleotide
tacagcgcacttgagtcttgggctggctattgggtga

SEQ ID NO: 19179 - DNA, 35 bp, Artificial Sequence
  Synthetic oligonucleotide
tccatcaagtccgtggaaagtggaacgccatctac

SEQ ID NO: 19180 - DNA, 36 bp, Artificial Sequence
  Synthetic oligonucleotide
aaaacggagtcgagttcacggatggtagggacaata

SEQ ID NO: 19181 - DNA, 35 bp, Artificial Sequence
  Synthetic oligonucleotide
gtgccaaatgcatggtcaggattatcgccaggaca

SEQ ID NO: 19182 - DNA, 35 bp, Artificial Sequence
  Synthetic oligonucleotide
tcggttttgtaccttacgctggttttgaaagtgcg

SEQ ID NO: 19183 - DNA, 37 bp, Artificial Sequence
  Synthetic oligonucleotide
gaattgtcatggagtgtggtatgtaagggggtctgga

SEQ ID NO: 19184 - DNA, 35 bp, Artificial Sequence
  Synthetic oligonucleotide
tagtcctgctgtagattcaggtctgataaagtaca

SEQ ID NO: 19185 - DNA, 38 bp, Artificial Sequence
  Synthetic oligonucleotide
aaacacacgagcctgaagatgaggacgtgggtgtgtga

SEQ ID NO: 19186 - DNA, 36 bp, Artificial Sequence
  Synthetic oligonucleotide
aacatccgaatggcgggtacttcaaagcacctgtca

SEQ ID NO: 19187 - DNA, 35 bp, Artificial Sequence
  Synthetic oligonucleotide
aacgaaagggacctatgtttatgggcggacgttgc

SEQ ID NO: 19188 - DNA, 38 bp, Artificial Sequence
  Synthetic oligonucleotide
aagggaggttagggattaatggtgctatacgaagttga

SEQ ID NO: 19189 - DNA, 37 bp, Artificial Sequence
  Synthetic oligonucleotide
aagtaacgcagttggttcaggccttagattagatgga

SEQ ID NO: 19190 - DNA, 36 bp, Artificial Sequence
  Synthetic oligonucleotide
aagtagccaactcttgtgatgcgcccggacagtgga

SEQ ID NO: 19191 - DNA, 37 bp, Artificial Sequence
  Synthetic oligonucleotide
aagtctgtcattggtgtgggacctttggcgcccgtga

SEQ ID NO: 19192 - DNA, 36 bp, Artificial Sequence
  Synthetic oligonucleotide
aagtgcgggctggtggatgttttattgctatgcaca

SEQ ID NO: 19193 - DNA, 38 bp, Artificial Sequence
  Synthetic oligonucleotide
acacgaaaccgttaggtgggtgctgccgggttatctga

SEQ ID NO: 19194 - DNA, 37 bp, Artificial Sequence
  Synthetic oligonucleotide
acatgcacggtatagttgttggtattcttcgtcgaga

SEQ ID NO: 19195 - DNA, 36 bp, Artificial Sequence
  Synthetic oligonucleotide
accagagagcgcttaagggagcatgctcctgtccga

SEQ ID NO: 19196 - DNA, 36 bp, Artificial Sequence
  Synthetic oligonucleotide
acccgtagtcaaggactagataattactgcacttaa

SEQ ID NO: 19197 - DNA, 38 bp, Artificial Sequence
  Synthetic oligonucleotide
acgcataggatgtattgggtttcgaaggtaaacgctga

SEQ ID NO: 19198 - DNA, 35 bp, Artificial Sequence
  Synthetic oligonucleotide
acgctcaataccgcgtgaaacgcctattcttgcag

SEQ ID NO: 19199 - DNA, 38 bp, Artificial Sequence
  Synthetic oligonucleotide
actagtgacgttaggaattagactataccgtctaatga

SEQ ID NO: 19200 - DNA, 36 bp, Artificial Sequence
  Synthetic oligonucleotide
actgaatcacgaagtaagtcgtcacggatggagtca

SEQ ID NO: 19201 - DNA, 37 bp, Artificial Sequence
  Synthetic oligonucleotide
agaacggtctgagggaggtggcaacggttaaatctga

SEQ ID NO: 19202 - DNA, 36 bp, Artificial Sequence
  Synthetic oligonucleotide
agaggcattaaaagtgcggggcttgagctgtgatca

SEQ ID NO: 19203 - DNA, 35 bp, Artificial Sequence
  Synthetic oligonucleotide
agatccttccgggccggctattaatagaggtctgt

SEQ ID NO: 19204 - DNA, 35 bp, Artificial Sequence
  Synthetic oligonucleotide
agatgagcgagggctccgcatgctccgtgacaaaa

SEQ ID NO: 19205 - DNA, 37 bp, Artificial Sequence
  Synthetic oligonucleotide
agatttgtcgtggatcctgtgtccatgtgggttgcga

SEQ ID NO: 19206 - DNA, 37 bp, Artificial Sequence
  Synthetic oligonucleotide
agcaatgctatcatagcatataagtgcaatagtatga

SEQ ID NO: 19207 - DNA, 38 bp, Artificial Sequence
  Synthetic oligonucleotide
agccacaggcgacggttcataacgtagtgaggggatga

SEQ ID NO: 19208 - DNA, 37 bp, Artificial Sequence
  Synthetic oligonucleotide
agcctgcctcacggggttccgtttaaaccgtaaatga

SEQ ID NO: 19209 - DNA, 35 bp, Artificial Sequence
  Synthetic oligonucleotide
agtacaccggtgatccgcttacacgcatagggtcc

SEQ ID NO: 19210 - DNA, 37 bp, Artificial Sequence
  Synthetic oligonucleotide
agtatgtgccttagcaaatagcggggcgacgatctga

SEQ ID NO: 19211 - DNA, 38 bp, Artificial Sequence
  Synthetic oligonucleotide
agtgcctggtcaaattggcgatgaaacagtggctatga

SEQ ID NO: 19212 - DNA, 35 bp, Artificial Sequence
  Synthetic oligonucleotide
atgctacgactgctgggacatgaactaagggacac

SEQ ID NO: 19213 - DNA, 38 bp, Artificial Sequence
  Synthetic oligonucleotide
atggaataccgggcgggtacagactcgccggaccatga

SEQ ID NO: 19214 - DNA, 35 bp, Artificial Sequence
  Synthetic oligonucleotide
atggcgcacttgttggcgcaatactgcccttgtgg

SEQ ID NO: 19215 - DNA, 35 bp, Artificial Sequence
  Synthetic oligonucleotide
atgtagctcgatcaatgggtgaggacggcacgaag

SEQ ID NO: 19216 - DNA, 37 bp, Artificial Sequence
  Synthetic oligonucleotide
atgttctggattgagccgacagtgtgtagaggggaga

SEQ ID NO: 19217 - DNA, 35 bp, Artificial Sequence
  Synthetic oligonucleotide
attagataggcggattgcccgtaactacagactgt

SEQ ID NO: 19218 - DNA, 35 bp, Artificial Sequence
  Synthetic oligonucleotide
attagtcaaaccttgtcgggctggagatactacat

SEQ ID NO: 19219 - DNA, 36 bp, Artificial Sequence
  Synthetic oligonucleotide
attgttcgattgcaatatggactactgtattggtaa

SEQ ID NO: 19220 - DNA, 38 bp, Artificial Sequence
  Synthetic oligonucleotide
catgccagagtaaggccatagacgccacgaatatgtga

SEQ ID NO: 19221 - DNA, 37 bp, Artificial Sequence
  Synthetic oligonucleotide
ccttggtgacgcgagggactacggctcatatacttga

SEQ ID NO: 19222 - DNA, 37 bp, Artificial Sequence
  Synthetic oligonucleotide
cgcgtatgttaaattttgtaatcaaggtcgggttcga

SEQ ID NO: 19223 - DNA, 35 bp, Artificial Sequence
  Synthetic oligonucleotide
ctggtcatatcagtctactgatagaccacactaag

SEQ ID NO: 19224 - DNA, 33 bp, Artificial Sequence
  Synthetic oligonucleotide
gaaataccggggtctcgatcctgagtatcattg

SEQ ID NO: 19225 - DNA, 35 bp, Artificial Sequence
  Synthetic oligonucleotide
gaagtgtcaagggtcatcgctacggccacataggt

SEQ ID NO: 19226 - DNA, 38 bp, Artificial Sequence
  Synthetic oligonucleotide
gaatcactaggctagaagcgttcttgttatgctcttga

SEQ ID NO: 19227 - DNA, 38 bp, Artificial Sequence
  Synthetic oligonucleotide
gacaacttggtatttccggatcgttgagtgggccctga

SEQ ID NO: 19228 - DNA, 35 bp, Artificial Sequence
  Synthetic oligonucleotide
gaccatgtgatggacaatgtcgcgccacgatcagc

SEQ ID NO: 19229 - DNA, 35 bp, Artificial Sequence
  Synthetic oligonucleotide
gagtggttcacggtagtgccggtagttacccatac

SEQ ID NO: 19230 - DNA, 37 bp, Artificial Sequence
  Synthetic oligonucleotide
gatactactggacggactggacatcttaaaagtcgga

SEQ ID NO: 19231 - DNA, 35 bp, Artificial Sequence
  Synthetic oligonucleotide
gatataattacgtgtatcagtggccatgcatatgc

SEQ ID NO: 19232 - DNA, 38 bp, Artificial Sequence
  Synthetic oligonucleotide
gatggtctacaagcgcactccattgcgtaaatgtgtga

SEQ ID NO: 19233 - DNA, 36 bp, Artificial Sequence
  Synthetic oligonucleotide
gattgtcagcttgagtcttggtgagtataccacgta

SEQ ID NO: 19234 - DNA, 37 bp, Artificial Sequence
  Synthetic oligonucleotide
gcaaaaatcgaaacaaagctcttattgtggtatagga

SEQ ID NO: 19235 - DNA, 38 bp, Artificial Sequence
  Synthetic oligonucleotide
gcaatacgactggtgaacatgccgatggtgtgttgtga

SEQ ID NO: 19236 - DNA, 35 bp, Artificial Sequence
  Synthetic oligonucleotide
gcaattgagccgaggggtgtagtacctcgtggctc

SEQ ID NO: 19237 - DNA, 35 bp, Artificial Sequence
  Synthetic oligonucleotide
gcaggacggaccgcttggaccgaggacactggcgc

SEQ ID NO: 19238 - DNA, 37 bp, Artificial Sequence
  Synthetic oligonucleotide
gcattttcgacaggacggctatatccggacgagccga

SEQ ID NO: 19239 - DNA, 36 bp, Artificial Sequence
  Synthetic oligonucleotide
gcctgacagtctcggatcgcgattagccacacttaa

SEQ ID NO: 19240 - DNA, 36 bp, Artificial Sequence
  Synthetic oligonucleotide
gcctggtaaatggtaatttccgatgtcgataaaata

SEQ ID NO: 19241 - DNA, 38 bp, Artificial Sequence
  Synthetic oligonucleotide
gcgattgtgttcaggctagggccgaaggcaaggattga

SEQ ID NO: 19242 - DNA, 37 bp, Artificial Sequence
  Synthetic oligonucleotide
gctaatgacatctcgctagttcatcatcacttagtga

SEQ ID NO: 19243 - DNA, 35 bp, Artificial Sequence
  Synthetic oligonucleotide
gctactggttacgaaacttgtgtgatgcgtatttt

SEQ ID NO: 19244 - DNA, 37 bp, Artificial Sequence
  Synthetic oligonucleotide
gctgagtctaggcagttagcgagttgtcatgtccgga

SEQ ID NO: 19245 - DNA, 35 bp, Artificial Sequence
  Synthetic oligonucleotide
ggacgacttgtgtcccgaatgtacgtagttcgttt

SEQ ID NO: 19246 - DNA, 35 bp, Artificial Sequence
  Synthetic oligonucleotide
ggactgaatgggcatacctttgagttcggtgaatg

SEQ ID NO: 19247 - DNA, 38 bp, Artificial Sequence
  Synthetic oligonucleotide
ggactgggagttgttaatccgaatgtacaaaaacgtga

SEQ ID NO: 19248 - DNA, 36 bp, Artificial Sequence
  Synthetic oligonucleotide
ggccacgcaccgaagtcaatgtgccttttacactta

SEQ ID NO: 19249 - DNA, 37 bp, Artificial Sequence
  Synthetic oligonucleotide
ggctacgccccctttccaattggtgtattttacctga

SEQ ID NO: 19250 - DNA, 34 bp, Artificial Sequence
  Synthetic oligonucleotide
ggggcgcattcaagctcgattcgatacagcacaa

SEQ ID NO: 19251 - DNA, 36 bp, Artificial Sequence
  Synthetic oligonucleotide
gggtacgcaggagcactcgtgttacgttagcttgta

SEQ ID NO: 19252 - DNA, 36 bp, Artificial Sequence
  Synthetic oligonucleotide
ggtcattatatgaggtaatatctgcccctccgtgca

SEQ ID NO: 19253 - DNA, 38 bp, Artificial Sequence
  Synthetic oligonucleotide
ggtgctggaggtaactcggtcatgaggatgctgggtga

SEQ ID NO: 19254 - DNA, 38 bp, Artificial Sequence
  Synthetic oligonucleotide
gtaaggcctagctgcattggttgtcttgtacggcttga

SEQ ID NO: 19255 - DNA, 35 bp, Artificial Sequence
  Synthetic oligonucleotide
gtacggcttcttgatattttagattcctgatagca

SEQ ID NO: 19256 - DNA, 38 bp, Artificial Sequence
  Synthetic oligonucleotide
gtagagagggcgtatgtccgcatcggaagtattcgtga

SEQ ID NO: 19257 - DNA, 35 bp, Artificial Sequence
  Synthetic oligonucleotide
gtagattatgattacggctgaacgtaggtagttag

SEQ ID NO: 19258 - DNA, 35 bp, Artificial Sequence
  Synthetic oligonucleotide
gtatgctggtctgttgtttggtgctgatacggggg

SEQ ID NO: 19259 - DNA, 35 bp, Artificial Sequence
  Synthetic oligonucleotide
gtattctgggctgatgccgaaagtctatgtgccaa

SEQ ID NO: 19260 - DNA, 36 bp, Artificial Sequence
  Synthetic oligonucleotide
gtcccctgtggctttagtaatgtatcacaccgttca

SEQ ID NO: 19261 - DNA, 38 bp, Artificial Sequence
  Synthetic oligonucleotide
gtgaaaacacccgaccgccgagatgtgttaaatgctga

SEQ ID NO: 19262 - DNA, 36 bp, Artificial Sequence
  Synthetic oligonucleotide
gtgcctggacgtttcggtctgccacgagttcctgaa

SEQ ID NO: 19263 - DNA, 35 bp, Artificial Sequence
  Synthetic oligonucleotide
gtggaatgtatgctcccccaaggccgctttggaaa

SEQ ID NO: 19264 - DNA, 35 bp, Artificial Sequence
  Synthetic oligonucleotide
gtggtcccacgtatacggcggagtacgtgacacta

SEQ ID NO: 19265 - DNA, 37 bp, Artificial Sequence
  Synthetic oligonucleotide
gtgtgtctgacgggtcgttggccacacgagtatggga

SEQ ID NO: 19266 - DNA, 35 bp, Artificial Sequence
  Synthetic oligonucleotide
gttatcgagattgagggtgtcaatctaagacgcgt

SEQ ID NO: 19267 - DNA, 36 bp, Artificial Sequence
  Synthetic oligonucleotide
gttcaataattgaccgttagctagccatgtaggtga

SEQ ID NO: 19268 - DNA, 37 bp, Artificial Sequence
  Synthetic oligonucleotide
gttcggaggccccactcagactgaagcgtagaaagga

SEQ ID NO: 19269 - DNA, 38 bp, Artificial Sequence
  Synthetic oligonucleotide
gttgacgaggtcaacgccccgggcgtcttgtaacctga

SEQ ID NO: 19270 - DNA, 37 bp, Artificial Sequence
  Synthetic oligonucleotide
gttggaaatgtggcctgggggctactttcttgttgga

SEQ ID NO: 19271 - DNA, 35 bp, Artificial Sequence
  Synthetic oligonucleotide
gttttccgcaagctgagacaacatggtagtagtag

SEQ ID NO: 19272 - DNA, 37 bp, Artificial Sequence
  Synthetic oligonucleotide
gttttggccgggaatgaggggtgtaaacctggtatga

SEQ ID NO: 19273 - DNA, 36 bp, Artificial Sequence
  Synthetic oligonucleotide
taacagtcggtgtaatacgctgtgagaaagccagta

SEQ ID NO: 19274 - DNA, 37 bp, Artificial Sequence
  Synthetic oligonucleotide
taagaacgtggcccaaacccaaacccccacgcttgga

SEQ ID NO: 19275 - DNA, 36 bp, Artificial Sequence
  Synthetic oligonucleotide
tacagagatcaattgaggtccattcgcaagggacta

SEQ ID NO: 19276 - DNA, 36 bp, Artificial Sequence
  Synthetic oligonucleotide
tacgccgaagcttgagcgcgggtgagtccgtcgtta

SEQ ID NO: 19277 - DNA, 35 bp, Artificial Sequence
  Synthetic oligonucleotide
tagccaatgaaaggaaacttttgggagtacacggc

SEQ ID NO: 19278 - DNA, 36 bp, Artificial Sequence
  Synthetic oligonucleotide
tagtatgctggtagatgagcagattgacggtcttga

SEQ ID NO: 19279 - DNA, 38 bp, Artificial Sequence
  Synthetic oligonucleotide
tagtgaatcgggtagctttgtgcgcgggtcacatctga

SEQ ID NO: 19280 - DNA, 35 bp, Artificial Sequence
  Synthetic oligonucleotide
tagtggagggggcgccagaggctccctataataag

SEQ ID NO: 19281 - DNA, 37 bp, Artificial Sequence
  Synthetic oligonucleotide
tagttcgcttggaatattgaccgaacagtcaagtgga

SEQ ID NO: 19282 - DNA, 36 bp, Artificial Sequence
  Synthetic oligonucleotide
tatcggttccactggtttgttcggaacatggcgaga

SEQ ID NO: 19283 - DNA, 35 bp, Artificial Sequence
  Synthetic oligonucleotide
tatgacggaccagagtggacagggtactgctacaa

SEQ ID NO: 19284 - DNA, 37 bp, Artificial Sequence
  Synthetic oligonucleotide
tcacattgagttgtaactagatggagatgtggcggga

SEQ ID NO: 19285 - DNA, 38 bp, Artificial Sequence
  Synthetic oligonucleotide
tccgctctgacgaccggatcatcctttcgccgatatga

SEQ ID NO: 19286 - DNA, 36 bp, Artificial Sequence
  Synthetic oligonucleotide
tccttgctagtaagtcgttgacaatctctcaggtca

SEQ ID NO: 19287 - DNA, 36 bp, Artificial Sequence
  Synthetic oligonucleotide
tcgatgaaacgggaacgctctaggagctgagactga

SEQ ID NO: 19288 - DNA, 37 bp, Artificial Sequence
  Synthetic oligonucleotide
tctcactactgtaacgattgctgggtcctgttagtga

SEQ ID NO: 19289 - DNA, 35 bp, Artificial Sequence
  Synthetic oligonucleotide
tgaaattctgaggccagcgaagtgttttaaccttt

SEQ ID NO: 19290 - DNA, 38 bp, Artificial Sequence
  Synthetic oligonucleotide
tgctcactaaagcctgactggagaacggtacgtagtga

SEQ ID NO: 19291 - DNA, 38 bp, Artificial Sequence
  Synthetic oligonucleotide
tgcttcactgtctatcacgagatctatccggtgcgtga

SEQ ID NO: 19292 - DNA, 36 bp, Artificial Sequence
  Synthetic oligonucleotide
tggactacttgggtgctaaagttaccggatactaaa

SEQ ID NO: 19293 - DNA, 36 bp, Artificial Sequence
  Synthetic oligonucleotide
tgtgggacccgctaccaggttttcaactctgttgca

SEQ ID NO: 19294 - DNA, 38 bp, Artificial Sequence
  Synthetic oligonucleotide
ttactgagctactgggcaacactagagacggcccctga

SEQ ID NO: 19295 - DNA, 36 bp, Artificial Sequence
  Synthetic oligonucleotide
ttagaagtcctggccatggctacagtgcctagggca

SEQ ID NO: 19296 - DNA, 37 bp, Artificial Sequence
  Synthetic oligonucleotide
ttccgagcgacctcgggtcgacatacgcagacctgga

SEQ ID NO: 19297 - DNA, 37 bp, Artificial Sequence
  Synthetic oligonucleotide
ttcgcttgattgctccccttgagactagagcgcgaga

SEQ ID NO: 19298 - DNA, 37 bp, Artificial Sequence
  Synthetic oligonucleotide
ttggcaacgcgtactccgaggacaagttgtgcggaga

SEQ ID NO: 19299 - DNA, 38 bp, Artificial Sequence
  Synthetic oligonucleotide
tttgctagcaccttgtcactaagattgagtccatgtga

SEQ ID NO: 19300 - DNA, 36 bp, Artificial Sequence
  Synthetic oligonucleotide
ttttccctctgcgtgtgcccagccggcggagccggg

SEQ ID NO: 19301 - DNA, 37 bp, Artificial Sequence
  Synthetic oligonucleotide
acattcggactcccctacggactggggccggctagga

SEQ ID NO: 19302 - DNA, 36 bp, Artificial Sequence
  Synthetic oligonucleotide
acttcgagtacaggcaaagtagtgtgatacgctaga

SEQ ID NO: 19303 - DNA, 37 bp, Artificial Sequence
  Synthetic oligonucleotide
aagtgcgcacaggcaaaacgcctccctttctcgaaga

SEQ ID NO: 19304 - DNA, 35 bp, Artificial Sequence
  Synthetic oligonucleotide
gacaagcaaggatatcataaacgtcgtctgatacc

SEQ ID NO: 19305 - DNA, 38 bp, Artificial Sequence
  Synthetic oligonucleotide
gtccgtgttgtgatcgtggcccagataacagacgctga

SEQ ID NO: 19306 - DNA, 37 bp, Artificial Sequence
  Synthetic oligonucleotide
ttactgccccggaggaactgcatggaatacattggga

SEQ ID NO: 19307 - DNA, 36 bp, Artificial Sequence
  Synthetic oligonucleotide
aaacgctgctttggtaacgcgatggctgctccggta

SEQ ID NO: 19308 - DNA, 38 bp, Artificial Sequence
  Synthetic oligonucleotide
aaactgattgagcgtgagacaggcatttccatttttga

SEQ ID NO: 19309 - DNA, 37 bp, Artificial Sequence
  Synthetic oligonucleotide
aagtctgttctcgtgcgacagtttaatgcttcccgga

SEQ ID NO: 19310 - DNA, 37 bp, Artificial Sequence
  Synthetic oligonucleotide
aatcgcgaatactgggacagccatgcatctaacagga

SEQ ID NO: 19311 - DNA, 38 bp, Artificial Sequence
  Synthetic oligonucleotide
acacgttgccacctcggctagaggcacatcttcgttga

SEQ ID NO: 19312 - DNA, 38 bp, Artificial Sequence
  Synthetic oligonucleotide
acatggggaaggtgttggcaagcaatgatgtacgttga

SEQ ID NO: 19313 - DNA, 36 bp, Artificial Sequence
  Synthetic oligonucleotide
acgtcgtccgttcgtcatgaatgcctagccttggca

SEQ ID NO: 19314 - DNA, 36 bp, Artificial Sequence
  Synthetic oligonucleotide
actaaagtatgcacgtaccccatagatttgggagta

SEQ ID NO: 19315 - DNA, 35 bp, Artificial Sequence
  Synthetic oligonucleotide
actaaccactgcaggggtatgatattccagagtta

SEQ ID NO: 19316 - DNA, 35 bp, Artificial Sequence
  Synthetic oligonucleotide
acttgtcatgcggagggtgggtatgtgttagtagc

SEQ ID NO: 19317 - DNA, 37 bp, Artificial Sequence
  Synthetic oligonucleotide
agaatcagcaggacaaacatcgattggacttggttga

SEQ ID NO: 19318 - DNA, 37 bp, Artificial Sequence
  Synthetic oligonucleotide
agacaggctacgcaatcgcattgtggagaaagaggga

SEQ ID NO: 19319 - DNA, 36 bp, Artificial Sequence
  Synthetic oligonucleotide
agacagtgttccgttacgcaggcggttttggaacga

SEQ ID NO: 19320 - DNA, 35 bp, Artificial Sequence
  Synthetic oligonucleotide
agatcgtggaacgtccgtcctaggttgagtgagtt

SEQ ID NO: 19321 - DNA, 35 bp, Artificial Sequence
  Synthetic oligonucleotide
aggaaccgcttctcccatggttgagaccgatctat

SEQ ID NO: 19322 - DNA, 36 bp, Artificial Sequence
  Synthetic oligonucleotide
atactaggagccggggtacaaaatacatgtgcctga

SEQ ID NO: 19323 - DNA, 38 bp, Artificial Sequence
  Synthetic oligonucleotide
ataggagattaaccgttgtaaacgcagtccatggatga

SEQ ID NO: 19324 - DNA, 36 bp, Artificial Sequence
  Synthetic oligonucleotide
atcagaacggatgtgaacccaaggtcgttattcaca

SEQ ID NO: 19325 - DNA, 38 bp, Artificial Sequence
  Synthetic oligonucleotide
atgtactaactgtaggcgtggccacgctctcgtggtga

SEQ ID NO: 19326 - DNA, 35 bp, Artificial Sequence
  Synthetic oligonucleotide
attagtgtccttgtggttcggagagattcaggaca

SEQ ID NO: 19327 - DNA, 36 bp, Artificial Sequence
  Synthetic oligonucleotide
attatgtcgtgcataggatggactataaagggtata

SEQ ID NO: 19328 - DNA, 35 bp, Artificial Sequence
  Synthetic oligonucleotide
attccccttgccagtctatcgggacgggcttacag

SEQ ID NO: 19329 - DNA, 37 bp, Artificial Sequence
  Synthetic oligonucleotide
attccctagatcgcctgttgatgggataagttgtaga

SEQ ID NO: 19330 - DNA, 35 bp, Artificial Sequence
  Synthetic oligonucleotide
attgagcgaacgggtaattaagttccgtatacaga

SEQ ID NO: 19331 - DNA, 37 bp, Artificial Sequence
  Synthetic oligonucleotide
attgagtcgcacttagtgttgtaatctggcgattaga

SEQ ID NO: 19332 - DNA, 37 bp, Artificial Sequence
  Synthetic oligonucleotide
caacgagaggcccggaaggaggccgtaatcggtgaga

SEQ ID NO: 19333 - DNA, 36 bp, Artificial Sequence
  Synthetic oligonucleotide
caatcggccctacggaccatgctaggcaaccaaata

SEQ ID NO: 19334 - DNA, 38 bp, Artificial Sequence
  Synthetic oligonucleotide
cacgttgataggcctgcgtacatgggcttacaaattga

SEQ ID NO: 19335 - DNA, 37 bp, Artificial Sequence
  Synthetic oligonucleotide
cacttcagtcggagttacgtatttgactctgactcga

SEQ ID NO: 19336 - DNA, 37 bp, Artificial Sequence
  Synthetic oligonucleotide
catggataccaaagcaggcattcgcatgatctaacga

SEQ ID NO: 19337 - DNA, 37 bp, Artificial Sequence
  Synthetic oligonucleotide
cccaaaagtgcctgatcagtgatagggcgggttcgga

SEQ ID NO: 19338 - DNA, 36 bp, Artificial Sequence
  Synthetic oligonucleotide
cctgagttctccgaagttatggggcgaaactcgcta

SEQ ID NO: 19339 - DNA, 37 bp, Artificial Sequence
  Synthetic oligonucleotide
cgcaaaaccagtagcaaattattttggtactctccga

SEQ ID NO: 19340 - DNA, 35 bp, Artificial Sequence
  Synthetic oligonucleotide
ctgtgtggcgtagtgtgagaatatttctctgttta

SEQ ID NO: 19341 - DNA, 37 bp, Artificial Sequence
  Synthetic oligonucleotide
gaacttgtatcgcaattcctggcgccatactcgacga

SEQ ID NO: 19342 - DNA, 38 bp, Artificial Sequence
  Synthetic oligonucleotide
gacctcgccgactcatacgggtaggtgataccgtatga

SEQ ID NO: 19343 - DNA, 38 bp, Artificial Sequence
  Synthetic oligonucleotide
gaggaacgtattggtggtcgtatcgttccgtacgatga

SEQ ID NO: 19344 - DNA, 35 bp, Artificial Sequence
  Synthetic oligonucleotide
gagtaggtagcatagcgtcgccgacgttaggttcc

SEQ ID NO: 19345 - DNA, 35 bp, Artificial Sequence
  Synthetic oligonucleotide
gagttgggagttcctgctaagttgagacgcacggg

SEQ ID NO: 19346 - DNA, 35 bp, Artificial Sequence
  Synthetic oligonucleotide
gatatactcggtcggcctgcaattcacttcgcagg

SEQ ID NO: 19347 - DNA, 36 bp, Artificial Sequence
  Synthetic oligonucleotide
gatcatatatcacggtacgcaatggctctggggaga

SEQ ID NO: 19348 - DNA, 36 bp, Artificial Sequence
  Synthetic oligonucleotide
gcaactcataagtaatctaggattgcaaccacgtga

SEQ ID NO: 19349 - DNA, 35 bp, Artificial Sequence
  Synthetic oligonucleotide
gcacaacgatagtcaactatcctcttccatttaag

SEQ ID NO: 19350 - DNA, 38 bp, Artificial Sequence
  Synthetic oligonucleotide
gcacagccaggtcgagcgcttagctgtacaaaagctga

SEQ ID NO: 19351 - DNA, 33 bp, Artificial Sequence
  Synthetic oligonucleotide
gcatgaccggtctgttgtacatgcgtgtcagga

SEQ ID NO: 19352 - DNA, 36 bp, Artificial Sequence
  Synthetic oligonucleotide
gcatgtttatattttccgcaaatgattggccgggga

SEQ ID NO: 19353 - DNA, 37 bp, Artificial Sequence
  Synthetic oligonucleotide
gcccatctcgatgtataggtgggatgggcaaacctga

SEQ ID NO: 19354 - DNA, 35 bp, Artificial Sequence
  Synthetic oligonucleotide
gcccgcctacccggcttcgagggcttgacatatag

SEQ ID NO: 19355 - DNA, 38 bp, Artificial Sequence
  Synthetic oligonucleotide
gccgggaggggaggtagagcgctgccttccgggaatga

SEQ ID NO: 19356 - DNA, 35 bp, Artificial Sequence
  Synthetic oligonucleotide
gcgaatatgccctgtgggtcccatcttggaatgaa

SEQ ID NO: 19357 - DNA, 37 bp, Artificial Sequence
  Synthetic oligonucleotide
gcgggattaggctttcccgtgaacgttcattatagga

SEQ ID NO: 19358 - DNA, 37 bp, Artificial Sequence
  Synthetic oligonucleotide
gctggaaataagaaaacaatatcgattatccccccga

SEQ ID NO: 19359 - DNA, 38 bp, Artificial Sequence
  Synthetic oligonucleotide
ggacaaacatgtggggtctctgccacggacttggatga

SEQ ID NO: 19360 - DNA, 36 bp, Artificial Sequence
  Synthetic oligonucleotide
ggagccttggcagaaagttcccaactggcacagtca

SEQ ID NO: 19361 - DNA, 35 bp, Artificial Sequence
  Synthetic oligonucleotide
gggtacctagattgtgcggcctgaacggtctacgt

SEQ ID NO: 19362 - DNA, 37 bp, Artificial Sequence
  Synthetic oligonucleotide
gggtccggactcaatatcgtgcggggcaatcattgga

SEQ ID NO: 19363 - DNA, 36 bp, Artificial Sequence
  Synthetic oligonucleotide
ggtgaacactcccgtagatttagacctaaggggaga

SEQ ID NO: 19364 - DNA, 35 bp, Artificial Sequence
  Synthetic oligonucleotide
gtaatggagagcaccgtctgactacgtacggggcc

SEQ ID NO: 19365 - DNA, 38 bp, Artificial Sequence
  Synthetic oligonucleotide
gtcagttcttcactttcctctgcagagatctgttttga

SEQ ID NO: 19366 - DNA, 38 bp, Artificial Sequence
  Synthetic oligonucleotide
gtctctacatcaacgagcgcccaggcgaaacagtatga

SEQ ID NO: 19367 - DNA, 35 bp, Artificial Sequence
  Synthetic oligonucleotide
gtgctgcatcttaccccccgcgctgaaccgagaag

SEQ ID NO: 19368 - DNA, 36 bp, Artificial Sequence
  Synthetic oligonucleotide
gtgtccgcgggaaatgatagggggtcttgcccccaa

SEQ ID NO: 19369 - DNA, 37 bp, Artificial Sequence
  Synthetic oligonucleotide
gttagtcgggtcgtgcgcttacgggtgctctaagcga

SEQ ID NO: 19370 - DNA, 37 bp, Artificial Sequence
  Synthetic oligonucleotide
gttccatgcgaacattggcgtgttatcgaagatcgga

SEQ ID NO: 19371 - DNA, 37 bp, Artificial Sequence
  Synthetic oligonucleotide
gttccctgacgtgtcatgatcgcgaaacagtgtgcga

SEQ ID NO: 19372 - DNA, 38 bp, Artificial Sequence
  Synthetic oligonucleotide
taacggttgtccgcgattcatgagtttttgttaagtga

SEQ ID NO: 19373 - DNA, 35 bp, Artificial Sequence
  Synthetic oligonucleotide
tacaacgtccatggtagatttgcgttgcttttgag

SEQ ID NO: 19374 - DNA, 38 bp, Artificial Sequence
  Synthetic oligonucleotide
taggtcgaaggtaatggggtaaatgaaggttggcttga

SEQ ID NO: 19375 - DNA, 35 bp, Artificial Sequence
  Synthetic oligonucleotide
tagtagaatcagatttgaggtatgatcgccatttc

SEQ ID NO: 19376 - DNA, 36 bp, Artificial Sequence
  Synthetic oligonucleotide
tatagtccgacgccttaggggtccttgaggctagaa

SEQ ID NO: 19377 - DNA, 37 bp, Artificial Sequence
  Synthetic oligonucleotide
tcaagaaacgtggtttcgcacagtatcgcgctgaaga

SEQ ID NO: 19378 - DNA, 38 bp, Artificial Sequence
  Synthetic oligonucleotide
tcacagggcgatttctagacgcggcgaagcttacgtga

SEQ ID NO: 19379 - DNA, 37 bp, Artificial Sequence
  Synthetic oligonucleotide
tcatagccgtgttgtcgcttaacttgaataagtccga

SEQ ID NO: 19380 - DNA, 37 bp, Artificial Sequence
  Synthetic oligonucleotide
tccaggatctgtgaaaattacagcatccggccatcga

SEQ ID NO: 19381 - DNA, 37 bp, Artificial Sequence
  Synthetic oligonucleotide
tcgtaagccaattgttaagcgagttgcttttagatga

SEQ ID NO: 19382 - DNA, 35 bp, Artificial Sequence
  Synthetic oligonucleotide
tgacttcggcggtcgaacatggtgaacatagtatc

SEQ ID NO: 19383 - DNA, 38 bp, Artificial Sequence
  Synthetic oligonucleotide
tgctctagtcagtggattaactgcctcgggtggggtga

SEQ ID NO: 19384 - DNA, 36 bp, Artificial Sequence
  Synthetic oligonucleotide
tgggaatgcaacccttggctccatttgaggtgccta

SEQ ID NO: 19385 - DNA, 38 bp, Artificial Sequence
  Synthetic oligonucleotide
tgtacgatagagagattagacaccacccttgttagtga

SEQ ID NO: 19386 - DNA, 37 bp, Artificial Sequence
  Synthetic oligonucleotide
tgtatgatatcaccagctgggatgggatatgcttaga

SEQ ID NO: 19387 - DNA, 36 bp, Artificial Sequence
  Synthetic oligonucleotide
tgtctagtggcgcgaaggccctttgattgtgagcca

SEQ ID NO: 19388 - DNA, 36 bp, Artificial Sequence
  Synthetic oligonucleotide
tgttctaggttggcaccacatctggactgcgattta

SEQ ID NO: 19389 - DNA, 36 bp, Artificial Sequence
  Synthetic oligonucleotide
ttaaggcttgctaaacttttatcgcgcatgctacca

SEQ ID NO: 19390 - DNA, 38 bp, Artificial Sequence
  Synthetic oligonucleotide
ttacaacgctgcacaccgtgtggtaaccagagtagtga

SEQ ID NO: 19391 - DNA, 38 bp, Artificial Sequence
  Synthetic oligonucleotide
ttaggtaagatctgaaacggacctgaacgctgtgttga

SEQ ID NO: 19392 - DNA, 35 bp, Artificial Sequence
  Synthetic oligonucleotide
ttagtaaaagggccatcgacaagggactgcaacat

SEQ ID NO: 19393 - DNA, 35 bp, Artificial Sequence
  Synthetic oligonucleotide
ttccatgtcctgtgagtggatctggaagtcctgtg

SEQ ID NO: 19394 - DNA, 35 bp, Artificial Sequence
  Synthetic oligonucleotide
ttcggggggctttagcatccgataaaccaacttta

SEQ ID NO: 19395 - DNA, 36 bp, Artificial Sequence
  Synthetic oligonucleotide
ttgcgtacctcacgccgtaatggttagctagggtta

SEQ ID NO: 19396 - DNA, 37 bp, Artificial Sequence
  Synthetic oligonucleotide
ttgggaagacatactaacgtcctggtctaaccgacga

SEQ ID NO: 19397 - DNA, 35 bp, Artificial Sequence
  Synthetic oligonucleotide
tttaacggaccagcctcttaggcaagtttgcgaga

SEQ ID NO: 19398 - DNA, 36 bp, Artificial Sequence
  Synthetic oligonucleotide
ttttaaccccggtgtcgtgcttagcgaagtgattga

SEQ ID NO: 19399 - DNA, 36 bp, Artificial Sequence
  Synthetic oligonucleotide
cctggctctggccggaggacgggttctgggatcgta

SEQ ID NO: 19400 - DNA, 36 bp, Artificial Sequence
  Synthetic oligonucleotide
gagactacagaatgcgtaggggacagcaccgaccaa

SEQ ID NO: 19401 - DNA, 37 bp, Artificial Sequence
  Synthetic oligonucleotide
aaagatgtggtactaagcacgatactccgttcaaaga

SEQ ID NO: 19402 - DNA, 37 bp, Artificial Sequence
  Synthetic oligonucleotide
aacacgatggaggaatcgggttgagtgcgcttctgga

SEQ ID NO: 19403 - DNA, 35 bp, Artificial Sequence
  Synthetic oligonucleotide
aactgacgcgcggtctgatcttggtctgatccgtt

SEQ ID NO: 19404 - DNA, 35 bp, Artificial Sequence
  Synthetic oligonucleotide
acaagcccataaggtgtttgacgaacaccgcgaca

SEQ ID NO: 19405 - DNA, 37 bp, Artificial Sequence
  Synthetic oligonucleotide
acagacatccaagggaaatcacggcacgcggtcccga

SEQ ID NO: 19406 - DNA, 38 bp, Artificial Sequence
  Synthetic oligonucleotide
acaggtcaagtcgtttttatgagaacgcgtggttatga

SEQ ID NO: 19407 - DNA, 35 bp, Artificial Sequence
  Synthetic oligonucleotide
acgagttcgtaacctgtatgagacttttatgaaaa

SEQ ID NO: 19408 - DNA, 35 bp, Artificial Sequence
  Synthetic oligonucleotide
acgcatgtagcgtgctactaacatcatggagctaa

SEQ ID NO: 19409 - DNA, 37 bp, Artificial Sequence
  Synthetic oligonucleotide
acgcgtactggtgttgcagtacgaaattcaaacctga

SEQ ID NO: 19410 - DNA, 37 bp, Artificial Sequence
  Synthetic oligonucleotide
acgttacagcgaatcttgcgactgtatgcatgcttga

SEQ ID NO: 19411 - DNA, 37 bp, Artificial Sequence
  Synthetic oligonucleotide
actacgatctgcccctattatcgacgggaaggagtga

SEQ ID NO: 19412 - DNA, 37 bp, Artificial Sequence
  Synthetic oligonucleotide
actactgggacattgaccggtggaatagaccgtgtga

SEQ ID NO: 19413 - DNA, 36 bp, Artificial Sequence
  Synthetic oligonucleotide
agacggttcacatatgttccggtaaagtgcggttca

SEQ ID NO: 19414 - DNA, 36 bp, Artificial Sequence
  Synthetic oligonucleotide
agagctccggattcgacgtattacgagagtcatcga

SEQ ID NO: 19415 - DNA, 37 bp, Artificial Sequence
  Synthetic oligonucleotide
agcattctatggtgggctgagcatgctcgccttgtga

SEQ ID NO: 19416 - DNA, 38 bp, Artificial Sequence
  Synthetic oligonucleotide
aggggcgctataaagggatgctggacccgcacttctga

SEQ ID NO: 19417 - DNA, 36 bp, Artificial Sequence
  Synthetic oligonucleotide
atgacaggttatgatgccttactacagacgaaagga

SEQ ID NO: 19418 - DNA, 36 bp, Artificial Sequence
  Synthetic oligonucleotide
atggttattagacgggaccgaagagtgtaatgtaca

SEQ ID NO: 19419 - DNA, 36 bp, Artificial Sequence
  Synthetic oligonucleotide
attgcagtagagcaacgagaacaggaagtctcatga

SEQ ID NO: 19420 - DNA, 35 bp, Artificial Sequence
  Synthetic oligonucleotide
ccacgtggtggatcgggctctgcgcgtatcatttg

SEQ ID NO: 19421 - DNA, 36 bp, Artificial Sequence
  Synthetic oligonucleotide
ccctgaacgcacgactactggcgcatagcccccaca

SEQ ID NO: 19422 - DNA, 35 bp, Artificial Sequence
  Synthetic oligonucleotide
ccggtaagtagcgtgggtatcggccgggatcactg

SEQ ID NO: 19423 - DNA, 35 bp, Artificial Sequence
  Synthetic oligonucleotide
cgtccgagcgtatcggagttcggggtatgattgta

SEQ ID NO: 19424 - DNA, 35 bp, Artificial Sequence
  Synthetic oligonucleotide
cgttgaagcttaacgcccaggacacgattggaccg

SEQ ID NO: 19425 - DNA, 37 bp, Artificial Sequence
  Synthetic oligonucleotide
ctggagcctcatgaggtgatgagatccttgacgtgta

SEQ ID NO: 19426 - DNA, 38 bp, Artificial Sequence
  Synthetic oligonucleotide
cttggaggttccaagtacgatcaatgtctgtgtagtga

SEQ ID NO: 19427 - DNA, 35 bp, Artificial Sequence
  Synthetic oligonucleotide
gaaggataatacgcaggtccctgcgttcaggtgcg

SEQ ID NO: 19428 - DNA, 37 bp, Artificial Sequence
  Synthetic oligonucleotide
gacagaaattattgaagatgtcaaaaaagcggtgtga

SEQ ID NO: 19429 - DNA, 38 bp, Artificial Sequence
  Synthetic oligonucleotide
gaccaccgtattaagcaagtgcgttctttcgttgatga

SEQ ID NO: 19430 - DNA, 36 bp, Artificial Sequence
  Synthetic oligonucleotide
gacgaaggatcagaggaatatccttctgacttgcga

SEQ ID NO: 19431 - DNA, 38 bp, Artificial Sequence
  Synthetic oligonucleotide
gagagtagagattggtctatcaaggattgacgccgtga

SEQ ID NO: 19432 - DNA, 35 bp, Artificial Sequence
  Synthetic oligonucleotide
gagcaagaatggaagtatccctgtgaatgatactc

SEQ ID NO: 19433 - DNA, 35 bp, Artificial Sequence
  Synthetic oligonucleotide
gaggccgtaacggttgcctcgccttcggactttga

SEQ ID NO: 19434 - DNA, 36 bp, Artificial Sequence
  Synthetic oligonucleotide
gagtaccgagtgcgcggtttggtggggggctggtcc

SEQ ID NO: 19435 - DNA, 36 bp, Artificial Sequence
  Synthetic oligonucleotide
gcacacatggttaaaggagtgtgtttccttacataa

SEQ ID NO: 19436 - DNA, 37 bp, Artificial Sequence
  Synthetic oligonucleotide
gccactgagacatagaaaacgtgaggtatcgagatga

SEQ ID NO: 19437 - DNA, 35 bp, Artificial Sequence
  Synthetic oligonucleotide
gcggtgggcgggaaaccgctgaactgtgatgcgag

SEQ ID NO: 19438 - DNA, 35 bp, Artificial Sequence
  Synthetic oligonucleotide
gctgtcattcctccaggtataagagttactttctt

SEQ ID NO: 19439 - DNA, 38 bp, Artificial Sequence
  Synthetic oligonucleotide
gctgttcaaatagtgctgattaatggtgcgagcactga

SEQ ID NO: 19440 - DNA, 35 bp, Artificial Sequence
  Synthetic oligonucleotide
ggaagtggaactgcgcacggagccggaaaagtcac

SEQ ID NO: 19441 - DNA, 37 bp, Artificial Sequence
  Synthetic oligonucleotide
ggcgtgacgcgtacgagatcacaggggctgtcactga

SEQ ID NO: 19442 - DNA, 37 bp, Artificial Sequence
  Synthetic oligonucleotide
gggacaaaaggccagagtaacttcatgtcgtgtgtga

SEQ ID NO: 19443 - DNA, 35 bp, Artificial Sequence
  Synthetic oligonucleotide
ggtacgagagatactataactgcgtgtcgcttggg

SEQ ID NO: 19444 - DNA, 35 bp, Artificial Sequence
  Synthetic oligonucleotide
ggtcttgattcagcccctcgtatggaatccacgag

SEQ ID NO: 19445 - DNA, 36 bp, Artificial Sequence
  Synthetic oligonucleotide
ggtggattgtacacattgatcggatatcttataata

SEQ ID NO: 19446 - DNA, 38 bp, Artificial Sequence
  Synthetic oligonucleotide
ggttagaccgtagttgcggggccattcactggggctga

SEQ ID NO: 19447 - DNA, 37 bp, Artificial Sequence
  Synthetic oligonucleotide
gtacgagcttaccatgtgttaggtagtgtaatgcaga

SEQ ID NO: 19448 - DNA, 38 bp, Artificial Sequence
  Synthetic oligonucleotide
gtccgtctgcgactggctcggaggccactagccggtga

SEQ ID NO: 19449 - DNA, 38 bp, Artificial Sequence
  Synthetic oligonucleotide
gtctggacatatcggggaccgtaactgtgactgagtga

SEQ ID NO: 19450 - DNA, 38 bp, Artificial Sequence
  Synthetic oligonucleotide
gttaacctgcctccgggacatgggatgctaggttgtga

SEQ ID NO: 19451 - DNA, 37 bp, Artificial Sequence
  Synthetic oligonucleotide
gttatcgacgtacggaactcacaaccggttgtagtga

SEQ ID NO: 19452 - DNA, 38 bp, Artificial Sequence
  Synthetic oligonucleotide
gttccttgcgtgcatggtactgtaatagtggttggtga

SEQ ID NO: 19453 - DNA, 38 bp, Artificial Sequence
  Synthetic oligonucleotide
gttggaaggcccgattagatccaactgtcgtgaactga

SEQ ID NO: 19454 - DNA, 35 bp, Artificial Sequence
  Synthetic oligonucleotide
taatgggcgaaaggtggtccgtatgttttcttggt

SEQ ID NO: 19455 - DNA, 37 bp, Artificial Sequence
  Synthetic oligonucleotide
tcaacacgtaagagcggggaaaattcgggagtactga

SEQ ID NO: 19456 - DNA, 38 bp, Artificial Sequence
  Synthetic oligonucleotide
tcaacggcaaaatgggttggtgtgtcccgtactgatga

SEQ ID NO: 19457 - DNA, 35 bp, Artificial Sequence
  Synthetic oligonucleotide
tcaagctagggggatgaaagatattgaattggagg

SEQ ID NO: 19458 - DNA, 36 bp, Artificial Sequence
  Synthetic oligonucleotide
tccgggggtccgtatagtgggtgagacactttttga

SEQ ID NO: 19459 - DNA, 37 bp, Artificial Sequence
  Synthetic oligonucleotide
tcgggagttattagcaagtctcctgaggcttgcgtga

SEQ ID NO: 19460 - DNA, 38 bp, Artificial Sequence
  Synthetic oligonucleotide
tctggcgacgatacgcaggttatattggtcgacggtga

SEQ ID NO: 19461 - DNA, 35 bp, Artificial Sequence
  Synthetic oligonucleotide
tgcgttgcagccaaaatcctaatggttgcctgtat

SEQ ID NO: 19462 - DNA, 35 bp, Artificial Sequence
  Synthetic oligonucleotide
tggaaacctggtggtcgtattcgtgccacaggaga

SEQ ID NO: 19463 - DNA, 37 bp, Artificial Sequence
  Synthetic oligonucleotide
tggaaccgggtacatggagacgtcttaccccccgaga

SEQ ID NO: 19464 - DNA, 36 bp, Artificial Sequence
  Synthetic oligonucleotide
ttaagcgggacggtggactttgatgtagtatcgtaa

SEQ ID NO: 19465 - DNA, 37 bp, Artificial Sequence
  Synthetic oligonucleotide
ttaaggtggtctgaacctaatacctgtaacattgcga

SEQ ID NO: 19466 - DNA, 37 bp, Artificial Sequence
  Synthetic oligonucleotide
ttactgagacatctggcacctgccaccttggcgctga

SEQ ID NO: 19467 - DNA, 36 bp, Artificial Sequence
  Synthetic oligonucleotide
ttcctggaggagggctcattccatagtgcgagggca

SEQ ID NO: 19468 - DNA, 29 bp, Artificial Sequence
  Synthetic oligonucleotide
ttgacgtggcttcttcgactctcgaccaa

SEQ ID NO: 19469 - DNA, 35 bp, Artificial Sequence
  Synthetic oligonucleotide
ttgcgaacgcccgagagaacacctgccagaccgtg

SEQ ID NO: 19470 - DNA, 37 bp, Artificial Sequence
  Synthetic oligonucleotide
tttgcacccatcggttatgtaaaatatctctcgtgga

SEQ ID NO: 19471 - DNA, 38 bp, Artificial Sequence
  Synthetic oligonucleotide
gagcctgacatgctgtacttcacatatgtagtcaatga

SEQ ID NO: 19472 - DNA, 36 bp, Artificial Sequence
  Synthetic oligonucleotide
gacctgggggaccccattgcgtccacgacaaaagta

SEQ ID NO: 19473 - DNA, 37 bp, Artificial Sequence
  Synthetic oligonucleotide
aacgcggacttaggaaggcgcgtgttcctcgaattga

SEQ ID NO: 19474 - DNA, 35 bp, Artificial Sequence
  Synthetic oligonucleotide
actctcatctcttccgtattgtatcaaagggattc

SEQ ID NO: 19475 - DNA, 36 bp, Artificial Sequence
  Synthetic oligonucleotide
actgagaagccaaacgcctgtaaatactggtaacga

SEQ ID NO: 19476 - DNA, 35 bp, Artificial Sequence
  Synthetic oligonucleotide
acttatctaggacgtcatgatgagtagtctttggg

SEQ ID NO: 19477 - DNA, 38 bp, Artificial Sequence
  Synthetic oligonucleotide
agagtgcatgtcattggaaatagtggggtcatctttga

SEQ ID NO: 19478 - DNA, 35 bp, Artificial Sequence
  Synthetic oligonucleotide
aggggatgtctgctaaaggtataagtgtaaaatga

SEQ ID NO: 19479 - DNA, 36 bp, Artificial Sequence
  Synthetic oligonucleotide
agtatgataatcatggcattaggggactaaggcgga

SEQ ID NO: 19480 - DNA, 35 bp, Artificial Sequence
  Synthetic oligonucleotide
atgcgatacagacctcagccgactccacggatagt

SEQ ID NO: 19481 - DNA, 37 bp, Artificial Sequence
  Synthetic oligonucleotide
atgtaacgttacgtgagtctaaatggcgttaaattga

SEQ ID NO: 19482 - DNA, 35 bp, Artificial Sequence
  Synthetic oligonucleotide
attaagctccggttgtgtggctaggtttctgtgcc

SEQ ID NO: 19483 - DNA, 35 bp, Artificial Sequence
  Synthetic oligonucleotide
caactgtgctgtagtattgcgatcagagcaccgta

SEQ ID NO: 19484 - DNA, 35 bp, Artificial Sequence
  Synthetic oligonucleotide
caatttttagatgcgaacatacaggcatgtccttg

SEQ ID NO: 19485 - DNA, 36 bp, Artificial Sequence
  Synthetic oligonucleotide
ccagtcctagggacaaatggaggagtcacaccggta

SEQ ID NO: 19486 - DNA, 35 bp, Artificial Sequence
  Synthetic oligonucleotide
gaacagttatgtatagcctgcgcggtgagtgactg

SEQ ID NO: 19487 - DNA, 37 bp, Artificial Sequence
  Synthetic oligonucleotide
gacaccataagtgcatgttcacatgaccgctataaga

SEQ ID NO: 19488 - DNA, 38 bp, Artificial Sequence
  Synthetic oligonucleotide
gaccccaagtaggaatgaacgcatatggtctgatctga

SEQ ID NO: 19489 - DNA, 37 bp, Artificial Sequence
  Synthetic oligonucleotide
gagagtcctcggctaatcatctgcctcttagatttga

SEQ ID NO: 19490 - DNA, 36 bp, Artificial Sequence
  Synthetic oligonucleotide
gagtagacgggcaacacggatgacctttgtcgctca

SEQ ID NO: 19491 - DNA, 38 bp, Artificial Sequence
  Synthetic oligonucleotide
gatgaaggcccttgggacttgtcatgggccacatttga

SEQ ID NO: 19492 - DNA, 35 bp, Artificial Sequence
  Synthetic oligonucleotide
gatgctgttcggatacagatttgagaagggggtgg

SEQ ID NO: 19493 - DNA, 38 bp, Artificial Sequence
  Synthetic oligonucleotide
gcgaactggttaattagactctgattcgggacatctga

SEQ ID NO: 19494 - DNA, 36 bp, Artificial Sequence
  Synthetic oligonucleotide
gctaatacttggtggtacgtccgccccgctacagta

SEQ ID NO: 19495 - DNA, 35 bp, Artificial Sequence
  Synthetic oligonucleotide
gctgaggtagtttagacttctcaagtaacacgtgg

SEQ ID NO: 19496 - DNA, 35 bp, Artificial Sequence
  Synthetic oligonucleotide
gctgtctgatacactggcacgtagtaagccccccg

SEQ ID NO: 19497 - DNA, 35 bp, Artificial Sequence
  Synthetic oligonucleotide
ggcccattatgcatcgcttaggtttccgacttacg

SEQ ID NO: 19498 - DNA, 37 bp, Artificial Sequence
  Synthetic oligonucleotide
gggaggaccctctgaacgtctcgagctctatggttga

SEQ ID NO: 19499 - DNA, 36 bp, Artificial Sequence
  Synthetic oligonucleotide
gggctttagaccggaaatgttacgtcttggggaaaa

SEQ ID NO: 19500 - DNA, 37 bp, Artificial Sequence
  Synthetic oligonucleotide
ggtccggacctgtacaacgcatatctatacgcgggga

SEQ ID NO: 19501 - DNA, 35 bp, Artificial Sequence
  Synthetic oligonucleotide
ggtcgagctactgatactgggcttgctgtgaagtt

SEQ ID NO: 19502 - DNA, 38 bp, Artificial Sequence
  Synthetic oligonucleotide
gtaagtgcgctcggtgtcggggacacgcttggggctga

SEQ ID NO: 19503 - DNA, 35 bp, Artificial Sequence
  Synthetic oligonucleotide
gtagtagcggtaactgcacaccatcacaacgatta

SEQ ID NO: 19504 - DNA, 35 bp, Artificial Sequence
  Synthetic oligonucleotide
tatagaagattgcaccagaaagatgaaaagtggtc

SEQ ID NO: 19505 - DNA, 35 bp, Artificial Sequence
  Synthetic oligonucleotide
tcccgagcgtctcagatccaagcgctcggggtact

SEQ ID NO: 19506 - DNA, 38 bp, Artificial Sequence
  Synthetic oligonucleotide
tccgtacgcgttagccgaatcgatgtcgtttcatttga

SEQ ID NO: 19507 - DNA, 36 bp, Artificial Sequence
  Synthetic oligonucleotide
tctgtctgggtgcacgggccgcaaaaaacgcggcta

SEQ ID NO: 19508 - DNA, 37 bp, Artificial Sequence
  Synthetic oligonucleotide
tgacatcattatcaatgagaatttaccatatgtgaga

SEQ ID NO: 19509 - DNA, 37 bp, Artificial Sequence
  Synthetic oligonucleotide
tgacgctgacagtcctccaatattcgcgacagttaga

SEQ ID NO: 19510 - DNA, 35 bp, Artificial Sequence
  Synthetic oligonucleotide
tgtcgagtggcttcctaaacaagtggtcgagtata

SEQ ID NO: 19511 - DNA, 35 bp, Artificial Sequence
  Synthetic oligonucleotide
tgttggtaaatagccgggacactgaatcatagggc

SEQ ID NO: 19512 - DNA, 37 bp, Artificial Sequence
  Synthetic oligonucleotide
ttaagatgaactgcccgttttcaaaagacagttgcga

SEQ ID NO: 19513 - DNA, 35 bp, Artificial Sequence
  Synthetic oligonucleotide
ttaagtcattcagttcccacgggacgtggttgcac

SEQ ID NO: 19514 - DNA, 35 bp, Artificial Sequence
  Synthetic oligonucleotide
ttatcgcgcgaatattccgttaggagaggcaggta

SEQ ID NO: 19515 - DNA, 35 bp, Artificial Sequence
  Synthetic oligonucleotide
ttcgccgggttcaacgaagcggaatgtattggggt

SEQ ID NO: 19516 - DNA, 36 bp, Artificial Sequence
  Synthetic oligonucleotide
ttctacaagagcctaatagttggcgccctgttcgaa

SEQ ID NO: 19517 - DNA, 38 bp, Artificial Sequence
  Synthetic oligonucleotide
ttgaaaataaatgcaaacactgcatctgatgcggatga

SEQ ID NO: 19518 - DNA, 35 bp, Artificial Sequence
  Synthetic oligonucleotide
aacattgcgtgacactacagagggtaccaaggcta

SEQ ID NO: 19519 - DNA, 35 bp, Artificial Sequence
  Synthetic oligonucleotide
aaccttaatagatgcgatgtaagcgtactggttgg

SEQ ID NO: 19520 - DNA, 38 bp, Artificial Sequence
  Synthetic oligonucleotide
aacgcgtgcgctgcatgcttcttaagagggctaattga

SEQ ID NO: 19521 - DNA, 35 bp, Artificial Sequence
  Synthetic oligonucleotide
aactaactcagggcgaagtacgcagtcgcggtgca

SEQ ID NO: 19522 - DNA, 35 bp, Artificial Sequence
  Synthetic oligonucleotide
aagaatcggtgcgtagccactgatcacgaacattc

SEQ ID NO: 19523 - DNA, 35 bp, Artificial Sequence
  Synthetic oligonucleotide
aagttcaaaagcgacctatttacctaagacagatg

SEQ ID NO: 19524 - DNA, 37 bp, Artificial Sequence
  Synthetic oligonucleotide
aatgacagacttagcctgtgtattgttttcatatcga

SEQ ID NO: 19525 - DNA, 38 bp, Artificial Sequence
  Synthetic oligonucleotide
acaagtagcaggcattgattactgaattccaaagttga

SEQ ID NO: 19526 - DNA, 35 bp, Artificial Sequence
  Synthetic oligonucleotide
accgcaaggtagtaactggtgtgggtacatgggta

SEQ ID NO: 19527 - DNA, 37 bp, Artificial Sequence
  Synthetic oligonucleotide
acttgtccgtggtcccgatttggactttatgtcccga

SEQ ID NO: 19528 - DNA, 37 bp, Artificial Sequence
  Synthetic oligonucleotide
agacggagcaaaacctaaggtcatgtaagcgatggga

SEQ ID NO: 19529 - DNA, 35 bp, Artificial Sequence
  Synthetic oligonucleotide
agcaaggaattgcccgtgtgtatagctaagagggg

SEQ ID NO: 19530 - DNA, 37 bp, Artificial Sequence
  Synthetic oligonucleotide
agcacaataggtacttgcagagctccttcgcagacga

SEQ ID NO: 19531 - DNA, 38 bp, Artificial Sequence
  Synthetic oligonucleotide
agcacaatgggaaattagggcacagctttgttgtctga

SEQ ID NO: 19532 - DNA, 36 bp, Artificial Sequence
  Synthetic oligonucleotide
agttctgtgggagcctgacactcgaatttcaacaaa

SEQ ID NO: 19533 - DNA, 36 bp, Artificial Sequence
  Synthetic oligonucleotide
atacctgcgtcttgtacgataaagccgaccgaggca

SEQ ID NO: 19534 - DNA, 36 bp, Artificial Sequence
  Synthetic oligonucleotide
atgagaggtcgagtttgggattgtcttcggggacaa

SEQ ID NO: 19535 - DNA, 35 bp, Artificial Sequence
  Synthetic oligonucleotide
attaccccgttaagttacgggtcggaaggtaggat

SEQ ID NO: 19536 - DNA, 36 bp, Artificial Sequence
  Synthetic oligonucleotide
catagactactaaacatgtactgatcagagatgcga

SEQ ID NO: 19537 - DNA, 35 bp, Artificial Sequence
  Synthetic oligonucleotide
ccgtacttcagcgtctcattgcttatcgcctccca

SEQ ID NO: 19538 - DNA, 35 bp, Artificial Sequence
  Synthetic oligonucleotide
cctatggaccgagcagtcgcgtgcagaacctatag

SEQ ID NO: 19539 - DNA, 36 bp, Artificial Sequence
  Synthetic oligonucleotide
ctgtacaagtatcagggatgagcccaattgtataga

SEQ ID NO: 19540 - DNA, 35 bp, Artificial Sequence
  Synthetic oligonucleotide
gagcactgtctatatcaaacaaagtggagtaggtc

SEQ ID NO: 19541 - DNA, 36 bp, Artificial Sequence
  Synthetic oligonucleotide
gaggcttgtaaacccgctgttgcacgatggcggtaa

SEQ ID NO: 19542 - DNA, 36 bp, Artificial Sequence
  Synthetic oligonucleotide
gatgaggctccctcttaccaatgcgtgtcctgcgta

SEQ ID NO: 19543 - DNA, 36 bp, Artificial Sequence
  Synthetic oligonucleotide
gcataagtgaatgaggtttgccagaattattcacca

SEQ ID NO: 19544 - DNA, 38 bp, Artificial Sequence
  Synthetic oligonucleotide
gcgaagcacagactgtggtactggtacggcattaatga

SEQ ID NO: 19545 - DNA, 38 bp, Artificial Sequence
  Synthetic oligonucleotide
gcgtcttcctgggagacgcgacgcggtacaggaaatga

SEQ ID NO: 19546 - DNA, 36 bp, Artificial Sequence
  Synthetic oligonucleotide
gctccatacggatgcgggggacactcaatcaagaga

SEQ ID NO: 19547 - DNA, 36 bp, Artificial Sequence
  Synthetic oligonucleotide
ggactgcccattgtaggtgtcacttctagacaacta

SEQ ID NO: 19548 - DNA, 37 bp, Artificial Sequence
  Synthetic oligonucleotide
gggaggggaaaagagtaagcccggaccatcgagggga

SEQ ID NO: 19549 - DNA, 38 bp, Artificial Sequence
  Synthetic oligonucleotide
ggggctgttcgggccgaagaaacagttatagcgggtga

SEQ ID NO: 19550 - DNA, 35 bp, Artificial Sequence
  Synthetic oligonucleotide
ggtaatacaatgccgacacctgctgtctactctgg

SEQ ID NO: 19551 - DNA, 35 bp, Artificial Sequence
  Synthetic oligonucleotide
ggtcggtgaagagctagtcatcgtgtcacggggcg

SEQ ID NO: 19552 - DNA, 34 bp, Artificial Sequence
  Synthetic oligonucleotide
ggttctatagaaagcgattttcctcgtatagaag

SEQ ID NO: 19553 - DNA, 37 bp, Artificial Sequence
  Synthetic oligonucleotide
gtacgccgacgcgggacacgggccctgcaaaattgga

SEQ ID NO: 19554 - DNA, 35 bp, Artificial Sequence
  Synthetic oligonucleotide
gtactgtgaacgggtcgaggcccccccttgcgcat

SEQ ID NO: 19555 - DNA, 37 bp, Artificial Sequence
  Synthetic oligonucleotide
gtatagatggcgcttaaatggcacagcctcttcatga

SEQ ID NO: 19556 - DNA, 38 bp, Artificial Sequence
  Synthetic oligonucleotide
gtcacagcaccaaggcaagagtctcgcactgtctttga

SEQ ID NO: 19557 - DNA, 38 bp, Artificial Sequence
  Synthetic oligonucleotide
taacggggcatcgggcgaggaaaaaatttggttagtga

SEQ ID NO: 19558 - DNA, 38 bp, Artificial Sequence
  Synthetic oligonucleotide
taatgcagttctgtgtcgggatggactctctagattga

SEQ ID NO: 19559 - DNA, 35 bp, Artificial Sequence
  Synthetic oligonucleotide
taattggcatggggtggggaggaaaattttaaggt

SEQ ID NO: 19560 - DNA, 38 bp, Artificial Sequence
  Synthetic oligonucleotide
taccgtaagggtaatacgtacagggccaccttgattga

SEQ ID NO: 19561 - DNA, 37 bp, Artificial Sequence
  Synthetic oligonucleotide
tagcctctgagtggtgatagtgtgctatgtgtattga

SEQ ID NO: 19562 - DNA, 35 bp, Artificial Sequence
  Synthetic oligonucleotide
tccaacatcgctcgacaagaacggggtgtacaggc

SEQ ID NO: 19563 - DNA, 35 bp, Artificial Sequence
  Synthetic oligonucleotide
tcgccttcccctgtgtctgtttggatgggccgcac

SEQ ID NO: 19564 - DNA, 38 bp, Artificial Sequence
  Synthetic oligonucleotide
tgagctgtggtgacgggctctgccgaaggtgatattga

SEQ ID NO: 19565 - DNA, 36 bp, Artificial Sequence
  Synthetic oligonucleotide
tgggcttaaaaaacaggctgccaccgtggattgaaa

SEQ ID NO: 19566 - DNA, 35 bp, Artificial Sequence
  Synthetic oligonucleotide
ttactgcaggttgtcgccatgccagctaaggttag

SEQ ID NO: 19567 - DNA, 37 bp, Artificial Sequence
  Synthetic oligonucleotide
ttgaagatggttggtaagcatatgcagtactgtggga

SEQ ID NO: 19568 - DNA, 37 bp, Artificial Sequence
  Synthetic oligonucleotide
ttgattggagtcgtgggggtccaacacttgagtacga

SEQ ID NO: 19569 - DNA, 36 bp, Artificial Sequence
  Synthetic oligonucleotide
ttggcgcacagtaaatggcgagcaactttcacggta

SEQ ID NO: 19570 - DNA, 38 bp, Artificial Sequence
  Synthetic oligonucleotide
ttgttactgatccgccacagaggaggtgatagccttga

SEQ ID NO: 19571 - DNA, 36 bp, Artificial Sequence
  Synthetic oligonucleotide
ttgttgagaacgctgcaacataggcgcttatacgca

SEQ ID NO: 19572 - DNA, 37 bp, Artificial Sequence
  Synthetic oligonucleotide
tttaatgcgcggagtggagtcttgaacgccaggtcga

SEQ ID NO: 19573 - DNA, 37 bp, Artificial Sequence
  Synthetic oligonucleotide
tgactacggagtgtgttcgttctaacttgacatgaga

SEQ ID NO: 19574 - DNA, 37 bp, Artificial Sequence
  Synthetic oligonucleotide
ttgacccacggtcctcggtacgaaaatagtctcgcga

SEQ ID NO: 19575 - DNA, 35 bp, Artificial Sequence
  Synthetic oligonucleotide
aatactgcacctgatcccttaaggcaatgctacgc

SEQ ID NO: 19576 - DNA, 35 bp, Artificial Sequence
  Synthetic oligonucleotide
aatgcgagcttgctcgtcataactaccggagtaat

SEQ ID NO: 19577 - DNA, 37 bp, Artificial Sequence
  Synthetic oligonucleotide
accctactactgctcgggtaaagcgtactggtggtga

SEQ ID NO: 19578 - DNA, 36 bp, Artificial Sequence
  Synthetic oligonucleotide
acggacaagcactcgaaagctttatccgtatgacga

SEQ ID NO: 19579 - DNA, 35 bp, Artificial Sequence
  Synthetic oligonucleotide
acgttcgcacctgtttgtgaagcatcactccgcgc

SEQ ID NO: 19580 - DNA, 38 bp, Artificial Sequence
  Synthetic oligonucleotide
actcccacgcaaccgagtcgagggtgtatttgtcgtga

SEQ ID NO: 19581 - DNA, 37 bp, Artificial Sequence
  Synthetic oligonucleotide
agactgacatggttgaacctcgactaacgctcgacga

SEQ ID NO: 19582 - DNA, 35 bp, Artificial Sequence
  Synthetic oligonucleotide
agccggatgcgctactgcctcttaagtcgcgtacc

SEQ ID NO: 19583 - DNA, 35 bp, Artificial Sequence
  Synthetic oligonucleotide
atacaaagcctggtggaaagtgggtcggtcacatc

SEQ ID NO: 19584 - DNA, 38 bp, Artificial Sequence
  Synthetic oligonucleotide
atcgcttccagtggtactacgtgaccgcgactatatga

SEQ ID NO: 19585 - DNA, 37 bp, Artificial Sequence
  Synthetic oligonucleotide
catccggatagctccccaggagggattgtgtcttcga

SEQ ID NO: 19586 - DNA, 36 bp, Artificial Sequence
  Synthetic oligonucleotide
cccccacaggggggacgtgcaagagcaaccggacga

SEQ ID NO: 19587 - DNA, 37 bp, Artificial Sequence
  Synthetic oligonucleotide
gacgctctaggtaccgattggtgcttaaggtacggga

SEQ ID NO: 19588 - DNA, 35 bp, Artificial Sequence
  Synthetic oligonucleotide
gacgtggggcgagaattggtggcattatggctggt

SEQ ID NO: 19589 - DNA, 38 bp, Artificial Sequence
  Synthetic oligonucleotide
gactcatttcggcctggcatctctggataggcatgtga

SEQ ID NO: 19590 - DNA, 35 bp, Artificial Sequence
  Synthetic oligonucleotide
gactgatgccttgcagacctgcggggaaccgcgag

SEQ ID NO: 19591 - DNA, 36 bp, Artificial Sequence
  Synthetic oligonucleotide
gagccggagaattattcgagcatgagctactgacca

SEQ ID NO: 19592 - DNA, 36 bp, Artificial Sequence
  Synthetic oligonucleotide
gagggcgtgtttacggttatcagatagcgatgaaca

SEQ ID NO: 19593 - DNA, 36 bp, Artificial Sequence
  Synthetic oligonucleotide
gcaataccaagcacctcgcagtcagcgagatggata

SEQ ID NO: 19594 - DNA, 37 bp, Artificial Sequence
  Synthetic oligonucleotide
gccaaaacgtacaaatacggatagccataaagggcga

SEQ ID NO: 19595 - DNA, 38 bp, Artificial Sequence
  Synthetic oligonucleotide
gctcattaagaaggttaagcatcgtaggaggcccttga

SEQ ID NO: 19596 - DNA, 37 bp, Artificial Sequence
  Synthetic oligonucleotide
gctcccgagctcagtagagtcacattgagaatacgga

SEQ ID NO: 19597 - DNA, 35 bp, Artificial Sequence
  Synthetic oligonucleotide
ggtagtagacgtactgccgcctgcggtttaaagca

SEQ ID NO: 19598 - DNA, 36 bp, Artificial Sequence
  Synthetic oligonucleotide
ggtagtatgacgtatctgtttgggaagcctatacca

SEQ ID NO: 19599 - DNA, 38 bp, Artificial Sequence
  Synthetic oligonucleotide
gtcatcaacggtatgtccctctgtcctgtctttaatga

SEQ ID NO: 19600 - DNA, 35 bp, Artificial Sequence
  Synthetic oligonucleotide
gtcgccgaggaacggaattctctcgaccatcgtta

SEQ ID NO: 19601 - DNA, 36 bp, Artificial Sequence
  Synthetic oligonucleotide
gtctacgaagtcgctctctcaatcattgaaggtcga

SEQ ID NO: 19602 - DNA, 35 bp, Artificial Sequence
  Synthetic oligonucleotide
gtctcatatgggcactctgccaccccgcgccctcc

SEQ ID NO: 19603 - DNA, 37 bp, Artificial Sequence
  Synthetic oligonucleotide
gttagcatgattgcagtttgcgtgtcaaccacacaga

SEQ ID NO: 19604 - DNA, 37 bp, Artificial Sequence
  Synthetic oligonucleotide
tacactaccgaggccgggacgcagttcaatgggaaga

SEQ ID NO: 19605 - DNA, 37 bp, Artificial Sequence
  Synthetic oligonucleotide
tacccgtaggcgttttcgctacaggtgcacatgcgga

SEQ ID NO: 19606 - DNA, 38 bp, Artificial Sequence
  Synthetic oligonucleotide
tacgacggggaggagaacacggtatgctgccagggtga

SEQ ID NO: 19607 - DNA, 38 bp, Artificial Sequence
  Synthetic oligonucleotide
tagcgggtcttgccccgccaatgatatgcttggggtga

SEQ ID NO: 19608 - DNA, 35 bp, Artificial Sequence
  Synthetic oligonucleotide
tcacaatcgctctatgtggccagataagtgactcg

SEQ ID NO: 19609 - DNA, 35 bp, Artificial Sequence
  Synthetic oligonucleotide
tccgaccagaaagcttgatccgtgagacgaaagtc

SEQ ID NO: 19610 - DNA, 38 bp, Artificial Sequence
  Synthetic oligonucleotide
tccgtaccttcgacgagcggaccggggtgtattggtga

SEQ ID NO: 19611 - DNA, 36 bp, Artificial Sequence
  Synthetic oligonucleotide
tctagtgcgtgctataaatcacttgtcttgatcgta

SEQ ID NO: 19612 - DNA, 35 bp, Artificial Sequence
  Synthetic oligonucleotide
tgatgaatgcgcacgatagttgcaacgcaaaggcc

SEQ ID NO: 19613 - DNA, 35 bp, Artificial Sequence
  Synthetic oligonucleotide
tggcttccaattcattggaaagaccacctgacgga

SEQ ID NO: 19614 - DNA, 35 bp, Artificial Sequence
  Synthetic oligonucleotide
ttgacacttgctagggaatggtaaagctgagtctg

SEQ ID NO: 19615 - DNA, 37 bp, Artificial Sequence
  Synthetic oligonucleotide
ttgagccaacgtggggaacaagggtatttggtcttga

SEQ ID NO: 19616 - DNA, 37 bp, Artificial Sequence
  Synthetic oligonucleotide
tttaggcgcctcgtgaactactgtagaggccaagtga

SEQ ID NO: 19617 - DNA, 38 bp, Artificial Sequence
  Synthetic oligonucleotide
gctgaggttccaagtcaaatggaagctagtcgtcctga

SEQ ID NO: 19618 - DNA, 35 bp, Artificial Sequence
  Synthetic oligonucleotide
tacccgaagggtacgcgtgtgcgacttgatagaga

SEQ ID NO: 19619 - DNA, 37 bp, Artificial Sequence
  Synthetic oligonucleotide
acgggactgtgccatagtactagaaatagatacagga

SEQ ID NO: 19620 - DNA, 37 bp, Artificial Sequence
  Synthetic oligonucleotide
agtcaaggcgaaaaggtgggtaaactatgctgggcga

SEQ ID NO: 19621 - DNA, 35 bp, Artificial Sequence
  Synthetic oligonucleotide
atagaaaaccggcaagctaggtttactactgtagt

SEQ ID NO: 19622 - DNA, 37 bp, Artificial Sequence
  Synthetic oligonucleotide
atcacgacgaatgtagacatacttcggtctcagctga

SEQ ID NO: 19623 - DNA, 35 bp, Artificial Sequence
  Synthetic oligonucleotide
atcagtgaagagtgatctgtcagcttgccgtcata

SEQ ID NO: 19624 - DNA, 38 bp, Artificial Sequence
  Synthetic oligonucleotide
atgggtgatctgtcctgcagtataatggattggggtga

SEQ ID NO: 19625 - DNA, 36 bp, Artificial Sequence
  Synthetic oligonucleotide
cctcgacggaagggcaagacagatttgcgaaggtga

SEQ ID NO: 19626 - DNA, 35 bp, Artificial Sequence
  Synthetic oligonucleotide
gagctaaggagggttagacacggatggtgcctcta

SEQ ID NO: 19627 - DNA, 35 bp, Artificial Sequence
  Synthetic oligonucleotide
gagtacatggctaaaacgtgcatgacgaagaatcg

SEQ ID NO: 19628 - DNA, 38 bp, Artificial Sequence
  Synthetic oligonucleotide
gccaaaacacgtaaggctctagttgagtttgctcttga

SEQ ID NO: 19629 - DNA, 38 bp, Artificial Sequence
  Synthetic oligonucleotide
gcctgcagatctgggaacgggcatttatgttgcgttga

SEQ ID NO: 19630 - DNA, 38 bp, Artificial Sequence
  Synthetic oligonucleotide
gctaagaaggtcagtattgcgagcggtttctcacgtga

SEQ ID NO: 19631 - DNA, 38 bp, Artificial Sequence
  Synthetic oligonucleotide
gggggcgtactgcgggccgggttactagagccgaatga

SEQ ID NO: 19632 - DNA, 37 bp, Artificial Sequence
  Synthetic oligonucleotide
gtagtagtgctgtggggtatagagaattacctaacga

SEQ ID NO: 19633 - DNA, 38 bp, Artificial Sequence
  Synthetic oligonucleotide
gtctaaaagtgggccagactttgttaacggggttctga

SEQ ID NO: 19634 - DNA, 38 bp, Artificial Sequence
  Synthetic oligonucleotide
gttcctgcgacaacttgcgttgaacacctcttgcgtga

SEQ ID NO: 19635 - DNA, 37 bp, Artificial Sequence
  Synthetic oligonucleotide
taaagggactgcactgtttgggtcaatatctgagcga

SEQ ID NO: 19636 - DNA, 37 bp, Artificial Sequence
  Synthetic oligonucleotide
taccagtcatataaagttcatgttgtcctcgtgggga

SEQ ID NO: 19637 - DNA, 36 bp, Artificial Sequence
  Synthetic oligonucleotide
tagtcagtcgcttaagtgcttacaggagtttccgta

SEQ ID NO: 19638 - DNA, 37 bp, Artificial Sequence
  Synthetic oligonucleotide
tccctgatcggtgtttgtacgggtggtacgtattgga

SEQ ID NO: 19639 - DNA, 37 bp, Artificial Sequence
  Synthetic oligonucleotide
tccgccaggcgcttctgtcgcttcacttgttttacga

SEQ ID NO: 19640 - DNA, 37 bp, Artificial Sequence
  Synthetic oligonucleotide
tcgtagtgtagctataggtcccggatcttaggtcgga

SEQ ID NO: 19641 - DNA, 38 bp, Artificial Sequence
  Synthetic oligonucleotide
tctcgtgacgcaatatcacggtaatagtctggacctga

SEQ ID NO: 19642 - DNA, 35 bp, Artificial Sequence
  Synthetic oligonucleotide
tgatcttaacctgtgatgcacgacctactaccaag

SEQ ID NO: 19643 - DNA, 37 bp, Artificial Sequence
  Synthetic oligonucleotide
tggtaggtactgctcttctagttccgttaaggagtga

SEQ ID NO: 19644 - DNA, 35 bp, Artificial Sequence
  Synthetic oligonucleotide
ttagcaccactgcgcctacgactggccctaccgtt

SEQ ID NO: 19645 - DNA, 38 bp, Artificial Sequence
  Synthetic oligonucleotide
ttgctgagcatggtcccgtaggatgctggtttacctga

SEQ ID NO: 19646 - DNA, 35 bp, Artificial Sequence
  Synthetic oligonucleotide
gttacttcccccgtgcgtcgagcgtttcgcgctaa

SEQ ID NO: 19647 - DNA, 35 bp, Artificial Sequence
  Synthetic oligonucleotide
agggtgccatgcctgatgtatctgcccaacttcag

SEQ ID NO: 19648 - DNA, 36 bp, Artificial Sequence
  Synthetic oligonucleotide
accgtgaactactgtggaaccaggatcaggataaaa

SEQ ID NO: 19649 - DNA, 37 bp, Artificial Sequence
  Synthetic oligonucleotide
actagggcgaatgaacaaggttgtaatccggcgtaga

SEQ ID NO: 19650 - DNA, 37 bp, Artificial Sequence
  Synthetic oligonucleotide
agaacgagtctcgattatgtcgcagactaggtgtaga

SEQ ID NO: 19651 - DNA, 35 bp, Artificial Sequence
  Synthetic oligonucleotide
agaattcgtacgcagctagtataaaggctgcaggc

SEQ ID NO: 19652 - DNA, 35 bp, Artificial Sequence
  Synthetic oligonucleotide
aggtccaagcagttaccaaacgcgactttatgcgc

SEQ ID NO: 19653 - DNA, 35 bp, Artificial Sequence
  Synthetic oligonucleotide
aggttcactcacatgggctctttgcagttttgaag

SEQ ID NO: 19654 - DNA, 35 bp, Artificial Sequence
  Synthetic oligonucleotide
catgcacgagtttattaagggtaaatggggtaaac

SEQ ID NO: 19655 - DNA, 36 bp, Artificial Sequence
  Synthetic oligonucleotide
ctccccctccctatgctaggtcttgatacgcggtga

SEQ ID NO: 19656 - DNA, 35 bp, Artificial Sequence
  Synthetic oligonucleotide
gacaacaccgcagtgccaggttcatggtcgatagg

SEQ ID NO: 19657 - DNA, 35 bp, Artificial Sequence
  Synthetic oligonucleotide
gacgcgactgctgggatttatgctatgctgtagta

SEQ ID NO: 19658 - DNA, 35 bp, Artificial Sequence
  Synthetic oligonucleotide
gagtgcttggaagccgtgtacattactggtattgt

SEQ ID NO: 19659 - DNA, 37 bp, Artificial Sequence
  Synthetic oligonucleotide
gataaaagtcggatggcccattcactgtggcaacgga

SEQ ID NO: 19660 - DNA, 36 bp, Artificial Sequence
  Synthetic oligonucleotide
ggaccttgcggactgaaccccatacgggatggtaga

SEQ ID NO: 19661 - DNA, 38 bp, Artificial Sequence
  Synthetic oligonucleotide
ggtcggaaggtggcccgggcacttaggggtcatcctga

SEQ ID NO: 19662 - DNA, 35 bp, Artificial Sequence
  Synthetic oligonucleotide
ggttagtataaggtcgatataggactgcacttaat

SEQ ID NO: 19663 - DNA, 37 bp, Artificial Sequence
  Synthetic oligonucleotide
ggttggttggcgattcaaaacggcgtggacccgccga

SEQ ID NO: 19664 - DNA, 36 bp, Artificial Sequence
  Synthetic oligonucleotide
gtcacaacaaactaaagcgtagacacgtacagtgca

SEQ ID NO: 19665 - DNA, 36 bp, Artificial Sequence
  Synthetic oligonucleotide
taacaggatgtgatctactgaggtccgtaaatgcga

SEQ ID NO: 19666 - DNA, 37 bp, Artificial Sequence
  Synthetic oligonucleotide
taatgacgctcgagtggcctctcgcagtcaatcgtga

SEQ ID NO: 19667 - DNA, 37 bp, Artificial Sequence
  Synthetic oligonucleotide
tcatgcgggacgttttcgacatggctgtctcgtgcga

SEQ ID NO: 19668 - DNA, 35 bp, Artificial Sequence
  Synthetic oligonucleotide
tctgcgacttgggggttcgccggcgggccaaactg

SEQ ID NO: 19669 - DNA, 35 bp, Artificial Sequence
  Synthetic oligonucleotide
tgaaatgcagtccctgcgggccagtatctataggc

SEQ ID NO: 19670 - DNA, 37 bp, Artificial Sequence
  Synthetic oligonucleotide
tgagttaacttgcacgttaaggaagcgcgagacatga

SEQ ID NO: 19671 - DNA, 36 bp, Artificial Sequence
  Synthetic oligonucleotide
tgtggtctaagaaatgttcgagccgaatccgtgcga

SEQ ID NO: 19672 - DNA, 36 bp, Artificial Sequence
  Synthetic oligonucleotide
tgttcccaggacccgtggatgggcacagttgcgcaa

SEQ ID NO: 19673 - DNA, 35 bp, Artificial Sequence
  Synthetic oligonucleotide
tcgtacatgtcctggatttcgcttatcaacaggag

SEQ ID NO: 19674 - DNA, 32 bp, Artificial Sequence
  Synthetic oligonucleotide
ttgcgacgacgtatatgccgtggtaaactgta

SEQ ID NO: 19675 - DNA, 35 bp, Artificial Sequence
  Synthetic oligonucleotide
aacacggtcattgcacaaatggatagccacccttc

SEQ ID NO: 19676 - DNA, 35 bp, Artificial Sequence
  Synthetic oligonucleotide
aagtcacgtgatgcaagttcaggctacggacgtct

SEQ ID NO: 19677 - DNA, 35 bp, Artificial Sequence
  Synthetic oligonucleotide
aatgcgaggcacatgctgtgtatgataccacagta

SEQ ID NO: 19678 - DNA, 35 bp, Artificial Sequence
  Synthetic oligonucleotide
aatgcggggagccgcatcttgcattccgcgttacc

SEQ ID NO: 19679 - DNA, 37 bp, Artificial Sequence
  Synthetic oligonucleotide
acgtactatcacaggttattagtgacaatcctagcga

SEQ ID NO: 19680 - DNA, 35 bp, Artificial Sequence
  Synthetic oligonucleotide
ataccgcacgtctctgatgggaagattttactaga

SEQ ID NO: 19681 - DNA, 35 bp, Artificial Sequence
  Synthetic oligonucleotide
attctatgcgggcggtatcatttggaccattgacg

SEQ ID NO: 19682 - DNA, 35 bp, Artificial Sequence
  Synthetic oligonucleotide
attgcggtcgccgaaagcttctggccctgtggaag

SEQ ID NO: 19683 - DNA, 36 bp, Artificial Sequence
  Synthetic oligonucleotide
ctacccccagacagtaccagccgttggcctcgtcta

SEQ ID NO: 19684 - DNA, 36 bp, Artificial Sequence
  Synthetic oligonucleotide
gaatcggagtattggcaagaatggtattccgcaaga

SEQ ID NO: 19685 - DNA, 38 bp, Artificial Sequence
  Synthetic oligonucleotide
gcattccgcaaagactaacggataatatgcaccattga

SEQ ID NO: 19686 - DNA, 35 bp, Artificial Sequence
  Synthetic oligonucleotide
ggcttattgcccggtaataccaagggtaacgcagg

SEQ ID NO: 19687 - DNA, 35 bp, Artificial Sequence
  Synthetic oligonucleotide
gtaggtccaaacttggagtctgcaccggcgtgaca

SEQ ID NO: 19688 - DNA, 38 bp, Artificial Sequence
  Synthetic oligonucleotide
gtgacacccgagcgttctttagagaaaggtgtccatga

SEQ ID NO: 19689 - DNA, 38 bp, Artificial Sequence
  Synthetic oligonucleotide
gtgggggttgtccggcaagggcggtgacgagctcgtga

SEQ ID NO: 19690 - DNA, 37 bp, Artificial Sequence
  Synthetic oligonucleotide
gttgcgtgcatctcagggaaaagccatattgccatga

SEQ ID NO: 19691 - DNA, 35 bp, Artificial Sequence
  Synthetic oligonucleotide
taaacaggctagtcgaaacgctaaaatccatacag

SEQ ID NO: 19692 - DNA, 38 bp, Artificial Sequence
  Synthetic oligonucleotide
tagcatgtcgaagggtatatacggtctcgggggggtga

SEQ ID NO: 19693 - DNA, 35 bp, Artificial Sequence
  Synthetic oligonucleotide
taggaacccggcactcgtggtaccatttgctgtag

SEQ ID NO: 19694 - DNA, 35 bp, Artificial Sequence
  Synthetic oligonucleotide
tattgtttgcgaggagaaggttgtagtaagcggta

SEQ ID NO: 19695 - DNA, 35 bp, Artificial Sequence
  Synthetic oligonucleotide
tcttcaaactatacctgtttatacactcggaggag

SEQ ID NO: 19696 - DNA, 38 bp, Artificial Sequence
  Synthetic oligonucleotide
tgaactaccggaatcgcgacttgcctctgcccgaatga

SEQ ID NO: 19697 - DNA, 36 bp, Artificial Sequence
  Synthetic oligonucleotide
tgcagaggtaggtcgcgcgaccactaggtgacggta

SEQ ID NO: 19698 - DNA, 38 bp, Artificial Sequence
  Synthetic oligonucleotide
tggactgcattgtttgacttcaccctgatttcgcatga

SEQ ID NO: 19699 - DNA, 35 bp, Artificial Sequence
  Synthetic oligonucleotide
tgtggatttcgccaaaataatacaatctgtgacta

SEQ ID NO: 19700 - DNA, 38 bp, Artificial Sequence
  Synthetic oligonucleotide
ttactgagcaagtcaagtacccgtagtcgagaaagtga

SEQ ID NO: 19701 - DNA, 36 bp, Artificial Sequence
  Synthetic oligonucleotide
ttctgaacgtcatgtgggcccaattactagttggta

SEQ ID NO: 19702 - DNA, 38 bp, Artificial Sequence
  Synthetic oligonucleotide
ttgcacgagcaagtcgacgtagacgttatgtgggttga

SEQ ID NO: 19703 - DNA, 35 bp, Artificial Sequence
  Synthetic oligonucleotide
gtttcgtgtcactggaagttgttgcttcgtacgct

SEQ ID NO: 19704 - DNA, 38 bp, Artificial Sequence
  Synthetic oligonucleotide
aatgcgtatggagaattgcttcttcctcggtgttgtga

SEQ ID NO: 19705 - DNA, 35 bp, Artificial Sequence
  Synthetic oligonucleotide
acattagctggagctaaacagggcatctacagtta

SEQ ID NO: 19706 - DNA, 36 bp, Artificial Sequence
  Synthetic oligonucleotide
cctgcgacctccgtctatcgctaaacgtaagggcga

SEQ ID NO: 19707 - DNA, 35 bp, Artificial Sequence
  Synthetic oligonucleotide
gaaagggcgtgtgacaattactcgtatcgctcttg

SEQ ID NO: 19708 - DNA, 35 bp, Artificial Sequence
  Synthetic oligonucleotide
gactatagaatatgaggtaagtcacgtttgatttc

SEQ ID NO: 19709 - DNA, 36 bp, Artificial Sequence
  Synthetic oligonucleotide
gcaggctttatggcgccggacgacaactaatccgga

SEQ ID NO: 19710 - DNA, 36 bp, Artificial Sequence
  Synthetic oligonucleotide
gccaacgaatatagcgttttagtatgcttaggttca

SEQ ID NO: 19711 - DNA, 35 bp, Artificial Sequence
  Synthetic oligonucleotide
gcctaagtgcagtatcgaacctctatccacggtct

SEQ ID NO: 19712 - DNA, 35 bp, Artificial Sequence
  Synthetic oligonucleotide
gctccagagcacacgtcccgcgtagggaggtaaga

SEQ ID NO: 19713 - DNA, 37 bp, Artificial Sequence
  Synthetic oligonucleotide
ggtacagccgaaccatgaggtcacaatgcaggaggga

SEQ ID NO: 19714 - DNA, 35 bp, Artificial Sequence
  Synthetic oligonucleotide
gtgcggagtgacaataacatggctctagggcatcg

SEQ ID NO: 19715 - DNA, 37 bp, Artificial Sequence
  Synthetic oligonucleotide
gttgcggttctctccaaaccaccaactggttccggga

SEQ ID NO: 19716 - DNA, 37 bp, Artificial Sequence
  Synthetic oligonucleotide
tatagattgccgagtgcatgtgatctacctggaccga

SEQ ID NO: 19717 - DNA, 37 bp, Artificial Sequence
  Synthetic oligonucleotide
tgagaaggtcaggacacgctctgcgtagacgggtaga

SEQ ID NO: 19718 - DNA, 37 bp, Artificial Sequence
  Synthetic oligonucleotide
tgagaggtcatggttgaatgttttcaacagtcgatga

SEQ ID NO: 19719 - DNA, 37 bp, Artificial Sequence
  Synthetic oligonucleotide
ttacgggaagttccgcatactacgctggatgtaaaga

SEQ ID NO: 19720 - DNA, 38 bp, Artificial Sequence
  Synthetic oligonucleotide
aatggtctggcccagtacgtatgtaagcttaaggatga

SEQ ID NO: 19721 - DNA, 37 bp, Artificial Sequence
  Synthetic oligonucleotide
tttacgcatcatgaatgaatgggcggacccgtgggga

SEQ ID NO: 19722 - DNA, 36 bp, Artificial Sequence
  Synthetic oligonucleotide
aactgcgggccatgggatatgatctgtgtcaacgta

SEQ ID NO: 19723 - DNA, 37 bp, Artificial Sequence
  Synthetic oligonucleotide
atacgctgggaggtatagacggataggaaatccccga

SEQ ID NO: 19724 - DNA, 36 bp, Artificial Sequence
  Synthetic oligonucleotide
atcttttgcgtggaatctgatagcatggtcttggga

SEQ ID NO: 19725 - DNA, 37 bp, Artificial Sequence
  Synthetic oligonucleotide
gaagtaactgcaaaagaccacgaccgtctgggcgtga

SEQ ID NO: 19726 - DNA, 35 bp, Artificial Sequence
  Synthetic oligonucleotide
gaagtggaaacgcacgtcgcaggtggtccgtctgc

SEQ ID NO: 19727 - DNA, 35 bp, Artificial Sequence
  Synthetic oligonucleotide
gctgacgaacatgccttaaattatttgtatagctg

SEQ ID NO: 19728 - DNA, 38 bp, Artificial Sequence
  Synthetic oligonucleotide
ggtactgatagtggtcgattgtgggtgctttaaggtga

SEQ ID NO: 19729 - DNA, 35 bp, Artificial Sequence
  Synthetic oligonucleotide
ggtgttctctacagggcgcactggttagccatggc

SEQ ID NO: 19730 - DNA, 35 bp, Artificial Sequence
  Synthetic oligonucleotide
gtacgtatactcgaccagatcgtagagagtgatag

SEQ ID NO: 19731 - DNA, 35 bp, Artificial Sequence
  Synthetic oligonucleotide
tacttagtcgcaggaaggaaaggacgtgagaatcc

SEQ ID NO: 19732 - DNA, 38 bp, Artificial Sequence
  Synthetic oligonucleotide
tccctgcatgtgggtctaagcctgagcgaccaaggtga

SEQ ID NO: 19733 - DNA, 35 bp, Artificial Sequence
  Synthetic oligonucleotide
tgactgcgtggccttgcgtaggaatactgatcccc

SEQ ID NO: 19734 - DNA, 36 bp, Artificial Sequence
  Synthetic oligonucleotide
tgataacgctaggacgggatacagccattggtacga

SEQ ID NO: 19735 - DNA, 37 bp, Artificial Sequence
  Synthetic oligonucleotide
tgctggaaccgagattatgagccggcattctaccgga

SEQ ID NO: 19736 - DNA, 38 bp, Artificial Sequence
  Synthetic oligonucleotide
ttaaagctgttggctcgttcagccaggaggtgaactga

SEQ ID NO: 19737 - DNA, 38 bp, Artificial Sequence
  Synthetic oligonucleotide
ttagaacacatgaggtgccagaacgttactacacctga

SEQ ID NO: 19738 - DNA, 35 bp, Artificial Sequence
  Synthetic oligonucleotide
ccagtcacacttgggtacatgtacaggcccccccg

SEQ ID NO: 19739 - DNA, 35 bp, Artificial Sequence
  Synthetic oligonucleotide
gtgttcgacttggcttatacattcgtatcagcatg

SEQ ID NO: 19740 - DNA, 38 bp, Artificial Sequence
  Synthetic oligonucleotide
taagcaagtgtacttggtggtattaccaaatgtcatga

SEQ ID NO: 19741 - DNA, 37 bp, Artificial Sequence
  Synthetic oligonucleotide
acgtgtattcgccggggcatgaaactttatacgtgga

SEQ ID NO: 19742 - DNA, 38 bp, Artificial Sequence
  Synthetic oligonucleotide
actcggggttaactgtaatacactcagactgtaattga

SEQ ID NO: 19743 - DNA, 36 bp, Artificial Sequence
  Synthetic oligonucleotide
agggcaacgtaccaagggtgcccctcggtgaaggga

SEQ ID NO: 19744 - DNA, 35 bp, Artificial Sequence
  Synthetic oligonucleotide
gacaccgaacgtctcagacctgggctatagccaag

SEQ ID NO: 19745 - DNA, 35 bp, Artificial Sequence
  Synthetic oligonucleotide
gacgtataatcgggaacgttggcataagaggcgcg

SEQ ID NO: 19746 - DNA, 35 bp, Artificial Sequence
  Synthetic oligonucleotide
gctacccatctgtgtggcgacctcccttgaacaaa

SEQ ID NO: 19747 - DNA, 35 bp, Artificial Sequence
  Synthetic oligonucleotide
ggtgtggaaaccacgggctggacaagtctgtagtt

SEQ ID NO: 19748 - DNA, 36 bp, Artificial Sequence
  Synthetic oligonucleotide
tactgcaactgttatttcagattaagggagccctaa

SEQ ID NO: 19749 - DNA, 36 bp, Artificial Sequence
  Synthetic oligonucleotide
tcgtaacaagggaattgatagtgagccagggcccaa

SEQ ID NO: 19750 - DNA, 37 bp, Artificial Sequence
  Synthetic oligonucleotide
tgtgcgaacactgcgtatcaatctattggttacagga

SEQ ID NO: 19751 - DNA, 36 bp, Artificial Sequence
  Synthetic oligonucleotide
tttaaggactagcggtgggaggagctgtcctggcta

SEQ ID NO: 19752 - DNA, 34 bp, Artificial Sequence
  Synthetic oligonucleotide
agtcacgaagatatcacggggagactaaacggtg

SEQ ID NO: 19753 - DNA, 36 bp, Artificial Sequence
  Synthetic oligonucleotide
catgagggaagcaaatacagtacacggcttgctaga

SEQ ID NO: 19754 - DNA, 36 bp, Artificial Sequence
  Synthetic oligonucleotide
ccctgatcgaagtagtgcggtaaaattgcgaacgta

SEQ ID NO: 19755 - DNA, 37 bp, Artificial Sequence
  Synthetic oligonucleotide
ggactgccgttccatgggttttgagctcagtttggga

SEQ ID NO: 19756 - DNA, 35 bp, Artificial Sequence
  Synthetic oligonucleotide
tacatcatgcgggggctccatgggttctatcgtgg

SEQ ID NO: 19757 - DNA, 37 bp, Artificial Sequence
  Synthetic oligonucleotide
tacgtgttaggaggcttgagccaaccacgttaagaga

SEQ ID NO: 19758 - DNA, 37 bp, Artificial Sequence
  Synthetic oligonucleotide
tgacacgttggctgttaaacaccaggcagtctaaaga

SEQ ID NO: 19759 - DNA, 38 bp, Artificial Sequence
  Synthetic oligonucleotide
tgtctccgcaaggggctaatacttatactgccatttga

SEQ ID NO: 19760 - DNA, 38 bp, Artificial Sequence
  Synthetic oligonucleotide
aggtgcacggagtcgggagactctattcaagtagctga

SEQ ID NO: 19761 - DNA, 38 bp, Artificial Sequence
  Synthetic oligonucleotide
gcagttttgcggtagtttcaaagtgggcattacactga

SEQ ID NO: 19762 - DNA, 35 bp, Artificial Sequence
  Synthetic oligonucleotide
gttacagccatattttatccgacctgcagattaac

SEQ ID NO: 19763 - DNA, 36 bp, Artificial Sequence
  Synthetic oligonucleotide
gttatagttgcattatgcgacatgttaggtttgcta

SEQ ID NO: 19764 - DNA, 38 bp, Artificial Sequence
  Synthetic oligonucleotide
tccctccccctcgtggaagtcgaccagatagaccgtga

SEQ ID NO: 19765 - DNA, 38 bp, Artificial Sequence
  Synthetic oligonucleotide
agtcgggtagttggcgactgaactgtatctatgactga

SEQ ID NO: 19766 - DNA, 36 bp, Artificial Sequence
  Synthetic oligonucleotide
gcctacggggtgtgatacgaagcctttgaacacata

SEQ ID NO: 19767 - DNA, 36 bp, Artificial Sequence
  Synthetic oligonucleotide
gctgtgtagttatgggcaaatacactgacgtttgga

SEQ ID NO: 19768 - DNA, 35 bp, Artificial Sequence
  Synthetic oligonucleotide
tctaatccatgttcatagctcgacgttccttgcgg

SEQ ID NO: 19769 - DNA, 36 bp, Artificial Sequence
  Synthetic oligonucleotide
tcttgcgatcaaatttgccacgcccacggaacgtta

SEQ ID NO: 19770 - DNA, 36 bp, Artificial Sequence
  Synthetic oligonucleotide
ttgggtcatgcagagggggttgagagtttcactgga

SEQ ID NO: 19771 - DNA, 35 bp, Artificial Sequence
  Synthetic oligonucleotide
tctgcacggctgtggccacatggtcagtttcaacc

SEQ ID NO: 19772 - DNA, 37 bp, Artificial Sequence
  Synthetic oligonucleotide
acaactcgccgcaaaatcgtggtatgatacagccaga

SEQ ID NO: 19773 - DNA, 36 bp, Artificial Sequence
  Synthetic oligonucleotide
ggaagggcactcacagccaatgtccatcgaattata

SEQ ID NO: 19774 - DNA, 37 bp, Artificial Sequence
  Synthetic oligonucleotide
gggaccggactgcacgaaagctcctgacaggaaaaga

SEQ ID NO: 19775 - DNA, 35 bp, Artificial Sequence
  Synthetic oligonucleotide
gtgggggtcgagcttaacaccgacgcgggaaaatg

SEQ ID NO: 19776 - DNA, 36 bp, Artificial Sequence
  Synthetic oligonucleotide
tgttggtaacgtgcaaagtgagacggaagcctaaaa

SEQ ID NO: 19777 - DNA, 36 bp, Artificial Sequence
  Synthetic oligonucleotide
aacgatctacggtaagactgcaatactgattggtga

SEQ ID NO: 19778 - DNA, 36 bp, Artificial Sequence
  Synthetic oligonucleotide
agaacgtgagctcattgcgtggaaatgcatatctga

SEQ ID NO: 19779 - DNA, 38 bp, Artificial Sequence
  Synthetic oligonucleotide
aatcgggctgggcacaacgtcagtataacgatttgtga

SEQ ID NO: 19780 - DNA, 38 bp, Artificial Sequence
  Synthetic oligonucleotide
acaaacggtacgcacccagtgaggcgtgcgagatttga

SEQ ID NO: 19781 - DNA, 38 bp, Artificial Sequence
  Synthetic oligonucleotide
gaagagctcaggtgtttgtggtcgacggttcggactga

SEQ ID NO: 19782 - DNA, 36 bp, Artificial Sequence
  Synthetic oligonucleotide
acccagccggtgtatccgtaactgggggatggggta

SEQ ID NO: 19783 - DNA, 36 bp, Artificial Sequence
  Synthetic oligonucleotide
gttcccgaggagttacgcacgttcgtgacgcgcaaa

SEQ ID NO: 19784 - DNA, 37 bp, Artificial Sequence
  Synthetic oligonucleotide
ttaacgcaggattaaggcaaagcactgaggaaggcga

SEQ ID NO: 19785 - DNA, 35 bp, Artificial Sequence
  Synthetic oligonucleotide
acactaccgaacggttaggagctcgactgttagga

SEQ ID NO: 19786 - DNA, 37 bp, Artificial Sequence
  Synthetic oligonucleotide
gagcctggctgacatggatgtcaatgtcagaacggga

SEQ ID NO: 19787 - DNA, 36 bp, Artificial Sequence
  Synthetic oligonucleotide
gagtacagcctagttttatttggatcacaaatgata

SEQ ID NO: 19788 - DNA, 37 bp, Artificial Sequence
  Synthetic oligonucleotide
tttaaggctacagggtgttatgtatgcggggacatga

SEQ ID NO: 19789 - DNA, 37 bp, Artificial Sequence
  Synthetic oligonucleotide
gaaaaacgcctacagctagagaatgggagtcggcgga

SEQ ID NO: 19790 - DNA, 35 bp, Artificial Sequence
  Synthetic oligonucleotide
gcactatgaagcccgacatgtaatctaccatcaag

SEQ ID NO: 19791 - DNA, 37 bp, Artificial Sequence
  Synthetic oligonucleotide
acccccccgacaatctttgtcattgccagtcttatga

SEQ ID NO: 19792 - DNA, 35 bp, Artificial Sequence
  Synthetic oligonucleotide
cgtaggcgttccaatgcacacagattgatggacga

SEQ ID NO: 19793 - DNA, 35 bp, Artificial Sequence
  Synthetic oligonucleotide
tgtcgcgatctagggtaggggttgtaaatcagaat

SEQ ID NO: 19794 - DNA, 35 bp, Artificial Sequence
  Synthetic oligonucleotide
accacaggccttatctttcggatgtggggtgtcta

SEQ ID NO: 19795 - DNA, 36 bp, Artificial Sequence
  Synthetic oligonucleotide
gtaccggaatatatgcgtcccagtgacacttggata

SEQ ID NO: 19796 - DNA, 35 bp, Artificial Sequence
  Synthetic oligonucleotide
aatacgtgtgcgatacggacgtcacactgaccgta

SEQ ID NO: 19797 - DNA, 35 bp, Artificial Sequence
  Synthetic oligonucleotide
accgtggtcataacgtagatgtgatgggtaattag

SEQ ID NO: 19798 - DNA, 37 bp, Artificial Sequence
  Synthetic oligonucleotide
gcattagtttaggcactgtactgtagcatatccttga

SEQ ID NO: 19799 - DNA, 35 bp, Artificial Sequence
  Synthetic oligonucleotide
gggacttgaatatcacgtgacgagtggtccccgga

SEQ ID NO: 19800 - DNA, 35 bp, Artificial Sequence
  Synthetic oligonucleotide
tacaggggtacgcgtagcatcctgacactgtctta

SEQ ID NO: 19801 - DNA, 35 bp, Artificial Sequence
  Synthetic oligonucleotide
aatcgttacaagtgcctaaatctcacaggaccgta

SEQ ID NO: 19802 - DNA, 38 bp, Artificial Sequence
  Synthetic oligonucleotide
taggcgggaagtttcataattattgaaccgacgcttga

SEQ ID NO: 19803 - DNA, 35 bp, Artificial Sequence
  Synthetic oligonucleotide
agtagatcaaacaggttcgatacaatgcctaacgt

SEQ ID NO: 19804 - DNA, 35 bp, Artificial Sequence
  Synthetic oligonucleotide
gcgatcatgaatatgggcggatgtaactagctatg

SEQ ID NO: 19805 - DNA, 37 bp, Artificial Sequence
  Synthetic oligonucleotide
gaacggaatgtgtaccgtgcctaaggagtgcatttga

SEQ ID NO: 19806 - DNA, 37 bp, Artificial Sequence
  Synthetic oligonucleotide
atggaagaccctgggctgccgagcaagaaatcagaga

SEQ ID NO: 19807 - DNA, 36 bp, Artificial Sequence
  Synthetic oligonucleotide
atccatctcgcgatgcaatggagatatacggtgata

SEQ ID NO: 19808 - DNA, 35 bp, Artificial Sequence
  Synthetic oligonucleotide
attcatactcagtctgccagacgtacataattcct

SEQ ID NO: 19809 - DNA, 38 bp, Artificial Sequence
  Synthetic oligonucleotide
tacggtggcacgtgcctgctgtgcccgattgatcgtga

SEQ ID NO: 19810 - DNA, 38 bp, Artificial Sequence
  Synthetic oligonucleotide
attgtaagtacggctccggtgtgtaacgtccccgctga

SEQ ID NO: 19811 - DNA, 36 bp, Artificial Sequence
  Synthetic oligonucleotide
tttgtcgttgaatgtcgtaatgattaatacggtcaa

SEQ ID NO: 19812 - DNA, 37 bp, Artificial Sequence
  Synthetic oligonucleotide
gtctaccctgaagaacagactaaacgccttgaggtga

SEQ ID NO: 19813 - DNA, 35 bp, Artificial Sequence
  Synthetic oligonucleotide
tgcatccaagtcagttataaaagtaagttggggga

SEQ ID NO: 19814 - DNA, 37 bp, Artificial Sequence
  Synthetic oligonucleotide
ttagtcgagctatgtgatggttttagattgtggagga

SEQ ID NO: 19815 - DNA, 38 bp, Artificial Sequence
  Synthetic oligonucleotide
aaagtggcattcctaggacaaataagtgggtacattga

SEQ ID NO: 19816 - DNA, 35 bp, Artificial Sequence
  Synthetic oligonucleotide
ggttgtatgcgtgcgcagtccgataggctctatac

SEQ ID NO: 19817 - DNA, 37 bp, Artificial Sequence
  Synthetic oligonucleotide
actaaaagcaacgagtctcgtcacatcgatcattcga

SEQ ID NO: 19818 - DNA, 35 bp, Artificial Sequence
  Synthetic oligonucleotide
ggaggtaacccagacggagcgtgtcccggaatcta

SEQ ID NO: 19819 - DNA, 36 bp, Artificial Sequence
  Synthetic oligonucleotide
tagatgccatgacggattccaaggaataagatccga

SEQ ID NO: 19820 - DNA, 38 bp, Artificial Sequence
  Synthetic oligonucleotide
aagtgacataggtatgtacattacgtagggaaacctga

SEQ ID NO: 19821 - DNA, 36 bp, Artificial Sequence
  Synthetic oligonucleotide
ggtaatcgaactaaactatgcgtaccgggctcgcac

SEQ ID NO: 19822 - DNA, 37 bp, Artificial Sequence
  Synthetic oligonucleotide
tgatccaagataggcgtgagtagttatgcggttatga

SEQ ID NO: 19823 - DNA, 38 bp, Artificial Sequence
  Synthetic oligonucleotide
gggaaagttcttggtcgccctatggcgtgtaggtctga

SEQ ID NO: 19824 - DNA, 38 bp, Artificial Sequence
  Synthetic oligonucleotide
ggggctagccctcattagtagaattgatgttaatctga

SEQ ID NO: 19825 - DNA, 38 bp, Artificial Sequence
  Synthetic oligonucleotide
ttcggtcgctggggatccgagcatagcttacgctttga

SEQ ID NO: 19826 - DNA, 35 bp, Artificial Sequence
  Synthetic oligonucleotide
aacacattaagcgtgagctagttataggacgaagt

SEQ ID NO: 19827 - DNA, 36 bp, Artificial Sequence
  Synthetic oligonucleotide
gacaatcttttgtggtcgtttccgtacacgtgttta

SEQ ID NO: 19828 - DNA, 36 bp, Artificial Sequence
  Synthetic oligonucleotide
gatatctataggcgaatgggatacccccccgaaaca

SEQ ID NO: 19829 - DNA, 38 bp, Artificial Sequence
  Synthetic oligonucleotide
gacggtctattgtggaatcagggattttgctattgtga

SEQ ID NO: 19830 - DNA, 38 bp, Artificial Sequence
  Synthetic oligonucleotide
cgacccaaccagggagatgaccatacccagcctgctga

SEQ ID NO: 19831 - DNA, 37 bp, Artificial Sequence
  Synthetic oligonucleotide
ggaactgccacatgtgccacggatcttcagccctcga

SEQ ID NO: 19832 - DNA, 35 bp, Artificial Sequence
  Synthetic oligonucleotide
tcgccggatgttttcataacgcccctcccccgtaa

SEQ ID NO: 19833 - DNA, 35 bp, Artificial Sequence
  Synthetic oligonucleotide
actggagcgatcagaaacctttcaggaccgaatcg

SEQ ID NO: 19834 - DNA, 36 bp, Artificial Sequence
  Synthetic oligonucleotide
agtctaagcccgcagataaccatagcaacgaagaca

SEQ ID NO: 19835 - DNA, 37 bp, Artificial Sequence
  Synthetic oligonucleotide
tgacatcgtagctacgttaaatctctgcctgggagga

SEQ ID NO: 19836 - DNA, 37 bp, Artificial Sequence
  Synthetic oligonucleotide
tgtacactagagctgatgtgcatctggtcacttacga

SEQ ID NO: 19837 - DNA, 36 bp, Artificial Sequence
  Synthetic oligonucleotide
accagacaggctagagtccgggggaggtacattgga

SEQ ID NO: 19838 - DNA, 36 bp, Artificial Sequence
  Synthetic oligonucleotide
acggactgccgtgtgcctcccggctgatttatccga

SEQ ID NO: 19839 - DNA, 37 bp, Artificial Sequence
  Synthetic oligonucleotide
ggtggggctgtgcacgtaaattgcctctccgacgaga

SEQ ID NO: 19840 - DNA, 38 bp, Artificial Sequence
  Synthetic oligonucleotide
ccattggtcgggttgtattattatgcgcatgtaagtga

SEQ ID NO: 19841 - DNA, 35 bp, Artificial Sequence
  Synthetic oligonucleotide
gtcgcaaagcgaatcgtacaaagaccccggaaacg

SEQ ID NO: 19842 - DNA, 36 bp, Artificial Sequence
  Synthetic oligonucleotide
gcccaacctgtgtattgttcacagacgtataggcaa

SEQ ID NO: 19843 - DNA, 38 bp, Artificial Sequence
  Synthetic oligonucleotide
tttaccgacgcgttcagcctaagagtaggttcgtgtga

SEQ ID NO: 19844 - DNA, 35 bp, Artificial Sequence
  Synthetic oligonucleotide
attggtgctgcggagttgggtccatgcatattaga

SEQ ID NO: 19845 - DNA, 35 bp, Artificial Sequence
  Synthetic oligonucleotide
acaagatccgcgaaggacgtatattcggagctatt

SEQ ID NO: 19846 - DNA, 36 bp, Artificial Sequence
  Synthetic oligonucleotide
acctctttgccgtacattgatcgcgtacggccttaa

SEQ ID NO: 19847 - DNA, 35 bp, Artificial Sequence
  Synthetic oligonucleotide
agggcctactcagctaagccccccctggttaggct

SEQ ID NO: 19848 - DNA, 37 bp, Artificial Sequence
  Synthetic oligonucleotide
ggtcccgaggttggaagtacatgcgacatcattttga

SEQ ID NO: 19849 - DNA, 36 bp, Artificial Sequence
  Synthetic oligonucleotide
ggaagcatcggcgtgaaaccgttaagccttccagca

SEQ ID NO: 19850 - DNA, 35 bp, Artificial Sequence
  Synthetic oligonucleotide
tatgcgctgccctagttcccaggggccacttagac

SEQ ID NO: 19851 - DNA, 36 bp, Artificial Sequence
  Synthetic oligonucleotide
cagtacgggagtctgtgaagatgtattccgggacga

SEQ ID NO: 19852 - DNA, 36 bp, Artificial Sequence
  Synthetic oligonucleotide
ggtaagatcatgagatctcgttaggcgacaacgtta

SEQ ID NO: 19853 - DNA, 36 bp, Artificial Sequence
  Synthetic oligonucleotide
ttccgatgtgtcttcgtctgctcaagttccaccgaa

SEQ ID NO: 19854 - DNA, 35 bp, Artificial Sequence
  Synthetic oligonucleotide
acgtccttagaggttgtgaggggttgccacgatag

SEQ ID NO: 19855 - DNA, 35 bp, Artificial Sequence
  Synthetic oligonucleotide
agtaaggtcctcaaccagaaccggttacttgtatg

SEQ ID NO: 19856 - DNA, 37 bp, Artificial Sequence
  Synthetic oligonucleotide
ccgcctctcccctcctctccaacaaatagtctgccga

SEQ ID NO: 19857 - DNA, 36 bp, Artificial Sequence
  Synthetic oligonucleotide
gatgcgaggagtttactgtaatgttgctggtgccga

SEQ ID NO: 19858 - DNA, 38 bp, Artificial Sequence
  Synthetic oligonucleotide
tgatgagccacacggtgcatggacgtcctatgttatga

SEQ ID NO: 19859 - DNA, 36 bp, Artificial Sequence
  Synthetic oligonucleotide
atgctcgacatcacgcccgattactcggtcgactga

SEQ ID NO: 19860 - DNA, 35 bp, Artificial Sequence
  Synthetic oligonucleotide
agtgggagtgcaattcagtcagacacaacccgccc

SEQ ID NO: 19861 - DNA, 35 bp, Artificial Sequence
  Synthetic oligonucleotide
gtgtccatctagccaaatacggattcactgacatt

SEQ ID NO: 19862 - DNA, 38 bp, Artificial Sequence
  Synthetic oligonucleotide
cctacaataggcgctcctaactttcaaagctgctttga

SEQ ID NO: 19863 - DNA, 37 bp, Artificial Sequence
  Synthetic oligonucleotide
gtcaattcgactaggtggagccaatcggatcgcgtga

SEQ ID NO: 19864 - DNA, 36 bp, Artificial Sequence
  Synthetic oligonucleotide
tgctaggggccttaacactaggttgtgtctgttgga

SEQ ID NO: 19865 - DNA, 35 bp, Artificial Sequence
  Synthetic oligonucleotide
tttgggaagaagattatacgacggtttgaatcgct

SEQ ID NO: 19866 - DNA, 37 bp, Artificial Sequence
  Synthetic oligonucleotide
tgtactgcatacgcactgatattgggatgctcctcga

SEQ ID NO: 19867 - DNA, 37 bp, Artificial Sequence
  Synthetic oligonucleotide
ctgcatagtcggtcacgataaacgtaggttgcggaga

SEQ ID NO: 19868 - DNA, 35 bp, Artificial Sequence
  Synthetic oligonucleotide
gcggctttcaaatataatcttgtgcccagaagtgg

SEQ ID NO: 19869 - DNA, 35 bp, Artificial Sequence
  Synthetic oligonucleotide
accggtgtcagacagggcgtgcggacggaaccggg

SEQ ID NO: 19870 - DNA, 36 bp, Artificial Sequence
  Synthetic oligonucleotide
cgtgggggaattagtttcgatggtggaacagtgtta

SEQ ID NO: 19871 - DNA, 37 bp, Artificial Sequence
  Synthetic oligonucleotide
ttgcgtactgggccgactgggtatgcatatttcttga

SEQ ID NO: 19872 - DNA, 38 bp, Artificial Sequence
  Synthetic oligonucleotide
tctccagctttgggaggggtgctaaagggcatgggtga

SEQ ID NO: 19873 - DNA, 36 bp, Artificial Sequence
  Synthetic oligonucleotide
gataggaggtttggtaagcctgggggaaccaggaca

SEQ ID NO: 19874 - DNA, 37 bp, Artificial Sequence
  Synthetic oligonucleotide
aacgacgggacagtacgattgccctcctcgtagcaga

SEQ ID NO: 19875 - DNA, 37 bp, Artificial Sequence
  Synthetic oligonucleotide
gtagcgatgcgcccctagccaacgccctatgcaagga

SEQ ID NO: 19876 - DNA, 35 bp, Artificial Sequence
  Synthetic oligonucleotide
agtcgacgacagacttgacacgacaccgctatatt

SEQ ID NO: 19877 - DNA, 38 bp, Artificial Sequence
  Synthetic oligonucleotide
taaatcgctgcaaggggttctatggtacaccgaggtga

SEQ ID NO: 19878 - DNA, 38 bp, Artificial Sequence
  Synthetic oligonucleotide
ggtacgtattctcttagtccgcggacttccaggggtga

SEQ ID NO: 19879 - DNA, 34 bp, Artificial Sequence
  Synthetic oligonucleotide
gggcttcggatgggccgtagctccccctctccgc

SEQ ID NO: 19880 - DNA, 37 bp, Artificial Sequence
  Synthetic oligonucleotide
gcatacgcatcaccagtatctagcatcaactcacgga

SEQ ID NO: 19881 - DNA, 37 bp, Artificial Sequence
  Synthetic oligonucleotide
gggaaccccataaggggaaccgtgcgttgtcacgcga

SEQ ID NO: 19882 - DNA, 38 bp, Artificial Sequence
  Synthetic oligonucleotide
gcgttgcttagcaggtaatttgcgaagagcggcattga

SEQ ID NO: 19883 - DNA, 37 bp, Artificial Sequence
  Synthetic oligonucleotide
gacagacccagctccccgcgtgatgacgggaacgcga

SEQ ID NO: 19884 - DNA, 37 bp, Artificial Sequence
  Synthetic oligonucleotide
tctgtagcgaaatcttacagataatgtacggcttgga

SEQ ID NO: 19885 - DNA, 35 bp, Artificial Sequence
  Synthetic oligonucleotide
acgccggggcatgttatacagtttacatgctagaa

SEQ ID NO: 19886 - DNA, 36 bp, Artificial Sequence
  Synthetic oligonucleotide
agggggggaggtcattttcgagagaaccgtacatca

SEQ ID NO: 19887 - DNA, 35 bp, Artificial Sequence
  Synthetic oligonucleotide
aagcacggggtcagctgcgactaaaatcaacgtta

SEQ ID NO: 19888 - DNA, 37 bp, Artificial Sequence
  Synthetic oligonucleotide
tgtttacggtgactggtgttcggtaacccttaataga

SEQ ID NO: 19889 - DNA, 35 bp, Artificial Sequence
  Synthetic oligonucleotide
aattgcaaccgacacatgttgacggcccccgctcg

SEQ ID NO: 19890 - DNA, 37 bp, Artificial Sequence; identical to SEQ ID NO: 18363
  Synthetic oligonucleotide

SEQ ID NO: 19891 - DNA, 35 bp, Artificial Sequence
  Synthetic oligonucleotide
tcagtacgagcggcctgcttgtgctgggagatctt

SEQ ID NO: 19892 - DNA, 36 bp, Artificial Sequence
  Synthetic oligonucleotide
gcttgcatgtccggacgtgttccttaggacccaaaa

SEQ ID NO: 19893 - DNA, 35 bp, Artificial Sequence
  Synthetic oligonucleotide
tccacggggtggtctaaaccgggaaggcgcatcat

SEQ ID NO: 19894 - DNA, 36 bp, Artificial Sequence
  Synthetic oligonucleotide
gtggtcgtcacatgtgctttcacgtagggagaataa

SEQ ID NO: 19895 - DNA, 36 bp, Artificial Sequence
  Synthetic oligonucleotide
tacgaagcttcatagtcaacaaccggtagacgtgca

SEQ ID NO: 19896 - DNA, 35 bp, Artificial Sequence
  Synthetic oligonucleotide
aggttgcgattggaaagttacggcgctgcaggctg

SEQ ID NO: 19897 - DNA, 35 bp, Artificial Sequence
  Synthetic oligonucleotide
agcagacttagggggtgacatatctgacgggccgc

SEQ ID NO: 19898 - DNA, 35 bp, Artificial Sequence
  Synthetic oligonucleotide
aacgtggcgtatttatactagggatatggccttta

SEQ ID NO: 19899 - DNA, 36 bp, Artificial Sequence; identical to SEQ ID NO: 16261
  Synthetic oligonucleotide

SEQ ID NO: 19900 - DNA, 35 bp, Artificial Sequence
  Synthetic oligonucleotide
aagccgtgacacgcttagggggactcgtttcgtta

SEQ ID NO: 19901 - DNA, 35 bp, Artificial Sequence
  Synthetic oligonucleotide
ttgatcagctgactcatgtcgtgacttaattccgt

SEQ ID NO: 19902 - DNA, 37 bp, Artificial Sequence
  Synthetic oligonucleotide
tagctgagcgcgtgcgaccgacttgaccttgccgtga

SEQ ID NO: 19903 - DNA, 36 bp, Artificial Sequence
  Synthetic oligonucleotide
tgagagacccaccgatgaggaatgcgtggagacgaa

SEQ ID NO: 19904 - DNA, 35 bp, Artificial Sequence
  Synthetic oligonucleotide
gttcggagaatacgagagcaccaaagctgtccatg

SEQ ID NO: 19905 - DNA, 36 bp, Artificial Sequence
  Synthetic oligonucleotide
ataagcaccctcgggcccataagtgacacataagta

SEQ ID NO: 19906 - DNA, 35 bp, Artificial Sequence
  Synthetic oligonucleotide
tgcggaaatgaaccttgactgacgtgtgtcgctct

SEQ ID NO: 19907 - DNA, 37 bp, Artificial Sequence
  Synthetic oligonucleotide
gcacctaagtctgctaaggaaggatttgttaccagga

SEQ ID NO: 19908 - DNA, 35 bp, Artificial Sequence
  Synthetic oligonucleotide
tcggaagtaagcctgttggagaattatacgtggtc

SEQ ID NO: 19909 - DNA, 35 bp, Artificial Sequence
  Synthetic oligonucleotide
acagtggcccaaggatctaaacctcacatcgccac

SEQ ID NO: 19910 - DNA, 38 bp, Artificial Sequence
  Synthetic oligonucleotide
gggagagactcggacggattagactttagaaattgtga

SEQ ID NO: 19911 - DNA, 35 bp, Artificial Sequence
  Synthetic oligonucleotide
ccatctggaacggcgccccaggtcagactccccct

SEQ ID NO: 19912 - DNA, 38 bp, Artificial Sequence
  Synthetic oligonucleotide
tccggcgtctcacaacaaactgacggggagcacactga

SEQ ID NO: 19913 - DNA, 36 bp, Artificial Sequence
  Synthetic oligonucleotide
gtagagcaagcccaacggttgctgccttggtgacaa

SEQ ID NO: 19914 - DNA, 36 bp, Artificial Sequence
  Synthetic oligonucleotide
aatgtcaagttcagtcctgtctgaagattcgaaata

SEQ ID NO: 19915 - DNA, 35 bp, Artificial Sequence
  Synthetic oligonucleotide
aaaccatgcgggtagggggcggtcttggcaaggtt

SEQ ID NO: 19916 - DNA, 37 bp, Artificial Sequence
  Synthetic oligonucleotide
gctgtccgttcttcacagagcatgtcgcttaagtcga

SEQ ID NO: 19917 - DNA, 35 bp, Artificial Sequence
  Synthetic oligonucleotide
aaggaagtgggtgaatgatccaggtacaaagtttg

SEQ ID NO: 19918 - DNA, 37 bp, Artificial Sequence
  Synthetic oligonucleotide
gtgccaagaagagttagctagttaaggactgtgtcga

SEQ ID NO: 19919 - DNA, 37 bp, Artificial Sequence
  Synthetic oligonucleotide
acgttgcactgtttttgcatggccctcgatgtcgtga

SEQ ID NO: 19920 - DNA, 35 bp, Artificial Sequence
  Synthetic oligonucleotide
gctgggctcgtcctcatcacaagtacccgtgtacg

SEQ ID NO: 19921 - DNA, 35 bp, Artificial Sequence
  Synthetic oligonucleotide
aaccgtgtactgatacagccacgtgaacactctga

SEQ ID NO: 19922 - DNA, 36 bp, Artificial Sequence
  Synthetic oligonucleotide
aatgcgtacgaatattgtcgctggtaggttatggca

SEQ ID NO: 19923 - DNA, 36 bp, Artificial Sequence
  Synthetic oligonucleotide
gtcaaggcaccgaatatgggggcctggttatgcgaa

SEQ ID NO: 19924 - DNA, 35 bp, Artificial Sequence
  Synthetic oligonucleotide
tagagtcgcacacgttcggaccagttgccttattc

SEQ ID NO: 19925 - DNA, 37 bp, Artificial Sequence
  Synthetic oligonucleotide
gcgttgcttggatattggacggcctaatcatcataga

SEQ ID NO: 19926 - DNA, 36 bp, Artificial Sequence
  Synthetic oligonucleotide
tgggagatggccagatcgtctttccccccgagtata

SEQ ID NO: 19927 - DNA, 37 bp, Artificial Sequence
  Synthetic oligonucleotide
taacggttgtcatcaggaatctgtcgtaaacggggga

SEQ ID NO: 19928 - DNA, 36 bp, Artificial Sequence
  Synthetic oligonucleotide
gcgacgaggaaggagcgttgacttctgttcgtcgaa

SEQ ID NO: 19929 - DNA, 37 bp, Artificial Sequence
  Synthetic oligonucleotide
gagggaggtggtgggctcccgcgatggacctaagcga

SEQ ID NO: 19930 - DNA, 38 bp, Artificial Sequence
  Synthetic oligonucleotide
catcggtcgactgagaccgagtagaactgtggttatga

SEQ ID NO: 19931 - DNA, 33 bp, Artificial Sequence
  Synthetic oligonucleotide
agctgttcgcggggtgtctaacgataccgagtg

SEQ ID NO: 19932 - DNA, 35 bp, Artificial Sequence
  Synthetic oligonucleotide
ctttgcggagtcaagcacctgtacagggttcccgt

SEQ ID NO: 19933 - DNA, 36 bp, Artificial Sequence
  Synthetic oligonucleotide
taccttagaagtggtaagacaaggtagcaggcttga

SEQ ID NO: 19934 - DNA, 37 bp, Artificial Sequence
  Synthetic oligonucleotide
tcggaggatcatagaacattgagcggcatttacttga

SEQ ID NO: 19935 - DNA, 38 bp, Artificial Sequence
  Synthetic oligonucleotide
acgtgtgaccgtgcatcatcgacctggaagggctgtga

SEQ ID NO: 19936 - DNA, 37 bp, Artificial Sequence
  Synthetic oligonucleotide
gttaagagaatgcgacgaggtgcattcattcgatgga

SEQ ID NO: 19937 - DNA, 37 bp, Artificial Sequence
  Synthetic oligonucleotide
atcgggactcgattgcgaggccaacggcacattgcga

SEQ ID NO: 19938 - DNA, 36 bp, Artificial Sequence
  Synthetic oligonucleotide
gcaccagttgaggttagacccttatctgtcacaata

SEQ ID NO: 19939 - DNA, 35 bp, Artificial Sequence
  Synthetic oligonucleotide
taaacccctctctgagacacgtaaaggtgcatgca

SEQ ID NO: 19940 - DNA, 35 bp, Artificial Sequence
  Synthetic oligonucleotide
tggtctaacgtagggcgcaccgcatcactccttcg

SEQ ID NO: 19941 - DNA, 36 bp, Artificial Sequence
  Synthetic oligonucleotide
gaaggcgcacggcataccggaattgcgctagctaca

SEQ ID NO: 19942 - DNA, 36 bp, Artificial Sequence
  Synthetic oligonucleotide
gcgtgattgtgtggccgggacaaacaacaattcaca

SEQ ID NO: 19943 - DNA, 35 bp, Artificial Sequence
  Synthetic oligonucleotide
tccgaggcgttcctacacatcacctggatttgtaa

SEQ ID NO: 19944 - DNA, 35 bp, Artificial Sequence
  Synthetic oligonucleotide
cacgagaaagccggccccgactgccacttgcaccc

SEQ ID NO: 19945 - DNA, 35 bp, Artificial Sequence
  Synthetic oligonucleotide
aagcgctcgaccgtgctagcctcagtaaccacgtt

SEQ ID NO: 19946 - DNA, 36 bp, Artificial Sequence
  Synthetic oligonucleotide
ggattcccgcggcgtggtctgggcacaacaaagata

SEQ ID NO: 19947 - DNA, 36 bp, Artificial Sequence
  Synthetic oligonucleotide
acggggactgcggtatggaagattatccgagaccga

SEQ ID NO: 19948 - DNA, 35 bp, Artificial Sequence
  Synthetic oligonucleotide
tttcgggcccattaaaacgactcgacgttacgcct

SEQ ID NO: 19949 - DNA, 35 bp, Artificial Sequence
  Synthetic oligonucleotide
gcaagcatgcaagtttagacgtgtattcctgcaaa

SEQ ID NO: 19950 - DNA, 37 bp, Artificial Sequence
  Synthetic oligonucleotide
gggcaatggatgcggttagtcatgtcttacgagtgga

SEQ ID NO: 19951 - DNA, 35 bp, Artificial Sequence
  Synthetic oligonucleotide
aggtcccaaggtgatgtggggtttacggaattgca

SEQ ID NO: 19952 - DNA, 38 bp, Artificial Sequence
  Synthetic oligonucleotide
agaggcttgcctggatctattgcgcgtgttacaactga

SEQ ID NO: 19953 - DNA, 36 bp, Artificial Sequence
  Synthetic oligonucleotide
agtgatgccctatatgcatgggcctatcagacagga

SEQ ID NO: 19954 - DNA, 38 bp, Artificial Sequence
  Synthetic oligonucleotide
gaacatctggccgcgccttccatgtctctttgccgtga

SEQ ID NO: 19955 - DNA, 36 bp, Artificial Sequence
  Synthetic oligonucleotide
tcaaggaatgcggatgtaatgcattgacccagccca

SEQ ID NO: 19956 - DNA, 36 bp, Artificial Sequence
  Synthetic oligonucleotide
ttcgcgccgggatacgtctccttcgttaacctagca

SEQ ID NO: 19957 - DNA, 35 bp, Artificial Sequence
  Synthetic oligonucleotide
gacctgccaacgggtatcatctgcgtataggccgc

SEQ ID NO: 19958 - DNA, 38 bp, Artificial Sequence
  Synthetic oligonucleotide
tatctgcgtttgattgcaaaatcgacttgttaaagtga

SEQ ID NO: 19959 - DNA, 37 bp, Artificial Sequence
  Synthetic oligonucleotide
tagtcagtcactaggagtgctcaaactaaaagggcga

SEQ ID NO: 19960 - DNA, 36 bp, Artificial Sequence
  Synthetic oligonucleotide
tgtgtgcggcctacgtgcttgtaacgagtcgatgaa

SEQ ID NO: 19961 - DNA, 36 bp, Artificial Sequence
  Synthetic oligonucleotide
agggggcacgggtttgtttctcattgatagaaaata

SEQ ID NO: 19962 - DNA, 36 bp, Artificial Sequence
  Synthetic oligonucleotide
gaggtgcgggattttctcgcgcgggcacgcggacaa

SEQ ID NO: 19963 - DNA, 35 bp, Artificial Sequence
  Synthetic oligonucleotide
ggatcaacgggctggcataaatagtagaccgcttt

SEQ ID NO: 19964 - DNA, 36 bp, Artificial Sequence
  Synthetic oligonucleotide
tgtcaccccgggttatcctctcgggataacggcgta

SEQ ID NO: 19965 - DNA, 37 bp, Artificial Sequence
  Synthetic oligonucleotide
gtctatggttaagcctatacattcgactcccccgcga

SEQ ID NO: 19966 - DNA, 35 bp, Artificial Sequence; identical to SEQ ID NO: 3605
  Synthetic oligonucleotide

SEQ ID NO: 19967 - DNA, 37 bp, Artificial Sequence
  Synthetic oligonucleotide
gacattcgctggatctggagtggatttttttggagga

SEQ ID NO: 19968 - DNA, 37 bp, Artificial Sequence
  Synthetic oligonucleotide
agttgggaggtatcggcctcagatgcaattacgtcga

SEQ ID NO: 19969 - DNA, 37 bp, Artificial Sequence
  Synthetic oligonucleotide
ttaatccctacaagatcgagcttgagacgagtagaga

SEQ ID NO: 19970 - DNA, 35 bp, Artificial Sequence
  Synthetic oligonucleotide
ccgatcgatttaactcgttatgttaacgcatgctc

SEQ ID NO: 19971 - DNA, 35 bp, Artificial Sequence
  Synthetic oligonucleotide
gcgtttctattctgccccccctcgcgtgagttgga

SEQ ID NO: 19972 - DNA, 38 bp, Artificial Sequence
  Synthetic oligonucleotide
gaagatgcgtgtgtgggccatggaggagatttacgtga

SEQ ID NO: 19973 - DNA, 35 bp, Artificial Sequence
  Synthetic oligonucleotide
gacattggcgtgctacaaccttgcgagcccccccc

SEQ ID NO: 19974 - DNA, 37 bp, Artificial Sequence
  Synthetic oligonucleotide
tggggcttcagatcccatggcgagttggatcagacga

SEQ ID NO: 19975 - DNA, 36 bp, Artificial Sequence
  Synthetic oligonucleotide
ttacgggtcgtgatagccatcgcgagggagctcgca

SEQ ID NO: 19976 - DNA, 36 bp, Artificial Sequence
  Synthetic oligonucleotide
ggttccgtgtagactcgtcctagtcaggaaacagga

SEQ ID NO: 19977 - DNA, 35 bp, Artificial Sequence
  Synthetic oligonucleotide
tgggctaggaccaaaatgcagtggattttgagttg

SEQ ID NO: 19978 - DNA, 35 bp, Artificial Sequence
  Synthetic oligonucleotide
gcacagggggtgaagtagaggtggtgaaggtccaa

SEQ ID NO: 19979 - DNA, 34 bp, Artificial Sequence
  Synthetic oligonucleotide
taaatgcgaaccgccctgttcgatcgggtgccta

SEQ ID NO: 19980 - DNA, 35 bp, Artificial Sequence
  Synthetic oligonucleotide
tatgttcgtggcacaccctatgtgcacactctctg

SEQ ID NO: 19981 - DNA, 38 bp, Artificial Sequence
  Synthetic oligonucleotide
tagagcctgtactgaatctgtcttagagtcacgattga

SEQ ID NO: 19982 - DNA, 36 bp, Artificial Sequence
  Synthetic oligonucleotide
gcaccgatgaaaaagtctcctcggaggcaataagga

SEQ ID NO: 19983 - DNA, 36 bp, Artificial Sequence
  Synthetic oligonucleotide
tgacgatgtcattgcatgcgcattgggatgacatta

SEQ ID NO: 19984 - DNA, 38 bp, Artificial Sequence
  Synthetic oligonucleotide
tctaagccagagggacggaaccaggatgctaatagtga

SEQ ID NO: 19985 - DNA, 35 bp, Artificial Sequence
  Synthetic oligonucleotide
gccgcaaaatgccgcgcgtatccttttcatgtaat

SEQ ID NO: 19986 - DNA, 38 bp, Artificial Sequence
  Synthetic oligonucleotide
ggttggctctaggagcgagccagtacattagtctttga

SEQ ID NO: 19987 - DNA, 36 bp, Artificial Sequence
  Synthetic oligonucleotide
tagtcatgttcattgagtgataccgcgcctgctgca

SEQ ID NO: 19988 - DNA, 35 bp, Artificial Sequence
  Synthetic oligonucleotide
gcaagacagcgcttgtggtaataaatcacgctcag

SEQ ID NO: 19989 - DNA, 35 bp, Artificial Sequence
  Synthetic oligonucleotide
tctctttaggcaactacacctggtccaacaatagt

SEQ ID NO: 19990 - DNA, 35 bp, Artificial Sequence
  Synthetic oligonucleotide
gtgcaactctgtgccatgacacatgattgcattgt

SEQ ID NO: 19991 - DNA, 36 bp, Artificial Sequence
  Synthetic oligonucleotide
ggaggaggtgccagcacaccccccatgctgggccga

SEQ ID NO: 19992 - DNA, 35 bp, Artificial Sequence
  Synthetic oligonucleotide
tgctccatagtgctacagttagccatcttgggaga

SEQ ID NO: 19993 - DNA, 35 bp, Artificial Sequence
  Synthetic oligonucleotide
atcagtcactcaagcggagcttatgagtatgacca

SEQ ID NO: 19994 - DNA, 35 bp, Artificial Sequence
  Synthetic oligonucleotide
ggggtcatttcttccgggtgagacaattaccggtt

SEQ ID NO: 19995 - DNA, 36 bp, Artificial Sequence
  Synthetic oligonucleotide
ggtgcgagccactggcgtccgtgcggatcgccaaga

SEQ ID NO: 19996 - DNA, 37 bp, Artificial Sequence
  Synthetic oligonucleotide
gcccgcaaaggataaagaccgcagcaaaacattacga

SEQ ID NO: 19997 - DNA, 37 bp, Artificial Sequence
  Synthetic oligonucleotide
gggtaaaggccaggatgttatcctgagcatattatga

SEQ ID NO: 19998 - DNA, 35 bp, Artificial Sequence
  Synthetic oligonucleotide
gccgtttgaggccgatatgtggacttcaagtctat

SEQ ID NO: 19999 - DNA, 35 bp, Artificial Sequence
  Synthetic oligonucleotide
gggcattcatgcgaaaaggtacaatccgcttcggg

SEQ ID NO: 20000 - DNA, 38 bp, Artificial Sequence
  Synthetic oligonucleotide
atcctcgtgcacggtatgcgtagaaagcggctttttga

SEQ ID NO: 20001 - DNA, 38 bp, Artificial Sequence
  Synthetic oligonucleotide
ggaggtgttgtcggacttggtaagtctgtcatcgttga

SEQ ID NO: 20002 - DNA, 37 bp, Artificial Sequence
  Synthetic oligonucleotide
aaactggcgtcagctggctcctaaaatcaagtatgga

SEQ ID NO: 20003 - DNA, 36 bp, Artificial Sequence
  Synthetic oligonucleotide
aatcgccgtctcatcatctaatcagtagggctaaca

SEQ ID NO: 20004 - DNA, 38 bp, Artificial Sequence
  Synthetic oligonucleotide
tatgcgcgccgcgctcgtagtgggggggctgggaatga

SEQ ID NO: 20005 - DNA, 35 bp, Artificial Sequence
  Synthetic oligonucleotide
cctgtcacaagcgtcttattagaacgatcgccccc

SEQ ID NO: 20006 - DNA, 35 bp, Artificial Sequence
  Synthetic oligonucleotide
gtttttgttgctgtgaggctcatgcccagacatac

SEQ ID NO: 20007 - DNA, 38 bp, Artificial Sequence
  Synthetic oligonucleotide
ttagtccgcgttcacatggttctgtggagagtatttga

SEQ ID NO: 20008 - DNA, 37 bp, Artificial Sequence
  Synthetic oligonucleotide
tcacaggctgagagttcattagccaaccacacgccga

SEQ ID NO: 20009 - DNA, 37 bp, Artificial Sequence
  Synthetic oligonucleotide
acacgtgatctttgtcttttaatctttataatgcaga

SEQ ID NO: 20010 - DNA, 36 bp, Artificial Sequence
  Synthetic oligonucleotide
ggagccaatgcggaccgtgaagtttcaacggcctca

SEQ ID NO: 20011 - DNA, 38 bp, Artificial Sequence
  Synthetic oligonucleotide
acctggcgtgaccggcatctctacgttcaatcctgtga

SEQ ID NO: 20012 - DNA, 35 bp, Artificial Sequence
  Synthetic oligonucleotide
gttgtcagagctaacaagtgtggcaaccctacccc

SEQ ID NO: 20013 - DNA, 35 bp, Artificial Sequence
  Synthetic oligonucleotide
gcactcgcaaagctgtattggtgtagatccccccg

SEQ ID NO: 20014 - DNA, 35 bp, Artificial Sequence
  Synthetic oligonucleotide
gtcggcttacgatgaccgcctagcgcattagattt

SEQ ID NO: 20015 - DNA, 37 bp, Artificial Sequence
  Synthetic oligonucleotide
gttgccacgggtttagaattgttactgtggtagggga

SEQ ID NO: 20016 - DNA, 38 bp, Artificial Sequence
  Synthetic oligonucleotide
gtgcggtgcccagtatacagggacggagaagtagttga

SEQ ID NO: 20017 - DNA, 36 bp, Artificial Sequence
  Synthetic oligonucleotide
gggcaaggaccatccgtgattagatgtagaatggca

SEQ ID NO: 20018 - DNA, 35 bp, Artificial Sequence
  Synthetic oligonucleotide
gacgaaacggtcgttcgccaaagtgtgagcttggg

SEQ ID NO: 20019 - DNA, 35 bp, Artificial Sequence
  Synthetic oligonucleotide
tcaagcgtttgggcgtggccgggtgtccttcgcat

SEQ ID NO: 20020 - DNA, 38 bp, Artificial Sequence
  Synthetic oligonucleotide
ggtgaccacttccggcgcatacgatcctgtgtgattga

SEQ ID NO: 20021 - DNA, 36 bp, Artificial Sequence
  Synthetic oligonucleotide
atgagaggggacatggaagattcaggcttctgacca

SEQ ID NO: 20022 - DNA, 37 bp, Artificial Sequence
  Synthetic oligonucleotide
gctaaggcgcgcacgtaggccggatattcgacacgga

SEQ ID NO: 20023 - DNA, 35 bp, Artificial Sequence
  Synthetic oligonucleotide
accaggaagttccttgggcgtattgttttatgcac

SEQ ID NO: 20024 - DNA, 36 bp, Artificial Sequence
  Synthetic oligonucleotide
acgcgtcaaacgacgctgatcctaatttgaaacgga

SEQ ID NO: 20025 - DNA, 38 bp, Artificial Sequence
  Synthetic oligonucleotide
ggaagccggtgcggaaatgaagtcgttggcgattttga

SEQ ID NO: 20026 - DNA, 35 bp, Artificial Sequence
  Synthetic oligonucleotide
tgccgtcgggacgaggtgtaaactatcggcgaacc

SEQ ID NO: 20027 - DNA, 34 bp, Artificial Sequence
  Synthetic oligonucleotide
gtcttgcaggtggtggctattggccaaagtaata

SEQ ID NO: 20028 - DNA, 35 bp, Artificial Sequence
  Synthetic oligonucleotide
gggtgagagtccgttggaattgcgcatacgacggc

SEQ ID NO: 20029 - DNA, 35 bp, Artificial Sequence
  Synthetic oligonucleotide
gggtctcgagcacgatacgtacaagtttctgttaa

SEQ ID NO: 20030 - DNA, 38 bp, Artificial Sequence
  Synthetic oligonucleotide
agtaatgggcgtgtaaataacgctaggctatccgttga

SEQ ID NO: 20031 - DNA, 35 bp, Artificial Sequence
  Synthetic oligonucleotide
aggtcactcaaggtattgcctctggacaggtaggc

SEQ ID NO: 20032 - DNA, 34 bp, Artificial Sequence
  Synthetic oligonucleotide
gtctttgcacgaggtatccacggctttcatggga

SEQ ID NO: 20033 - DNA, 36 bp, Artificial Sequence
  Synthetic oligonucleotide
actccggaccgatggaattgtaaccaataaatagga

SEQ ID NO: 20034 - DNA, 36 bp, Artificial Sequence
  Synthetic oligonucleotide
tggagtatgcgcttgcctcccccttttattttttga

SEQ ID NO: 20035 - DNA, 36 bp, Artificial Sequence
  Synthetic oligonucleotide
gggggccattagcagggcgcatgcgcgtcccgcgta

SEQ ID NO: 20036 - DNA, 37 bp, Artificial Sequence
  Synthetic oligonucleotide
aacaacgcgagggacttaagcgttttgtattagccga

SEQ ID NO: 20037 - DNA, 35 bp, Artificial Sequence
  Synthetic oligonucleotide
catcgctctctgagtaattgaaagggtagtataat

SEQ ID NO: 20038 - DNA, 36 bp, Artificial Sequence
  Synthetic oligonucleotide
tccaacagacgaataggccaatccagcaccgaataa

SEQ ID NO: 20039 - DNA, 34 bp, Artificial Sequence
  Synthetic oligonucleotide
atggacgccgaggttataacgtaaacctcttcca

SEQ ID NO: 20040 - DNA, 35 bp, Artificial Sequence
  Synthetic oligonucleotide
ggttctacataacagcgatcggtaatgaacgtctc

SEQ ID NO: 20041 - DNA, 36 bp, Artificial Sequence
  Synthetic oligonucleotide
agttcagccggtgcttgagacacagctcaaataata

SEQ ID NO: 20042 - DNA, 37 bp, Artificial Sequence
  Synthetic oligonucleotide
acggaacgattctcagtcccagtgtctaagaatggga

SEQ ID NO: 20043 - DNA, 35 bp, Artificial Sequence
  Synthetic oligonucleotide
gtcattcggttgacacatggggggaatgcatcact

SEQ ID NO: 20044 - DNA, 36 bp, Artificial Sequence
  Synthetic oligonucleotide
acgagtaggtcgggcacccggccaactacatcgcca

SEQ ID NO: 20045 - DNA, 37 bp, Artificial Sequence
  Synthetic oligonucleotide
gtgacggggcatgaatgccacagtattgactttggga

SEQ ID NO: 20046 - DNA, 36 bp, Artificial Sequence
  Synthetic oligonucleotide
gctccgaaggtagggttgtaattatcggtcagagca

SEQ ID NO: 20047 - DNA, 38 bp, Artificial Sequence
  Synthetic oligonucleotide
gcgcggatatgctttgtatttgtgtcctgagcgattga

SEQ ID NO: 20048 - DNA, 35 bp, Artificial Sequence
  Synthetic oligonucleotide
acttacatgctgcaaacgggggaaaggtaagagtt

SEQ ID NO: 20049 - DNA, 35 bp, Artificial Sequence
  Synthetic oligonucleotide
tgcttaaaagccgaggtcgtagttaacatgcattt

SEQ ID NO: 20050 - DNA, 38 bp, Artificial Sequence
  Synthetic oligonucleotide
agtcccgatcaagggctatccatgcttactcatattga

SEQ ID NO: 20051 - DNA, 37 bp, Artificial Sequence
  Synthetic oligonucleotide
gttgcctagcccatctgtgcgtgcattcctccgggga

SEQ ID NO: 20052 - DNA, 38 bp, Artificial Sequence
  Synthetic oligonucleotide
ccatacaggggatgtggtaatggtttacgttaacgtga

SEQ ID NO: 20053 - DNA, 37 bp, Artificial Sequence
  Synthetic oligonucleotide
gcgccgacacccccgcggcgaccgaacgacgactgga

SEQ ID NO: 20054 - DNA, 35 bp, Artificial Sequence
  Synthetic oligonucleotide
gtaagctcgcccgtagagctgttgacatttttgtg

SEQ ID NO: 20055 - DNA, 35 bp, Artificial Sequence
  Synthetic oligonucleotide
tcctgatagtagggaatcgggacccaaggacgtgg

SEQ ID NO: 20056 - DNA, 36 bp, Artificial Sequence
  Synthetic oligonucleotide
gcgctgggtgcgtctcgggtatagtgaggatatcaa

SEQ ID NO: 20057 - DNA, 37 bp, Artificial Sequence
  Synthetic oligonucleotide
gagcacttgctgaatatatgtcaccgtttcgtggaga

SEQ ID NO: 20058 - DNA, 37 bp, Artificial Sequence
  Synthetic oligonucleotide
tcgcgaatcgcgcgggaagcacccagttctttagaga

SEQ ID NO: 20059 - DNA, 34 bp, Artificial Sequence
  Synthetic oligonucleotide
ggagcgagacctcatgaattataccgtacgggtg

SEQ ID NO: 20060 - DNA, 36 bp, Artificial Sequence
  Synthetic oligonucleotide
aaagcatcaatgccggttattgttgttcgtccgaga

SEQ ID NO: 20061 - DNA, 35 bp, Artificial Sequence
  Synthetic oligonucleotide
tgaaaggttgcggtgggaattttcggctacaaagt

SEQ ID NO: 20062 - DNA, 37 bp, Artificial Sequence
  Synthetic oligonucleotide
aggccggacggggtatatcgacttcgccattgcgtga

SEQ ID NO: 20063 - DNA, 35 bp, Artificial Sequence
  Synthetic oligonucleotide
ggttacgatatgtacacgccgagggcttttttcgc

SEQ ID NO: 20064 - DNA, 35 bp, Artificial Sequence
  Synthetic oligonucleotide
aataagcagtcaagccaccgaacgccccctgccca

SEQ ID NO: 20065 - DNA, 36 bp, Artificial Sequence
  Synthetic oligonucleotide
gtcacatgtgacatgtcaacgaacaaaggcgggcta

SEQ ID NO: 20066 - DNA, 38 bp, Artificial Sequence
  Synthetic oligonucleotide
gtgctttcaggtttccgacagtgggacggaatttgtga

SEQ ID NO: 20067 - DNA, 37 bp, Artificial Sequence
  Synthetic oligonucleotide
ttggagtccgagtacgggtatagtcttcttcggtgga

SEQ ID NO: 20068 - DNA, 38 bp, Artificial Sequence
  Synthetic oligonucleotide
tggttaacagagtacttcggtcattgtactgggcatga

SEQ ID NO: 20069 - DNA, 38 bp, Artificial Sequence
  Synthetic oligonucleotide
tgcatagtgacatatgtagccgcgcgtattactgttga

SEQ ID NO: 20070 - DNA, 36 bp, Artificial Sequence
  Synthetic oligonucleotide
gcgctatgggtggttcgactataatggcacccagaa

SEQ ID NO: 20071 - DNA, 38 bp, Artificial Sequence
  Synthetic oligonucleotide
gatcggcttctagtgaactatcggttggtcgcccatga

SEQ ID NO: 20072 - DNA, 37 bp, Artificial Sequence
  Synthetic oligonucleotide
gtcgcacggaggagacttgtgtaatcgtgtcagcaga

SEQ ID NO: 20073 - DNA, 35 bp, Artificial Sequence
  Synthetic oligonucleotide
tatacgtctgtatgtagcgtttattaaaaagagtg

SEQ ID NO: 20074 - DNA, 36 bp, Artificial Sequence
  Synthetic oligonucleotide
gtgtgagcagggcaaatacttaacctttggtaggca

SEQ ID NO: 20075 - DNA, 37 bp, Artificial Sequence
  Synthetic oligonucleotide
acgagccgagtaagtgtatgcgctattgtatactcga

SEQ ID NO: 20076 - DNA, 35 bp, Artificial Sequence
  Synthetic oligonucleotide
aagaaaggcaaagcggctaagtatagactcggtat

SEQ ID NO: 20077 - DNA, 36 bp, Artificial Sequence
  Synthetic oligonucleotide
agtgtaccaccttgcactggtcggggaatgcttgga

SEQ ID NO: 20078 - DNA, 37 bp, Artificial Sequence
  Synthetic oligonucleotide
gacccgttgataacgtggcgagtagagcacaggctga

SEQ ID NO: 20079 - DNA, 36 bp, Artificial Sequence
  Synthetic oligonucleotide
gggagcaattgtcacccttcttctagaacggaatga

SEQ ID NO: 20080 - DNA, 36 bp, Artificial Sequence
  Synthetic oligonucleotide
tgctctttatgctggtttagttcacaggactcagta

SEQ ID NO: 20081 - DNA, 38 bp, Artificial Sequence
  Synthetic oligonucleotide
taggtgacaagaaaaactggtaaccgggtgttaggtga

SEQ ID NO: 20082 - DNA, 36 bp, Artificial Sequence
  Synthetic oligonucleotide
tgtgaaagtggcggaactgatctcccccgccgggca

SEQ ID NO: 20083 - DNA, 36 bp, Artificial Sequence
  Synthetic oligonucleotide
tcagtagcacatatcagactgagtacgaggggggca

SEQ ID NO: 20084 - DNA, 34 bp, Artificial Sequence
  Synthetic oligonucleotide
ggtggaacatcgctaaagtgtcagcacagaagcc

SEQ ID NO: 20085 - DNA, 38 bp, Artificial Sequence
  Synthetic oligonucleotide
gtgatacacttttcagcctggtgttaatacatatgtga

SEQ ID NO: 20086 - DNA, 35 bp, Artificial Sequence
  Synthetic oligonucleotide
tagtgcgaaggtggtctctacgttcccataacatc

SEQ ID NO: 20087 - DNA, 35 bp, Artificial Sequence
  Synthetic oligonucleotide
atgagagaagcatgtgacaaaaacaacatccgatt

SEQ ID NO: 20088 - DNA, 36 bp, Artificial Sequence
  Synthetic oligonucleotide
cccgcggtctttgcatgtgtagcgcccccccctgca

SEQ ID NO: 20089 - DNA, 37 bp, Artificial Sequence
  Synthetic oligonucleotide
actgaatgcttggttgcatataaagcgtcgactccga

SEQ ID NO: 20090 - DNA, 38 bp, Artificial Sequence
  Synthetic oligonucleotide
atgcgatcttttaagccccccgaaacttcctcctatga

SEQ ID NO: 20091 - DNA, 35 bp, Artificial Sequence
  Synthetic oligonucleotide
tgtcatagtggggttgcgctaagctgaggtactgg

SEQ ID NO: 20092 - DNA, 36 bp, Artificial Sequence
  Synthetic oligonucleotide
gccggacgggcatatgtggggacggttcgtactaaa

SEQ ID NO: 20093 - DNA, 36 bp, Artificial Sequence
  Synthetic oligonucleotide
tggactgtatccatttgtcttggtacagcatggtta

SEQ ID NO: 20094 - DNA, 37 bp, Artificial Sequence
  Synthetic oligonucleotide
ggatcataattacagggtactagtcagttcttgccga

SEQ ID NO: 20095 - DNA, 35 bp, Artificial Sequence
  Synthetic oligonucleotide
gtcaagtaatcacttcctctccgtcatttcaaaaa

SEQ ID NO: 20096 - DNA, 36 bp, Artificial Sequence
  Synthetic oligonucleotide
actctgaaagggcacgaccgtaaatgctcgatccaa

SEQ ID NO: 20097 - DNA, 38 bp, Artificial Sequence
  Synthetic oligonucleotide
tcgagccgaccgctgggcgcgtgtggtcttgttcctga

SEQ ID NO: 20098 - DNA, 37 bp, Artificial Sequence
  Synthetic oligonucleotide
gattctaccgtcggtattatttctaaggtcgttagga

SEQ ID NO: 20099 - DNA, 37 bp, Artificial Sequence
  Synthetic oligonucleotide
agtgcgccccagcagtctgaactgctaaggaattcga

SEQ ID NO: 20100 - DNA, 35 bp, Artificial Sequence
  Synthetic oligonucleotide
atctaagcaaccggtgggttcgtatagggcaattg

SEQ ID NO: 20101 - DNA, 35 bp, Artificial Sequence
  Synthetic oligonucleotide
aaaggacgggtgctggccatgtataggactaatgt

SEQ ID NO: 20102 - DNA, 35 bp, Artificial Sequence
  Synthetic oligonucleotide
tggtgggggcagactctagtttgagaacgtggtca

SEQ ID NO: 20103 - DNA, 35 bp, Artificial Sequence
  Synthetic oligonucleotide
ttcgcgcctctcggtatggcgaccacgcacgctat

SEQ ID NO: 20104 - DNA, 36 bp, Artificial Sequence
  Synthetic oligonucleotide
gagggatttgccgggcaatgaccgcgagatcacgca

SEQ ID NO: 20105 - DNA, 38 bp, Artificial Sequence
  Synthetic oligonucleotide
aaggataccccccggagtcaatgtgtacagcaatatga

SEQ ID NO: 20106 - DNA, 37 bp, Artificial Sequence
  Synthetic oligonucleotide
tattgggtaggtgtgacctgtggcgtagctgaaccga

SEQ ID NO: 20107 - DNA, 38 bp, Artificial Sequence
  Synthetic oligonucleotide
atgccgtgacccaggaaggggtcatatagtgctcatga

SEQ ID NO: 20108 - DNA, 35 bp, Artificial Sequence
  Synthetic oligonucleotide
tctaacgcggtcttggtgcgagcccccagtggcgc

SEQ ID NO: 20109 - DNA, 37 bp, Artificial Sequence
  Synthetic oligonucleotide
gacgagcacaggtagtactattggcgttcttggatga

SEQ ID NO: 20110 - DNA, 35 bp, Artificial Sequence
  Synthetic oligonucleotide
aggtccgccactggatgtaggtccacggggtccat

SEQ ID NO: 20111 - DNA, 35 bp, Artificial Sequence
  Synthetic oligonucleotide
ggaagcaacgttaaaggcgggacaaaactctgtcg

SEQ ID NO: 20112 - DNA, 35 bp, Artificial Sequence
  Synthetic oligonucleotide
ctgtactgtcggaatgagctgtacctcctggggtt

SEQ ID NO: 20113 - DNA, 37 bp, Artificial Sequence
  Synthetic oligonucleotide
aatccggtcagatatttgtcattgcctacgataatga

SEQ ID NO: 20114 - DNA, 38 bp, Artificial Sequence
  Synthetic oligonucleotide
gagaagtagtatggaatggtcgggacaggtactattga

SEQ ID NO: 20115 - DNA, 36 bp, Artificial Sequence
  Synthetic oligonucleotide
cacgtggtgggacgcgtcaaaagacaagaaatggaa

SEQ ID NO: 20116 - DNA, 35 bp, Artificial Sequence
  Synthetic oligonucleotide
taaggatgtgcgtaattgcggagtgccgccccccc

SEQ ID NO: 20117 - DNA, 35 bp, Artificial Sequence
  Synthetic oligonucleotide
tggattagcttgatagtaaatgtttgtaaccagtg

SEQ ID NO: 20118 - DNA, 37 bp, Artificial Sequence
  Synthetic oligonucleotide
tgcacggacgaggatcaatcggatttccgtctgggga

SEQ ID NO: 20119 - DNA, 34 bp, Artificial Sequence
  Synthetic oligonucleotide
gatcggtacactcggttgttcaccgttctcgtgg

SEQ ID NO: 20120 - DNA, 37 bp, Artificial Sequence
  Synthetic oligonucleotide
gtctggtatcgggtgaacgggtgctcggtcttcagga

SEQ ID NO: 20121 - DNA, 36 bp, Artificial Sequence
  Synthetic oligonucleotide
ttcggaaatatgcctcctcgtttaagaactgggtga

SEQ ID NO: 20122 - DNA, 36 bp, Artificial Sequence
  Synthetic oligonucleotide
caaacggattatacttaactcttgagtttattgaaa

SEQ ID NO: 20123 - DNA, 37 bp, Artificial Sequence
  Synthetic oligonucleotide
gacttccccgatctgtgtagctgctgcgtaatttgga

SEQ ID NO: 20124 - DNA, 36 bp, Artificial Sequence
  Synthetic oligonucleotide
ttagggggcgattggacctgcaaaggcatttagata

SEQ ID NO: 20125 - DNA, 35 bp, Artificial Sequence
  Synthetic oligonucleotide
aacagcgatactgaggttgcgggaacagacgtaat

SEQ ID NO: 20126 - DNA, 36 bp, Artificial Sequence
  Synthetic oligonucleotide
tgaacgcattcgttaggagcgtgtgctgggcttcta

SEQ ID NO: 20127 - DNA, 34 bp, Artificial Sequence; identical to SEQ ID NO: 9642
  Synthetic oligonucleotide

SEQ ID NO: 20128 - DNA, 36 bp, Artificial Sequence
  Synthetic oligonucleotide
gcatacacagggaagggaagaatgctcgtttcccca

SEQ ID NO: 20129 - DNA, 35 bp, Artificial Sequence
  Synthetic oligonucleotide
tatggggtgtgcagaccaatgctttgctagaatca

SEQ ID NO: 20130 - DNA, 37 bp, Artificial Sequence
  Synthetic oligonucleotide
attgctgacggtatggggatgtgctagctcacacgga

SEQ ID NO: 20131 - DNA, 36 bp, Artificial Sequence
  Synthetic oligonucleotide
tgtcgcgaccgaaatcacgacaatgagcattcagga

SEQ ID NO: 20132 - DNA, 35 bp, Artificial Sequence
  Synthetic oligonucleotide
tgactctgtgctcgcttatactcgcctcccccccg

SEQ ID NO: 20133 - DNA, 35 bp, Artificial Sequence
  Synthetic oligonucleotide
ggtagatgtacggtccctcttgcaccaacgaaatt

SEQ ID NO: 20134 - DNA, 36 bp, Artificial Sequence
  Synthetic oligonucleotide
agtcggactatatcggccatctgtatatacagtcta

SEQ ID NO: 20135 - DNA, 36 bp, Artificial Sequence
  Synthetic oligonucleotide
tctgctctgggattaacgaagctttattgcattgca

SEQ ID NO: 20136 - DNA, 37 bp, Artificial Sequence
  Synthetic oligonucleotide
ggacggtcttcggcaagatgctagctggggtctagga

SEQ ID NO: 20137 - DNA, 36 bp, Artificial Sequence
  Synthetic oligonucleotide
tgctcgacgatcgtgtcttgtcgtcacctcgcggca

SEQ ID NO: 20138 - DNA, 36 bp, Artificial Sequence
  Synthetic oligonucleotide
gtccggtcggtcggttacgaccgcgaatgttgtgca

SEQ ID NO: 20139 - DNA, 37 bp, Artificial Sequence
  Synthetic oligonucleotide
ctaccgacggcacctggagtcgtgctcgtatgtgaga

SEQ ID NO: 20140 - DNA, 37 bp, Artificial Sequence
  Synthetic oligonucleotide
ggtatggcgcctccccagatatccttagttggtctga

SEQ ID NO: 20141 - DNA, 35 bp, Artificial Sequence
  Synthetic oligonucleotide
aggggccaagtgggaagtgttttttcgtcagtccg

SEQ ID NO: 20142 - DNA, 36 bp, Artificial Sequence
  Synthetic oligonucleotide
tgatcgcaaggaccgagggctgtgcagtgttgttaa

SEQ ID NO: 20143 - DNA, 36 bp, Artificial Sequence
  Synthetic oligonucleotide
acctgctcgacgctgtcaagaaggtgcgatatgcga

SEQ ID NO: 20144 - DNA, 38 bp, Artificial Sequence
  Synthetic oligonucleotide
gttgactgtccgagaaggtcagtagacatgtaccatga

SEQ ID NO: 20145 - DNA, 38 bp, Artificial Sequence
  Synthetic oligonucleotide
ggtgaaggatctcctccaatggatataccattctatga

SEQ ID NO: 20146 - DNA, 36 bp, Artificial Sequence
  Synthetic oligonucleotide
tagccggggccctaaaccttctttagtgatggagta

SEQ ID NO: 20147 - DNA, 36 bp, Artificial Sequence
  Synthetic oligonucleotide
aaacggtccagtcatacataatccggctgccaaaaa

SEQ ID NO: 20148 - DNA, 35 bp, Artificial Sequence
  Synthetic oligonucleotide
atacgcccggaatacggatgctagagtaaagccca

SEQ ID NO: 20149 - DNA, 37 bp, Artificial Sequence
  Synthetic oligonucleotide
gaacaccgggggagaggacaagtgaataatcggccga

SEQ ID NO: 20150 - DNA, 37 bp, Artificial Sequence
  Synthetic oligonucleotide
agaccacgtagcctcccaggatttgcttgcatagtga

SEQ ID NO: 20151 - DNA, 36 bp, Artificial Sequence
  Synthetic oligonucleotide
aagggccgccggtaaatttggttaaacgaggctgaa

SEQ ID NO: 20152 - DNA, 35 bp, Artificial Sequence
  Synthetic oligonucleotide
gcgcgtaagaagctctgatgacgaatctcttgtgt

SEQ ID NO: 20153 - DNA, 37 bp, Artificial Sequence
  Synthetic oligonucleotide
agtcaacgggcgaaatgggcatcccttagggtggcga

SEQ ID NO: 20154 - DNA, 35 bp, Artificial Sequence
  Synthetic oligonucleotide
aagtcgggggtgtcttactgacggtcaacgtaagg

SEQ ID NO: 20155 - DNA, 36 bp, Artificial Sequence
  Synthetic oligonucleotide
gatgcagagtgcgtaccttacacagctaattgcgga

SEQ ID NO: 20156 - DNA, 35 bp, Artificial Sequence
  Synthetic oligonucleotide
tacgaaaaaccggtcgttccctttgatgacaaatg

SEQ ID NO: 20157 - DNA, 35 bp, Artificial Sequence
  Synthetic oligonucleotide
gtcgggctacagatacgtcctataagcccaggggg

SEQ ID NO: 20158 - DNA, 38 bp, Artificial Sequence
  Synthetic oligonucleotide
ggcgaaacattatcagtttgttattgcctcggtgctga

SEQ ID NO: 20159 - DNA, 36 bp, Artificial Sequence
  Synthetic oligonucleotide
gatcggccatagcgcggttcgcgtgccagtttaata

SEQ ID NO: 20160 - DNA, 38 bp, Artificial Sequence
  Synthetic oligonucleotide
gtcatcgcccttttattgagtacagagccttatcatga

SEQ ID NO: 20161 - DNA, 34 bp, Artificial Sequence
  Synthetic oligonucleotide
ttgaactggatgcgcggtagactagaatactatc

SEQ ID NO: 20162 - DNA, 37 bp, Artificial Sequence
  Synthetic oligonucleotide
tcatgtcgccgactatcggagttgaccggtacaggga

SEQ ID NO: 20163 - DNA, 38 bp, Artificial Sequence
  Synthetic oligonucleotide
aacttgtcccggccgagctttcgcctgagtattcatga

SEQ ID NO: 20164 - DNA, 36 bp, Artificial Sequence
  Synthetic oligonucleotide
tggtatcgcgatggacgttcaaacagggcccgttga

SEQ ID NO: 20165 - DNA, 37 bp, Artificial Sequence
  Synthetic oligonucleotide
agaggatgctatcggtcttatgtatgctagttcccga

SEQ ID NO: 20166 - DNA, 36 bp, Artificial Sequence
  Synthetic oligonucleotide
gggatcagaccaagataccaatgatgacgacgcaga

SEQ ID NO: 20167 - DNA, 35 bp, Artificial Sequence
  Synthetic oligonucleotide
tacggagccggttttggcgggctaggatgactgca

SEQ ID NO: 20168 - DNA, 35 bp, Artificial Sequence
  Synthetic oligonucleotide
gtaccggtgccgggaagggccgtaacgcttcttag

SEQ ID NO: 20169 - DNA, 35 bp, Artificial Sequence
  Synthetic oligonucleotide
aaggacaggcataggttcccaggcgcttaaaggaa

SEQ ID NO: 20170 - DNA, 36 bp, Artificial Sequence
  Synthetic oligonucleotide
atttgcgtcctcctggctttgtgttctgctccccca

SEQ ID NO: 20171 - DNA, 35 bp, Artificial Sequence
  Synthetic oligonucleotide
tggtggctcaagtacgggacaaaatggatcgtacg

SEQ ID NO: 20172 - DNA, 38 bp, Artificial Sequence
  Synthetic oligonucleotide
ttcgccccaatgataaccggaaacagggacagaggtga

SEQ ID NO: 20173 - DNA, 38 bp, Artificial Sequence
  Synthetic oligonucleotide
ttactgtcttcgcgtaacttaaggtctttatgagctga

SEQ ID NO: 20174 - DNA, 35 bp, Artificial Sequence
  Synthetic oligonucleotide
ggacactaaccaaggtaaacattgcgtcgtgatag

SEQ ID NO: 20175 - DNA, 38 bp, Artificial Sequence
  Synthetic oligonucleotide
agcaacgtgaagggcgtacttccgacacactaaagtga

SEQ ID NO: 20176 - DNA, 36 bp, Artificial Sequence
  Synthetic oligonucleotide
gaagagcccgtcgcgagagcatgttctgtattacaa

SEQ ID NO: 20177 - DNA, 38 bp, Artificial Sequence
  Synthetic oligonucleotide
tggaatagaattccgaagggaaaacagcaagatgttga

SEQ ID NO: 20178 - DNA, 37 bp, Artificial Sequence
  Synthetic oligonucleotide
agcgttgcgagaggagacgcttatcgtgcttcgaaga

SEQ ID NO: 20179 - DNA, 29 bp, Artificial Sequence
  Synthetic oligonucleotide
gctgaatgccgtctcaggccctcccttga

SEQ ID NO: 20180 - DNA, 38 bp, Artificial Sequence
  Synthetic oligonucleotide
aggaccatggccattatcacagagctgtggtgtagtga

SEQ ID NO: 20181 - DNA, 38 bp, Artificial Sequence
  Synthetic oligonucleotide
gaaacagaggagcgactgcggagacatacttcaaatga

SEQ ID NO: 20182 - DNA, 35 bp, Artificial Sequence
  Synthetic oligonucleotide
gaagtagttcgtaagttgcggcccattcaggcgta

SEQ ID NO: 20183 - DNA, 37 bp, Artificial Sequence
  Synthetic oligonucleotide
ttcacgggcctggggtgagcaatctagttcataatga

SEQ ID NO: 20184 - DNA, 37 bp, Artificial Sequence; identical to SEQ ID NO: 16793
  Synthetic oligonucleotide

SEQ ID NO: 20185 - DNA, 36 bp, Artificial Sequence
  Synthetic oligonucleotide
atgcggtacaacgaccccgtatctaagggacgttga

SEQ ID NO: 20186 - DNA, 36 bp, Artificial Sequence
  Synthetic oligonucleotide
tcgatgcttaggggttagccgtaagggaggactgga

SEQ ID NO: 20187 - DNA, 35 bp, Artificial Sequence
  Synthetic oligonucleotide
tcaagtggctatcgtggtccaagcactaggtcgtg

SEQ ID NO: 20188 - DNA, 35 bp, Artificial Sequence
  Synthetic oligonucleotide
ggacgcgtaggatgtagaagagatattgcgcgaga

SEQ ID NO: 20189 - DNA, 35 bp, Artificial Sequence
  Synthetic oligonucleotide
gctggctcaagagagcacatgtgggacaagacatt

SEQ ID NO: 20190 - DNA, 35 bp, Artificial Sequence
  Synthetic oligonucleotide
agttgcacgaaagtcccggaacttggtgggttcgg

SEQ ID NO: 20191 - DNA, 36 bp, Artificial Sequence
  Synthetic oligonucleotide
ggtagagccaccgactcgttgagatggtttactcga

SEQ ID NO: 20192 - DNA, 38 bp, Artificial Sequence
  Synthetic oligonucleotide
tgacggctaacatgacataaggcaacgtatgcgagtga

SEQ ID NO: 20193 - DNA, 38 bp, Artificial Sequence
  Synthetic oligonucleotide
atgctgttcagactctagtagaatgtcagagcacctga

SEQ ID NO: 20194 - DNA, 37 bp, Artificial Sequence
  Synthetic oligonucleotide
ttggaaccgacgtatttgtacccatggcgtcgtggga

SEQ ID NO: 20195 - DNA, 35 bp, Artificial Sequence
  Synthetic oligonucleotide
agtcatagcgtacagttaaaaccaggcaaagttgc

SEQ ID NO: 20196 - DNA, 35 bp, Artificial Sequence
  Synthetic oligonucleotide
atggaaccggccgcccaggggggtggaatagttta

SEQ ID NO: 20197 - DNA, 36 bp, Artificial Sequence
  Synthetic oligonucleotide
ggtactgggcgcctcgttgcctgatatctgggcata

SEQ ID NO: 20198 - DNA, 37 bp, Artificial Sequence
  Synthetic oligonucleotide
tctcgcaatggaagaacagggcgcaaaagggacggga

SEQ ID NO: 20199 - DNA, 38 bp, Artificial Sequence
  Synthetic oligonucleotide
gtggccataagcttgccatgactccccttccaaggtga

SEQ ID NO: 20200 - DNA, 35 bp, Artificial Sequence
  Synthetic oligonucleotide
ggaacgacggggcagtaggttgtacgatcgcgtat

SEQ ID NO: 20201 - DNA, 35 bp, Artificial Sequence
  Synthetic oligonucleotide
gagtacgacgcgtggaggatctttggactggagat

SEQ ID NO: 20202 - DNA, 35 bp, Artificial Sequence
  Synthetic oligonucleotide
ttttgaggacgagtggccaatcgtgcattttcgat

SEQ ID NO: 20203 - DNA, 35 bp, Artificial Sequence
  Synthetic oligonucleotide
taaatagatcggcgtagtgtgtcggtgcatgtgtt

SEQ ID NO: 20204 - DNA, 35 bp, Artificial Sequence
  Synthetic oligonucleotide
ttccagacgcgctggacaaggttttcattcatagg

SEQ ID NO: 20205 - DNA, 37 bp, Artificial Sequence
  Synthetic oligonucleotide
ttagcggaaattgtcagggtgcgctagtagttcgaga

SEQ ID NO: 20206 - DNA, 37 bp, Artificial Sequence
  Synthetic oligonucleotide
acaaatccccggggagatcctttggacaggaatgcga

SEQ ID NO: 20207 - DNA, 38 bp, Artificial Sequence
  Synthetic oligonucleotide
acgctcccatgcagattagtgcgttttactggagttga

SEQ ID NO: 20208 - DNA, 36 bp, Artificial Sequence
  Synthetic oligonucleotide
aagacaacaaaggtgagcgtagaaatccgttgctga

SEQ ID NO: 20209 - DNA, 36 bp, Artificial Sequence
  Synthetic oligonucleotide
tacccctcccacgtgtgtatagttacggttcgagca

SEQ ID NO: 20210 - DNA, 36 bp, Artificial Sequence
  Synthetic oligonucleotide
atgacgagccgttttaccatgttagttgattttaaa

SEQ ID NO: 20211 - DNA, 35 bp, Artificial Sequence
  Synthetic oligonucleotide
gcgaggagaatgcagggcggaagaaacgctcctct

SEQ ID NO: 20212 - DNA, 38 bp, Artificial Sequence
  Synthetic oligonucleotide
gctgtcgcccaatagtcaagcaccctattgtgttgtga

SEQ ID NO: 20213 - DNA, 35 bp, Artificial Sequence
  Synthetic oligonucleotide
ttcagcgaggcaataagtaagagaagcatgccccc

SEQ ID NO: 20214 - DNA, 36 bp, Artificial Sequence
  Synthetic oligonucleotide
ggtaactttccatatgatcgagttggctggtctaga

SEQ ID NO: 20215 - DNA, 35 bp, Artificial Sequence
  Synthetic oligonucleotide
agctgcgaatggttattatcgagtgtcgtggacat

SEQ ID NO: 20216 - DNA, 37 bp, Artificial Sequence
  Synthetic oligonucleotide
aggataggtctgaccgcggccttgattgctgaaataa

SEQ ID NO: 20217 - DNA, 38 bp, Artificial Sequence
  Synthetic oligonucleotide
actagtcaactcgacgcgcaatggtgggatacgactga

SEQ ID NO: 20218 - DNA, 35 bp, Artificial Sequence
  Synthetic oligonucleotide
gggacttcggactagtggtatgaaaatacaaaggc

SEQ ID NO: 20219 - DNA, 36 bp, Artificial Sequence
  Synthetic oligonucleotide
gagggacggcgcaatcagtgtatgacgattcgccga

SEQ ID NO: 20220 - DNA, 37 bp, Artificial Sequence
  Synthetic oligonucleotide
ttgctggtacaagaatgggatcaatgtttctgaagga

SEQ ID NO: 20221 - DNA, 35 bp, Artificial Sequence
  Synthetic oligonucleotide
gacgctgtaggatggcgttgaaggcgaacggagag

SEQ ID NO: 20222 - DNA, 35 bp, Artificial Sequence
  Synthetic oligonucleotide
tgcttacgccagggtacgaatacgccggtaccaaa

SEQ ID NO: 20223 - DNA, 38 bp, Artificial Sequence
  Synthetic oligonucleotide
tgatcaatgaaggtcgcccaagagcaagacaggagtga

SEQ ID NO: 20224 - DNA, 37 bp, Artificial Sequence
  Synthetic oligonucleotide
agtgatggagcgcggcagtaactagatccgagtgtga

SEQ ID NO: 20225 - DNA, 36 bp, Artificial Sequence
  Synthetic oligonucleotide
tacgtgagttaagtgtagtgtacgactatctgtcaa

SEQ ID NO: 20226 - DNA, 35 bp, Artificial Sequence
  Synthetic oligonucleotide
atgcgacgaagttggatgacacacaagtgacgtca

SEQ ID NO: 20227 - DNA, 35 bp, Artificial Sequence
  Synthetic oligonucleotide
aggtggttgagcggttatggtacggttgccaaaga

SEQ ID NO: 20228 - DNA, 38 bp, Artificial Sequence
  Synthetic oligonucleotide
tacagggtacgccttagaagagatcggacatcgggtga

SEQ ID NO: 20229 - DNA, 37 bp, Artificial Sequence
  Synthetic oligonucleotide
gagcggtgagtgggccgaacgttcgggtagatagcga

SEQ ID NO: 20230 - DNA, 36 bp, Artificial Sequence
  Synthetic oligonucleotide
gctctctccaaagctgatgccaaagattggtggaca

SEQ ID NO: 20231 - DNA, 36 bp, Artificial Sequence
  Synthetic oligonucleotide
ttagcgccttaggtaaggtggatacatctacagaaa

SEQ ID NO: 20232 - DNA, 35 bp, Artificial Sequence
  Synthetic oligonucleotide
aagagatgtcatgaagggtttaagccggtcacgaa

SEQ ID NO: 20233 - DNA, 36 bp, Artificial Sequence
  Synthetic oligonucleotide
gacacggatttttggtcttgtgccgagtgactggta

SEQ ID NO: 20234 - DNA, 37 bp, Artificial Sequence
  Synthetic oligonucleotide
ccatgtgggtttcaaggcctccgtatacccccccgga

SEQ ID NO: 20235 - DNA, 36 bp, Artificial Sequence
  Synthetic oligonucleotide
aacagcctactggttgctccccctccgtcaaggtca

SEQ ID NO: 20236 - DNA, 35 bp, Artificial Sequence
  Synthetic oligonucleotide
gaatcgtatgagtcagacttttctttcgtctctgc

SEQ ID NO: 20237 - DNA, 36 bp, Artificial Sequence
  Synthetic oligonucleotide
agcctgtggtcaaggtatagaaagcactaaccctca

SEQ ID NO: 20238 - DNA, 35 bp, Artificial Sequence
  Synthetic oligonucleotide
gatcgaagccgtctggttcacgatcaagcgcatac

SEQ ID NO: 20239 - DNA, 37 bp, Artificial Sequence
  Synthetic oligonucleotide
ttgactgcgtttcacagaattaaactgccggtctcga

SEQ ID NO: 20240 - DNA, 35 bp, Artificial Sequence
  Synthetic oligonucleotide
agtgctgagcacatcgccaagggtgggaatgaccc

SEQ ID NO: 20241 - DNA, 38 bp, Artificial Sequence
  Synthetic oligonucleotide
gggaagggtcagccgttcacgcaattgtaatgtgttga

SEQ ID NO: 20242 - DNA, 37 bp, Artificial Sequence
  Synthetic oligonucleotide
tctccggtgagtcgccccgtcaagcgcgtagggtaga

SEQ ID NO: 20243 - DNA, 35 bp, Artificial Sequence
  Synthetic oligonucleotide
tctattcctaagtggggctctgttggaagacatcg

SEQ ID NO: 20244 - DNA, 37 bp, Artificial Sequence
  Synthetic oligonucleotide
agctcgctaatgcaatagaggtccataagtgttgtga

SEQ ID NO: 20245 - DNA, 35 bp, Artificial Sequence
  Synthetic oligonucleotide
ttatcaccacacctggtaaggtccgttacggtgca

SEQ ID NO: 20246 - DNA, 38 bp, Artificial Sequence
  Synthetic oligonucleotide
tacacaacaaggttcacgggcctggccgacggccctga

SEQ ID NO: 20247 - DNA, 35 bp, Artificial Sequence
  Synthetic oligonucleotide
actgcggatttacatgaatcgaagtagtctatacc

SEQ ID NO: 20248 - DNA, 36 bp, Artificial Sequence
  Synthetic oligonucleotide
agtctggtctgtcaggaaagctctgggagagcataa

SEQ ID NO: 20249 - DNA, 35 bp, Artificial Sequence
  Synthetic oligonucleotide
gtagggcgtgctagtaataaaaatcaagagtacca

SEQ ID NO: 20250 - DNA, 36 bp, Artificial Sequence
  Synthetic oligonucleotide
tttccgggccacctgtgcagtatggtcggtaccgca

SEQ ID NO: 20251 - DNA, 36 bp, Artificial Sequence
  Synthetic oligonucleotide
aactggtgtcggctaatgagacaaagtacgcggtca

SEQ ID NO: 20252 - DNA, 37 bp, Artificial Sequence
  Synthetic oligonucleotide
attggtcaagcagggggaaagccaggtaatcatctga

SEQ ID NO: 20253 - DNA, 36 bp, Artificial Sequence
  Synthetic oligonucleotide
tattgaaacagaaacttcttaggcggaagattcata

SEQ ID NO: 20254 - DNA, 35 bp, Artificial Sequence
  Synthetic oligonucleotide
ttgggagtcccccgcctctagctagttgcgttgtg

SEQ ID NO: 20255 - DNA, 37 bp, Artificial Sequence
  Synthetic oligonucleotide
agatcgatagttcagttggtacgtatgtaccgggaga

SEQ ID NO: 20256 - DNA, 36 bp, Artificial Sequence
  Synthetic oligonucleotide
actccgcacagacagacgcaccaccgccctcccgga

SEQ ID NO: 20257 - DNA, 35 bp, Artificial Sequence
  Synthetic oligonucleotide
gctggcgcataagccagtacgggtaacgccttcgg

SEQ ID NO: 20258 - DNA, 35 bp, Artificial Sequence
  Synthetic oligonucleotide
gccaaaagttatgaagatgtagtgttcatgcatag

SEQ ID NO: 20259 - DNA, 35 bp, Artificial Sequence
  Synthetic oligonucleotide
aatggttcccgcggtagtgctctacaaagttgacg

SEQ ID NO: 20260 - DNA, 36 bp, Artificial Sequence
  Synthetic oligonucleotide
gaaaggcaagtgtgtaacgtgatgtcacttgccgta

SEQ ID NO: 20261 - DNA, 38 bp, Artificial Sequence
  Synthetic oligonucleotide
acagtcggaatgcaggaggggaaactgcgagtggttga

SEQ ID NO: 20262 - DNA, 37 bp, Artificial Sequence
  Synthetic oligonucleotide
attgacaccgtggtacaggcttccgtcgaatataaga

SEQ ID NO: 20263 - DNA, 37 bp, Artificial Sequence
  Synthetic oligonucleotide
aagtgccaagcaaccggagctcacaaaacttgagtga

SEQ ID NO: 20264 - DNA, 35 bp, Artificial Sequence
  Synthetic oligonucleotide
agtctggaacgacttgtgcctggtggtggggttcg

SEQ ID NO: 20265 - DNA, 35 bp, Artificial Sequence
  Synthetic oligonucleotide
acgacatgtaccggtaggctggatagttgggtaga

SEQ ID NO: 20266 - DNA, 36 bp, Artificial Sequence
  Synthetic oligonucleotide
atgaatgtttgcccggtctagtatggaacatttgaa

SEQ ID NO: 20267 - DNA, 36 bp, Artificial Sequence
  Synthetic oligonucleotide
ttgtggtcatggggatccgttacccgagtgctggaa

SEQ ID NO: 20268 - DNA, 37 bp, Artificial Sequence
  Synthetic oligonucleotide
gcccgtgtggcactggatcttataaccggtttcctga

SEQ ID NO: 20269 - DNA, 35 bp, Artificial Sequence
  Synthetic oligonucleotide
aaggacacctactgaaatgacgagctagtgtgcac

SEQ ID NO: 20270 - DNA, 38 bp, Artificial Sequence
  Synthetic oligonucleotide
gttgagcgtgcgtcgaagaagcccgggtatgaacatga

SEQ ID NO: 20271 - DNA, 35 bp, Artificial Sequence
  Synthetic oligonucleotide
gctcacggggcaagttaatacggtcagtataaatc

SEQ ID NO: 20272 - DNA, 36 bp, Artificial Sequence
  Synthetic oligonucleotide
gtttagctgcacttcggtgtggacggatattttgca

SEQ ID NO: 20273 - DNA, 36 bp, Artificial Sequence
  Synthetic oligonucleotide
tatgtaaggcgaatcctgataataaatgaggcatca

SEQ ID NO: 20274 - DNA, 35 bp, Artificial Sequence
  Synthetic oligonucleotide
gtcgtacgagtcaaaggggaacctaaactttgctt

SEQ ID NO: 20275 - DNA, 36 bp, Artificial Sequence
  Synthetic oligonucleotide
agtctaaagaaatgtcttcgggacaccgtaacacta

SEQ ID NO: 20276 - DNA, 35 bp, Artificial Sequence
  Synthetic oligonucleotide
gccgggtctggtatcgacgtagggtcgaagaccat

SEQ ID NO: 20277 - DNA, 35 bp, Artificial Sequence
  Synthetic oligonucleotide
gccggaacggccggaactcgtaagaaacagccagg

SEQ ID NO: 20278 - DNA, 37 bp, Artificial Sequence
  Synthetic oligonucleotide
actaccggacagggatgagtgactgtaggtaacctga

SEQ ID NO: 20279 - DNA, 36 bp, Artificial Sequence
  Synthetic oligonucleotide
gtgtttacccaagggataaacaggtatgcgaaccta

SEQ ID NO: 20280 - DNA, 35 bp, Artificial Sequence
  Synthetic oligonucleotide
acctgacatgacaagagcccggctcatgttgtagg

SEQ ID NO: 20281 - DNA, 35 bp, Artificial Sequence
  Synthetic oligonucleotide
gaacggggggcgtgaatgagagggaaatagtcagc

SEQ ID NO: 20282 - DNA, 37 bp, Artificial Sequence
  Synthetic oligonucleotide
tacaagcttcacagcaagcgtaaatgcaatatttgga

SEQ ID NO: 20283 - DNA, 35 bp, Artificial Sequence
  Synthetic oligonucleotide
gtggcaaaggtttggttccctgctgagtgaactta

SEQ ID NO: 20284 - DNA, 37 bp, Artificial Sequence
  Synthetic oligonucleotide
tggttcggaggccgtaacgacacgaatctttagcaga

SEQ ID NO: 20285 - DNA, 38 bp, Artificial Sequence
  Synthetic oligonucleotide
tcgctgatagagtgttcgatacatcgacgaatcactga

SEQ ID NO: 20286 - DNA, 38 bp, Artificial Sequence
  Synthetic oligonucleotide
gccccccaggtaataaccgcatggggtacaaagattga

SEQ ID NO: 20287 - DNA, 37 bp, Artificial Sequence
  Synthetic oligonucleotide
tagtcgctacggcaacagtggtgtctattgttaagga

SEQ ID NO: 20288 - DNA, 35 bp, Artificial Sequence
  Synthetic oligonucleotide
tgttacatcgtgcaagcggagctgatatcaaatgg

SEQ ID NO: 20289 - DNA, 36 bp, Artificial Sequence
  Synthetic oligonucleotide
gacacggttctcaaaaaagatttagactctttagaa

SEQ ID NO: 20290 - DNA, 36 bp, Artificial Sequence
  Synthetic oligonucleotide
gaaccgtcgtgtcgctaataagcccctgtccactta

SEQ ID NO: 20291 - DNA, 38 bp, Artificial Sequence
  Synthetic oligonucleotide
gatagatctgagctcgagtggggctaagagtgaaatga

SEQ ID NO: 20292 - DNA, 36 bp, Artificial Sequence
  Synthetic oligonucleotide
gtcgcggtcacaagcccaggatgtcgtgtaaaagga

SEQ ID NO: 20293 - DNA, 36 bp, Artificial Sequence
  Synthetic oligonucleotide
attcgtgggccaatagttcggggtgtatggcgcgta

SEQ ID NO: 20294 - DNA, 38 bp, Artificial Sequence
  Synthetic oligonucleotide
atgcgcaaattcaaatcgttaggcagttatggtgatga

SEQ ID NO: 20295 - DNA, 38 bp, Artificial Sequence
  Synthetic oligonucleotide
ccacgacaaagggaagaaaactacagtagggggattga

SEQ ID NO: 20296 - DNA, 35 bp, Artificial Sequence
  Synthetic oligonucleotide
gaagtgcgcatatcagtaaaccaacgcggttccgt

SEQ ID NO: 20297 - DNA, 38 bp, Artificial Sequence
  Synthetic oligonucleotide
aagatggacaatgtgtgctctaatgctcaactcggtga

SEQ ID NO: 20298 - DNA, 36 bp, Artificial Sequence
  Synthetic oligonucleotide
gcagacataggtgctgcgaagattcacaggggaaga

SEQ ID NO: 20299 - DNA, 38 bp, Artificial Sequence
  Synthetic oligonucleotide
tgtgtcgttaatgattatgcgttggtcatagtagctga

SEQ ID NO: 20300 - DNA, 35 bp, Artificial Sequence
  Synthetic oligonucleotide
tcacagtgcgtggacgagaagagggttgggtcatg

SEQ ID NO: 20301 - DNA, 35 bp, Artificial Sequence
  Synthetic oligonucleotide
gatgaagaggcatcggtagaatcattcggcgtata

SEQ ID NO: 20302 - DNA, 36 bp, Artificial Sequence
  Synthetic oligonucleotide
tgctaataaattccgcaaccatccttgatgtacgaa

SEQ ID NO: 20303 - DNA, 37 bp, Artificial Sequence
  Synthetic oligonucleotide
ttactggtggcgggcaagtctcgtatcatcagtcaga

SEQ ID NO: 20304 - DNA, 37 bp, Artificial Sequence
  Synthetic oligonucleotide
tccaaggtcgtgaaacagggcgtgttgcataacgcga

SEQ ID NO: 20305 - DNA, 37 bp, Artificial Sequence
  Synthetic oligonucleotide
gggggcaatgtcgacgtaaatgccattatgacccaga

SEQ ID NO: 20306 - DNA, 37 bp, Artificial Sequence
  Synthetic oligonucleotide
tgtggggttagatgtgtggcacgtagccacacagaga

SEQ ID NO: 20307 - DNA, 35 bp, Artificial Sequence
  Synthetic oligonucleotide
gttgaccagctacaaagtgacggtgggcttatatc

SEQ ID NO: 20308 - DNA, 35 bp, Artificial Sequence
  Synthetic oligonucleotide
gtcatggcctaatgaaatcagatatgactgcgctt

SEQ ID NO: 20309 - DNA, 36 bp, Artificial Sequence
  Synthetic oligonucleotide
tactagacggtaccgagccatttataactttcggga

SEQ ID NO: 20310 - DNA, 37 bp, Artificial Sequence
  Synthetic oligonucleotide
acccactattagcacagtaatttcgtagagcaaagga

SEQ ID NO: 20311 - DNA, 38 bp, Artificial Sequence
  Synthetic oligonucleotide
acatggcatgaactggtgcaatcttcgggcctcactga

SEQ ID NO: 20312 - DNA, 36 bp, Artificial Sequence
  Synthetic oligonucleotide
ggacggtactatttatgttgtcctgaaagctggtaa

SEQ ID NO: 20313 - DNA, 38 bp, Artificial Sequence
  Synthetic oligonucleotide
aactgggtcggcgctttgaagctcgtctgatagggtga

SEQ ID NO: 20314 - DNA, 35 bp, Artificial Sequence
  Synthetic oligonucleotide
gtacgcacaaggacgacggaatgcaactagagcgc

SEQ ID NO: 20315 - DNA, 36 bp, Artificial Sequence
  Synthetic oligonucleotide
gccgggtaatagcatcgggaaaagtgcaataggtca

SEQ ID NO: 20316 - DNA, 36 bp, Artificial Sequence
  Synthetic oligonucleotide
agctcgtccgggggattatggcttatatagatgtaa

SEQ ID NO: 20317 - DNA, 38 bp, Artificial Sequence
  Synthetic oligonucleotide
gatttcggtcagttgagtcgtacttgattgaggcgtga

SEQ ID NO: 20318 - DNA, 35 bp, Artificial Sequence
  Synthetic oligonucleotide
tcgagacagtccttcggtaaacggccaaagggcac

SEQ ID NO: 20319 - DNA, 35 bp, Artificial Sequence
  Synthetic oligonucleotide
gttctggcctcatgtggtacaagtgctaggcttgt

SEQ ID NO: 20320 - DNA, 38 bp, Artificial Sequence
  Synthetic oligonucleotide
aggagctaggccgactgccccacagccatgtgacatga

SEQ ID NO: 20321 - DNA, 37 bp, Artificial Sequence
  Synthetic oligonucleotide
ttggatatctacgcaatgttagttgcccttcgcccga

SEQ ID NO: 20322 - DNA, 38 bp, Artificial Sequence
  Synthetic oligonucleotide
tcgtgatagcaacaactcagtagggtgggtacgggtga

SEQ ID NO: 20323 - DNA, 35 bp, Artificial Sequence
  Synthetic oligonucleotide
aagcccgtactgcgctcaattgacagccgccccca

SEQ ID NO: 20324 - DNA, 36 bp, Artificial Sequence
  Synthetic oligonucleotide
gtgcgagcgagcagatggcactgctgcgcccccgaa

SEQ ID NO: 20325 - DNA, 35 bp, Artificial Sequence
  Synthetic oligonucleotide
ttggaaccgtggaggggtaccctgcaagggctttc

SEQ ID NO: 20326 - DNA, 37 bp, Artificial Sequence
  Synthetic oligonucleotide
gtggaatcgctggactgcgacgtggacatacaccgga

SEQ ID NO: 20327 - DNA, 35 bp, Artificial Sequence
  Synthetic oligonucleotide
taactccatggctattagaggaaggttaagagact

SEQ ID NO: 20328 - DNA, 35 bp, Artificial Sequence
  Synthetic oligonucleotide
aacggggctgttgcttccacgacctctttgcattt

SEQ ID NO: 20329 - DNA, 35 bp, Artificial Sequence
  Synthetic oligonucleotide
agcttagcacccccctctacgtctgcaggagtcta

SEQ ID NO: 20330 - DNA, 37 bp, Artificial Sequence
  Synthetic oligonucleotide
aatggcatgtggtggtgaaatgaaactatggtattga

SEQ ID NO: 20331 - DNA, 35 bp, Artificial Sequence
  Synthetic oligonucleotide
ttgtaccagcttattagcgaagccatgatctggtg

SEQ ID NO: 20332 - DNA, 35 bp, Artificial Sequence
  Synthetic oligonucleotide
tactcttggacgatgttcgatcggggatggtacaa

SEQ ID NO: 20333 - DNA, 36 bp, Artificial Sequence
  Synthetic oligonucleotide
aagtcatctgctgcttgcgtctctaccacttctcta

SEQ ID NO: 20334 - DNA, 35 bp, Artificial Sequence
  Synthetic oligonucleotide
gacgtggtaggataagtctgctgtcggaaaggcat

SEQ ID NO: 20335 - DNA, 35 bp, Artificial Sequence
  Synthetic oligonucleotide
atagacgtaaagatctattagctagggtttgggac

SEQ ID NO: 20336 - DNA, 35 bp, Artificial Sequence
  Synthetic oligonucleotide
gtatgggaagattcacactcatggtatgacgcatg

SEQ ID NO: 20337 - DNA, 37 bp, Artificial Sequence
  Synthetic oligonucleotide
atcatgttcaagtgttggtcatgttgatgaacgccga

SEQ ID NO: 20338 - DNA, 36 bp, Artificial Sequence
  Synthetic oligonucleotide
gccactctctagatgcaggccccatgtagaggatgc

SEQ ID NO: 20339 - DNA, 38 bp, Artificial Sequence
  Synthetic oligonucleotide
tcatagactccggtgaggcgctccttcatcaaacttga

SEQ ID NO: 20340 - DNA, 35 bp, Artificial Sequence
  Synthetic oligonucleotide
aatggtgtcaggtcggggtaccaggacggatctgt

SEQ ID NO: 20341 - DNA, 35 bp, Artificial Sequence
  Synthetic oligonucleotide
ttaaaatacgactgtgtttgcgagtcactcattaa

SEQ ID NO: 20342 - DNA, 35 bp, Artificial Sequence
  Synthetic oligonucleotide
gcataatctggtctcactgcccgccccctcgctcg

SEQ ID NO: 20343 - DNA, 38 bp, Artificial Sequence
  Synthetic oligonucleotide
gctgtaagaacgctgggcttaattgagtgttcgtatga

SEQ ID NO: 20344 - DNA, 36 bp, Artificial Sequence
  Synthetic oligonucleotide
aaacgtcgttatgtctgctcaccaccggttgtaata

SEQ ID NO: 20345 - DNA, 36 bp, Artificial Sequence
  Synthetic oligonucleotide
agctgtggcgggtaatttatcgggggtggttgtcta

SEQ ID NO: 20346 - DNA, 35 bp, Artificial Sequence
  Synthetic oligonucleotide
tgatccggatgaaggtgtcgtgtaattattgtaaa

SEQ ID NO: 20347 - DNA, 37 bp, Artificial Sequence
  Synthetic oligonucleotide
attacgtatgtcaatatggtgagtttgtcacacttga

SEQ ID NO: 20348 - DNA, 36 bp, Artificial Sequence
  Synthetic oligonucleotide
agttcgcaattaagtaagccgggagggttgcagtta

SEQ ID NO: 20349 - DNA, 35 bp, Artificial Sequence
  Synthetic oligonucleotide
aattctggaaagtttgctgaattaacgatcatcgt

SEQ ID NO: 20350 - DNA, 36 bp, Artificial Sequence
  Synthetic oligonucleotide
tcaggacatatttaatgtcgctgataggtatccggc

SEQ ID NO: 20351 - DNA, 36 bp, Artificial Sequence
  Synthetic oligonucleotide
gtttcacgtgtaggggggtccgtgacccgttgagga

SEQ ID NO: 20352 - DNA, 36 bp, Artificial Sequence; identical to SEQ ID NO: 8190
  Synthetic oligonucleotide

SEQ ID NO: 20353 - DNA, 38 bp, Artificial Sequence
  Synthetic oligonucleotide
gggacgaaagaatgggttaatttggtgctagcttgtga

SEQ ID NO: 20354 - DNA, 36 bp, Artificial Sequence
  Synthetic oligonucleotide
gacccggcccgattagtcctgtcggagaatgtagga

SEQ ID NO: 20355 - DNA, 35 bp, Artificial Sequence
  Synthetic oligonucleotide
ttgacaaactacgtgtgtcacattacgaacagtgc

SEQ ID NO: 20356 - DNA, 37 bp, Artificial Sequence
  Synthetic oligonucleotide
gaacccggttctgcttcatgctgttagggagagagga

SEQ ID NO: 20357 - DNA, 38 bp, Artificial Sequence
  Synthetic oligonucleotide
tcacggcctatgcggcaactgcttaacaaggccgatga

SEQ ID NO: 20358 - DNA, 36 bp, Artificial Sequence
  Synthetic oligonucleotide
atgatgccggaacgtaagtttcgggcgcgctagcta

SEQ ID NO: 20359 - DNA, 35 bp, Artificial Sequence
  Synthetic oligonucleotide
taaaccgcgggattaggtgatgaacgtctctgagg

SEQ ID NO: 20360 - DNA, 36 bp, Artificial Sequence
  Synthetic oligonucleotide
tgattgtcaacagtctcaaagacgctctagcccgaa

SEQ ID NO: 20361 - DNA, 35 bp, Artificial Sequence
  Synthetic oligonucleotide
ttgacttaaacgtggcgggctctacgctacgtatc

SEQ ID NO: 20362 - DNA, 37 bp, Artificial Sequence
  Synthetic oligonucleotide
ttaaggagaagcggcaccgattctggatcgcttagga

SEQ ID NO: 20363 - DNA, 36 bp, Artificial Sequence
  Synthetic oligonucleotide
tccacaatcggagtgaagagagtttccagggataca

SEQ ID NO: 20364 - DNA, 35 bp, Artificial Sequence
  Synthetic oligonucleotide
ggaacaccgaatgcctggttaccgggatatgtctg

SEQ ID NO: 20365 - DNA, 35 bp, Artificial Sequence
  Synthetic oligonucleotide
ggttataactcacgccgtgcgtcgtgcttatagac

SEQ ID NO: 20366 - DNA, 36 bp, Artificial Sequence
  Synthetic oligonucleotide
tcgagttcatactcgaagtcaccagggtcatcggga

SEQ ID NO: 20367 - DNA, 37 bp, Artificial Sequence
  Synthetic oligonucleotide
cccacgtagcttggcatgaatggagagagtcttggga

SEQ ID NO: 20368 - DNA, 35 bp, Artificial Sequence
  Synthetic oligonucleotide
gtggttcgctttggaaggatgtacgttcgtgttgc

SEQ ID NO: 20369 - DNA, 36 bp, Artificial Sequence
  Synthetic oligonucleotide
gaactagtccactccgccgtccgagggcgcgtatga

SEQ ID NO: 20370 - DNA, 37 bp, Artificial Sequence
  Synthetic oligonucleotide
tagcaaacattggagagtgtaacgttgacgagaatga

SEQ ID NO: 20371 - DNA, 36 bp, Artificial Sequence
  Synthetic oligonucleotide
gcccagtcgatgagacgtgttcaaacggggacgcca

SEQ ID NO: 20372 - DNA, 31 bp, Artificial Sequence
  Synthetic oligonucleotide
tagtggggcttggcaagagggaaagttctct

SEQ ID NO: 20373 - DNA, 35 bp, Artificial Sequence
  Synthetic oligonucleotide
tagtccacaactcaggatgttagttttgggcattg

SEQ ID NO: 20374 - DNA, 36 bp, Artificial Sequence
  Synthetic oligonucleotide
tgttgctatacttcctctgacaatcggagtaacgca

SEQ ID NO: 20375 - DNA, 35 bp, Artificial Sequence
  Synthetic oligonucleotide
gtccggacgtataggtatgttcctcttgcttagag

SEQ ID NO: 20376 - DNA, 36 bp, Artificial Sequence
  Synthetic oligonucleotide
gatgcttggcggatggttatgtgttgcccccccaga

SEQ ID NO: 20377 - DNA, 37 bp, Artificial Sequence
  Synthetic oligonucleotide
gattaacctgcttccgaatacgatgggagcctagtga

SEQ ID NO: 20378 - DNA, 36 bp, Artificial Sequence
  Synthetic oligonucleotide
acatcgtagtagaccggtgactagcagttttattga

SEQ ID NO: 20379 - DNA, 37 bp, Artificial Sequence
  Synthetic oligonucleotide
gtagatcaacgagtattggtcacagtaggaggggaga

SEQ ID NO: 20380 - DNA, 36 bp, Artificial Sequence
  Synthetic oligonucleotide
tgacaatcggattgatgtgataagtggttgagaaga

SEQ ID NO: 20381 - DNA, 37 bp, Artificial Sequence
  Synthetic oligonucleotide
ggtgatccatggtttaggaggaactctgtgctgtcga

SEQ ID NO: 20382 - DNA, 35 bp, Artificial Sequence
  Synthetic oligonucleotide
gtgaccggtgggcatagtgtacaatgctgagcaaa

SEQ ID NO: 20383 - DNA, 36 bp, Artificial Sequence
  Synthetic oligonucleotide
gtggctataagatgctgtttaacagttcgatagata

SEQ ID NO: 20384 - DNA, 38 bp, Artificial Sequence
  Synthetic oligonucleotide
tctcgggcttgaagaggtaccgaggggcaagtgattga

SEQ ID NO: 20385 - DNA, 37 bp, Artificial Sequence
  Synthetic oligonucleotide
gaacgtgagaaataaccggggctacgtattaacttga

SEQ ID NO: 20386 - DNA, 36 bp, Artificial Sequence
  Synthetic oligonucleotide
tgcaacgttcaggagatcgcgtccgaatgtcggtta

SEQ ID NO: 20387 - DNA, 36 bp, Artificial Sequence
  Synthetic oligonucleotide
agaatcgggagactgtttgaacaactcttggcagaa

SEQ ID NO: 20388 - DNA, 36 bp, Artificial Sequence
  Synthetic oligonucleotide
aggacagttcacatctaacacgcagggcttagacca

SEQ ID NO: 20389 - DNA, 37 bp, Artificial Sequence
  Synthetic oligonucleotide
agggaagcgtttccccccgcgcttgtcagacgattga

SEQ ID NO: 20390 - DNA, 38 bp, Artificial Sequence
  Synthetic oligonucleotide
acagtcttgttggaaatgtggagacgcatgataattga

SEQ ID NO: 20391 - DNA, 35 bp, Artificial Sequence
  Synthetic oligonucleotide
gggcatatgtaatcgtagtcataggccatctaagg

SEQ ID NO: 20392 - DNA, 36 bp, Artificial Sequence
  Synthetic oligonucleotide
gagtgtcgggaattggacactgttccgaaaaggaaa

SEQ ID NO: 20393 - DNA, 36 bp, Artificial Sequence
  Synthetic oligonucleotide
taccctatcgaacaatttggtggggcaccggtccta

SEQ ID NO: 20394 - DNA, 36 bp, Artificial Sequence
  Synthetic oligonucleotide
accatcaagtcctgaagcgttgccatgtggctcgta

SEQ ID NO: 20395 - DNA, 38 bp, Artificial Sequence
  Synthetic oligonucleotide
gagagcgtgccgtttgtattacgttttagcttagctga

SEQ ID NO: 20396 - DNA, 36 bp, Artificial Sequence
  Synthetic oligonucleotide
gtttaacctacggccacgggactttacctctcggga

SEQ ID NO: 20397 - DNA, 37 bp, Artificial Sequence
  Synthetic oligonucleotide
ttgcaaccaaggggagttaagggtatgttgtaaagga

SEQ ID NO: 20398 - DNA, 35 bp, Artificial Sequence
  Synthetic oligonucleotide
agatcaactacttagtgtgcggacatcccgcgttc

SEQ ID NO: 20399 - DNA, 36 bp, Artificial Sequence
  Synthetic oligonucleotide
aaggggatcgtggggacgtattaatgcgtgcaagta

SEQ ID NO: 20400 - DNA, 35 bp, Artificial Sequence
  Synthetic oligonucleotide
gggttaatacgccatatcatctattacggtgaaac

SEQ ID NO: 20401 - DNA, 38 bp, Artificial Sequence
  Synthetic oligonucleotide
ttacaaggtgttccattttacgaacgagaagtcaatga

SEQ ID NO: 20402 - DNA, 38 bp, Artificial Sequence
  Synthetic oligonucleotide
ttgctcctaacgatttggatatcatcagtgtagagtga

SEQ ID NO: 20403 - DNA, 34 bp, Artificial Sequence
  Synthetic oligonucleotide
aacgtagccttctacgtttatgtgactgtagtca

SEQ ID NO: 20404 - DNA, 35 bp, Artificial Sequence
  Synthetic oligonucleotide
acatcggttcggccatacgtgctacatggcgctca

SEQ ID NO: 20405 - DNA, 35 bp, Artificial Sequence
  Synthetic oligonucleotide
gtcaaagacatcacgggtcgctggtacattacgac

SEQ ID NO: 20406 - DNA, 37 bp, Artificial Sequence
  Synthetic oligonucleotide
tgccggggtgcttagggtggtctatatgttagagaga

SEQ ID NO: 20407 - DNA, 37 bp, Artificial Sequence
  Synthetic oligonucleotide
agggtcgccgggatagggcctatatagcggccgtaga

SEQ ID NO: 20408 - DNA, 37 bp, Artificial Sequence
  Synthetic oligonucleotide
taatgggtcgtataaggttgggttaaggacttttaga

SEQ ID NO: 20409 - DNA, 36 bp, Artificial Sequence
  Synthetic oligonucleotide
agcgacaggtcgaagaactcaaggtctagtctccca

SEQ ID NO: 20410 - DNA, 37 bp, Artificial Sequence
  Synthetic oligonucleotide
gccgttcgggctcgccaggacactctcggcggagaga

SEQ ID NO: 20411 - DNA, 35 bp, Artificial Sequence
  Synthetic oligonucleotide
atacgcattggcgcgttttactcaattgagtcgat

SEQ ID NO: 20412 - DNA, 35 bp, Artificial Sequence
  Synthetic oligonucleotide
agatgacgatcccaggtgagtcatggtaacacagg

SEQ ID NO: 20413 - DNA, 35 bp, Artificial Sequence
  Synthetic oligonucleotide
agtttgagtacgtgtttacatcggtcatgcgacgt

SEQ ID NO: 20414 - DNA, 35 bp, Artificial Sequence
  Synthetic oligonucleotide
gtgatgaggcggggtaatatgtcagaaaaggcatg

SEQ ID NO: 20415 - DNA, 36 bp, Artificial Sequence
  Synthetic oligonucleotide
ggtgtttaggcgtacattgttcgagccgagactata

SEQ ID NO: 20416 - DNA, 36 bp, Artificial Sequence
  Synthetic oligonucleotide
agtgtcagaccgctcggtcggggttcaaatagagga

SEQ ID NO: 20417 - DNA, 37 bp, Artificial Sequence
  Synthetic oligonucleotide
aggataatccggcataatctgatacgggcacgaagga

SEQ ID NO: 20418 - DNA, 38 bp, Artificial Sequence
  Synthetic oligonucleotide
cactcgtaccggatgactatcgaagttctcggccatga

SEQ ID NO: 20419 - DNA, 36 bp, Artificial Sequence
  Synthetic oligonucleotide
agacgagtggaccgactatgagttcagcgagcctga

SEQ ID NO: 20420 - DNA, 36 bp, Artificial Sequence
  Synthetic oligonucleotide
caatccataaaaacgatccgtggggtagggggtggc

SEQ ID NO: 20421 - DNA, 34 bp, Artificial Sequence
  Synthetic oligonucleotide
tggggaaatacagcgctttcattttcgcctcgca

SEQ ID NO: 20422 - DNA, 35 bp, Artificial Sequence
  Synthetic oligonucleotide
aacttagcggggactcatctcgcgctgtgcacgga

SEQ ID NO: 20423 - DNA, 35 bp, Artificial Sequence
  Synthetic oligonucleotide
gctgcacagccacgggcaacgtagcatacattagg

SEQ ID NO: 20424 - DNA, 36 bp, Artificial Sequence
  Synthetic oligonucleotide
atgcccagtaatgtgagctccgtgttggatcatgaa

SEQ ID NO: 20425 - DNA, 36 bp, Artificial Sequence
  Synthetic oligonucleotide
gagggctatgcgaggggacaacttgatcattgaaga

SEQ ID NO: 20426 - DNA, 36 bp, Artificial Sequence
  Synthetic oligonucleotide
ttccacggttagagtcggggacgcacctacggggga

SEQ ID NO: 20427 - DNA, 35 bp, Artificial Sequence
  Synthetic oligonucleotide
gcgatcgagctgtgtagaaggctaggtttattcgc

SEQ ID NO: 20428 - DNA, 36 bp, Artificial Sequence; identical to SEQ ID NO: 10641
  Synthetic oligonucleotide

SEQ ID NO: 20429 - DNA, 37 bp, Artificial Sequence
  Synthetic oligonucleotide
atcgaaatcatcgtggctgtaaggctctgttccacga

SEQ ID NO: 20430 - DNA, 37 bp, Artificial Sequence
  Synthetic oligonucleotide
tcgagtcacaggcgggcttttcgattgagatatgtga

SEQ ID NO: 20431 - DNA, 35 bp, Artificial Sequence
  Synthetic oligonucleotide
tacagaggcacctttgcttaagcaatgccgttgga

SEQ ID NO: 20432 - DNA, 36 bp, Artificial Sequence
  Synthetic oligonucleotide
gtttacggcatggggttcacgtaatctgaggccata

SEQ ID NO: 20433 - DNA, 35 bp, Artificial Sequence
  Synthetic oligonucleotide
ttcccgaaggtccgtttctgtctgggcttggtagc

SEQ ID NO: 20434 - DNA, 38 bp, Artificial Sequence
  Synthetic oligonucleotide
gatcttcaaacatgttcgccctcagccagtgctgctga

SEQ ID NO: 20435 - DNA, 36 bp, Artificial Sequence
  Synthetic oligonucleotide
attgatcaccacgggaccatagacctcatatatgga

SEQ ID NO: 20436 - DNA, 38 bp, Artificial Sequence
  Synthetic oligonucleotide
acatgacaacgtctgatcggtaggcaatcttcgggtga

SEQ ID NO: 20437 - DNA, 36 bp, Artificial Sequence
  Synthetic oligonucleotide
gaggtaacgtctctgtgggtcaacctcagttaatga

SEQ ID NO: 20438 - DNA, 36 bp, Artificial Sequence
  Synthetic oligonucleotide
ataccacatcgttcacgcctgaattacagagtgtga

SEQ ID NO: 20439 - DNA, 35 bp, Artificial Sequence
  Synthetic oligonucleotide
atattgacagacttagagggctcaaatatacaatg

SEQ ID NO: 20440 - DNA, 37 bp, Artificial Sequence
  Synthetic oligonucleotide
tagtcgctggaaggtgccggttcatctaatatgtcga

SEQ ID NO: 20441 - DNA, 37 bp, Artificial Sequence
  Synthetic oligonucleotide
gattcagcgatgaagcaatgaaatagcaagcaggcga

SEQ ID NO: 20442 - DNA, 36 bp, Artificial Sequence
  Synthetic oligonucleotide
aagtcaatgcgggtcagacctaggagtagagagata

SEQ ID NO: 20443 - DNA, 35 bp, Artificial Sequence
  Synthetic oligonucleotide
tgcatcgcgccaagcaggcttgcgggtgtgctccc

SEQ ID NO: 20444 - DNA, 36 bp, Artificial Sequence
  Synthetic oligonucleotide
ggataaatgcgtccgtcaccgtgaagctaccgcgaa

SEQ ID NO: 20445 - DNA, 34 bp, Artificial Sequence
  Synthetic oligonucleotide
ggccaaccctctcaaaacgaaccgtgcgtgtgtg

SEQ ID NO: 20446 - DNA, 36 bp, Artificial Sequence
  Synthetic oligonucleotide
gccacgtgacgaatggtgcttttttcttagtctaaa

SEQ ID NO: 20447 - DNA, 35 bp, Artificial Sequence
  Synthetic oligonucleotide
tttgtctgcatcagctatttaatcctgtttagaga

SEQ ID NO: 20448 - DNA, 37 bp, Artificial Sequence
  Synthetic oligonucleotide
cctggtttgtaactatcgacagaggcaagtctcccga

SEQ ID NO: 20449 - DNA, 36 bp, Artificial Sequence
  Synthetic oligonucleotide
gacatgcgtagtgtcacgtgtgcgtccttttaagaa

SEQ ID NO: 20450 - DNA, 36 bp, Artificial Sequence
  Synthetic oligonucleotide
ttctctgcgaatatgtgtaacgattaagattactaa

SEQ ID NO: 20451 - DNA, 38 bp, Artificial Sequence
  Synthetic oligonucleotide
tgtgaggtccgaggtctggggctgaaagccccccgtga

SEQ ID NO: 20452 - DNA, 35 bp, Artificial Sequence
  Synthetic oligonucleotide
agaacggatggtcgtgctctgctgagctacatttg

SEQ ID NO: 20453 - DNA, 38 bp, Artificial Sequence
  Synthetic oligonucleotide
agacacgttcgactcggggtgcatgttacgcggactga

SEQ ID NO: 20454 - DNA, 34 bp, Artificial Sequence
  Synthetic oligonucleotide
gtgcttgacaattctggggttgcaactgacgata

SEQ ID NO: 20455 - DNA, 38 bp, Artificial Sequence
  Synthetic oligonucleotide
gactctgcctcggtgggactaagatcgtctcgtcgtga

SEQ ID NO: 20456 - DNA, 35 bp, Artificial Sequence
  Synthetic oligonucleotide
ccacggtgagaggtttctgcctaggatcggcattg

SEQ ID NO: 20457 - DNA, 35 bp, Artificial Sequence
  Synthetic oligonucleotide
atggcagagagcaaggtgtagcctctacggggtgg

SEQ ID NO: 20458 - DNA, 35 bp, Artificial Sequence
  Synthetic oligonucleotide
ggacgcaacaatggttgtataggtcggtctttctc

SEQ ID NO: 20459 - DNA, 36 bp, Artificial Sequence
  Synthetic oligonucleotide
atgggggaactcgagcatggatgttttctccagaaa

SEQ ID NO: 20460 - DNA, 37 bp, Artificial Sequence
  Synthetic oligonucleotide
gttgctcgggcgcagtcattcttcccatcgacgtgga

SEQ ID NO: 20461 - DNA, 37 bp, Artificial Sequence
  Synthetic oligonucleotide
atccgtcaaatgattacgagaagttgtccttgcatga

SEQ ID NO: 20462 - DNA, 36 bp, Artificial Sequence
  Synthetic oligonucleotide
gtcgagcgccaggatgtagggcgcaggtattaaaga

SEQ ID NO: 20463 - DNA, 37 bp, Artificial Sequence
  Synthetic oligonucleotide
gaaccggggtgcttgagctattccgaaattatgctga

SEQ ID NO: 20464 - DNA, 35 bp, Artificial Sequence
  Synthetic oligonucleotide
acaatggcagagggaatcaagacattacggtaggg

SEQ ID NO: 20465 - DNA, 37 bp, Artificial Sequence
  Synthetic oligonucleotide
atgtcaacggtaatgggtactattatagtactgtaga

SEQ ID NO: 20466 - DNA, 38 bp, Artificial Sequence
  Synthetic oligonucleotide
tatggccccctggcctaatgtctaggtgtgctagatga

SEQ ID NO: 20467 - DNA, 37 bp, Artificial Sequence
  Synthetic oligonucleotide
gagatcgggtagatatgataacataggttatatccga

SEQ ID NO: 20468 - DNA, 36 bp, Artificial Sequence
  Synthetic oligonucleotide
gaggatataacagggttacgaaagtttagatgggaa

SEQ ID NO: 20469 - DNA, 35 bp, Artificial Sequence
  Synthetic oligonucleotide
catagccggtgggatagttgtcatttgagtcattc

SEQ ID NO: 20470 - DNA, 36 bp, Artificial Sequence
  Synthetic oligonucleotide
aacagagcaaggttcgaccggttcccgggaagtcga

SEQ ID NO: 20471 - DNA, 37 bp, Artificial Sequence
  Synthetic oligonucleotide
tagaaaccacgcccccccttcggcgcatgttttgaga

SEQ ID NO: 20472 - DNA, 36 bp, Artificial Sequence
  Synthetic oligonucleotide
gaacggggaatatagaagaaagtccaaagtattcca

SEQ ID NO: 20473 - DNA, 35 bp, Artificial Sequence
  Synthetic oligonucleotide
tcgcaagttgcaggggatcgtaaactgtttgcgtt

SEQ ID NO: 20474 - DNA, 35 bp, Artificial Sequence
  Synthetic oligonucleotide
gattacggggcatcgcgaacgggcaagcacggcca

SEQ ID NO: 20475 - DNA, 38 bp, Artificial Sequence
  Synthetic oligonucleotide
actgtatgcatcggatgtatagggtccgtcttccagaa

SEQ ID NO: 20476 - DNA, 37 bp, Artificial Sequence
  Synthetic oligonucleotide
tgttagcgcataaggtgctgctgggtacgcgccggga

SEQ ID NO: 20477 - DNA, 38 bp, Artificial Sequence
  Synthetic oligonucleotide
aacggaattgacgcgcaacgttaaaagcggtaggttga

SEQ ID NO: 20478 - DNA, 36 bp, Artificial Sequence
  Synthetic oligonucleotide
gttacctaaaagcgggagaccatacatgagttccga

SEQ ID NO: 20479 - DNA, 36 bp, Artificial Sequence
  Synthetic oligonucleotide
gcttttcaggagagctcgggaaggaatctacagtga

SEQ ID NO: 20480 - DNA, 37 bp, Artificial Sequence
  Synthetic oligonucleotide
tacgtgtcatccttgggtctaaggggctaaagttcga

SEQ ID NO: 20481 - DNA, 35 bp, Artificial Sequence
  Synthetic oligonucleotide
agtggttgtcgaaatctaacagctggtaatggacg

SEQ ID NO: 20482 - DNA, 37 bp, Artificial Sequence
  Synthetic oligonucleotide
gaatcgccatagtgtatttacaaggtagcaattttga

SEQ ID NO: 20483 - DNA, 36 bp, Artificial Sequence
  Synthetic oligonucleotide
ttgtacagggggacctcgatgcgaccaggaagtgga

SEQ ID NO: 20484 - DNA, 35 bp, Artificial Sequence
  Synthetic oligonucleotide
gatacaaggcgtatgttgaccacaatcattagtag

SEQ ID NO: 20485 - DNA, 35 bp, Artificial Sequence
  Synthetic oligonucleotide
actttcggcgtagggtggggaaacgttctatagta

SEQ ID NO: 20486 - DNA, 35 bp, Artificial Sequence
  Synthetic oligonucleotide
gtggcattgtatacaaagagtgcacccccgcttcc

SEQ ID NO: 20487 - DNA, 35 bp, Artificial Sequence
  Synthetic oligonucleotide
tcctccattacgtcaccgctggcctgacaatctac

SEQ ID NO: 20488 - DNA, 37 bp, Artificial Sequence
  Synthetic oligonucleotide
agtcacgagtcacaggccaagccctgcaagcaagcga

SEQ ID NO: 20489 - DNA, 37 bp, Artificial Sequence
  Synthetic oligonucleotide
tgggggcttcttcatgcgctgtctatgacaggcagga

SEQ ID NO: 20490 - DNA, 37 bp, Artificial Sequence
  Synthetic oligonucleotide
gttccgcgacacccaggtcacgtctattcaggcgaga

SEQ ID NO: 20491 - DNA, 36 bp, Artificial Sequence
  Synthetic oligonucleotide
tagcccagaaggttgattgaaggtggtgccccctga

SEQ ID NO: 20492 - DNA, 36 bp, Artificial Sequence
  Synthetic oligonucleotide
attaagggatagggactgctaggaccgcttagctta

SEQ ID NO: 20493 - DNA, 38 bp, Artificial Sequence
  Synthetic oligonucleotide
tcgtagacactaatccggtcccgacagtcttttcatga

SEQ ID NO: 20494 - DNA, 37 bp, Artificial Sequence
  Synthetic oligonucleotide
tcgtcaggtacggcgtaatttcgaggacgcccggtga

SEQ ID NO: 20495 - DNA, 38 bp, Artificial Sequence
  Synthetic oligonucleotide
aactgggagccgctcgtagcaactgtgggttaatctga

SEQ ID NO: 20496 - DNA, 36 bp, Artificial Sequence
  Synthetic oligonucleotide
agacaaacatggactagttgagcaaaggccggggga

SEQ ID NO: 20497 - DNA, 38 bp, Artificial Sequence
  Synthetic oligonucleotide
aacagaggctctgtgtgcaagttatagcgtgtcgttga

SEQ ID NO: 20498 - DNA, 36 bp, Artificial Sequence
  Synthetic oligonucleotide
tgtttggaatactgtcaccctcgcattgatcgcgta

SEQ ID NO: 20499 - DNA, 35 bp, Artificial Sequence
  Synthetic oligonucleotide
tgatcagtaaggtcagcacaacgtcgatagagttg

SEQ ID NO: 20500 - DNA, 36 bp, Artificial Sequence
  Synthetic oligonucleotide
aatgcgtgtctctagtctataggcgaggacagagca

SEQ ID NO: 20501 - DNA, 27 bp, Artificial Sequence
  Synthetic oligonucleotide
ttgccctcgctattttagcagtcatga

SEQ ID NO: 20502 - DNA, 36 bp, Artificial Sequence
  Synthetic oligonucleotide
gatatcttacgacttaagaggacgccactattcaag

SEQ ID NO: 20503 - DNA, 37 bp, Artificial Sequence
  Synthetic oligonucleotide
gtacttgagccacagataaaccaactcccgccgccga

SEQ ID NO: 20504 - DNA, 35 bp, Artificial Sequence
  Synthetic oligonucleotide
tgaactcctacgtcgggatgggttcaatgccgcgg

SEQ ID NO: 20505 - DNA, 36 bp, Artificial Sequence
  Synthetic oligonucleotide
tcatgcgacagtttttggggtattgtacacacgaga

SEQ ID NO: 20506 - DNA, 36 bp, Artificial Sequence
  Synthetic oligonucleotide
agacgcgacgatggcgcggtcgttgatatagttaga

SEQ ID NO: 20507 - DNA, 38 bp, Artificial Sequence
  Synthetic oligonucleotide
tgcatcagttagtagccctcccctagccactgctctga

SEQ ID NO: 20508 - DNA, 37 bp, Artificial Sequence
  Synthetic oligonucleotide
ccatggctccaacttttgtcaggatgggtccacaaga

SEQ ID NO: 20509 - DNA, 36 bp, Artificial Sequence
  Synthetic oligonucleotide
acttgtgtaatctgtggccataaaaggtccgtaaga

SEQ ID NO: 20510 - DNA, 35 bp, Artificial Sequence
  Synthetic oligonucleotide
ctcaaaagcccctcccacgtgctgtcttcaagggc

SEQ ID NO: 20511 - DNA, 36 bp, Artificial Sequence
  Synthetic oligonucleotide
ttagtcacgctgctcatggtataccggcgtgaggta

SEQ ID NO: 20512 - DNA, 38 bp, Artificial Sequence
  Synthetic oligonucleotide
aagttattacggaaagcgtgggatagaaaacgttatga

SEQ ID NO: 20513 - DNA, 38 bp, Artificial Sequence
  Synthetic oligonucleotide
gtggtcgcggaataggtaaaaggtctagggcgacgtga

SEQ ID NO: 20514 - DNA, 35 bp, Artificial Sequence
  Synthetic oligonucleotide
aaaatagcctcggtgttacgggtttgatgtccacg

SEQ ID NO: 20515 - DNA, 37 bp, Artificial Sequence
  Synthetic oligonucleotide
ttgtacaggcgtgagggcaccatggcactatgctaga

SEQ ID NO: 20516 - DNA, 38 bp, Artificial Sequence
  Synthetic oligonucleotide
agttacgtgccagggtatcgccagtaagacaagtttga

SEQ ID NO: 20517 - DNA, 35 bp, Artificial Sequence
  Synthetic oligonucleotide
atctcccgcccgcccccctcacgacagctgttgtt

SEQ ID NO: 20518 - DNA, 35 bp, Artificial Sequence
  Synthetic oligonucleotide
gtagtgtggatctcttaacttgcgcactctggcat

SEQ ID NO: 20519 - DNA, 36 bp, Artificial Sequence
  Synthetic oligonucleotide
actgtgcatgtaagtgagtacttgcacacactctga

SEQ ID NO: 20520 - DNA, 36 bp, Artificial Sequence
  Synthetic oligonucleotide
ttcatcatcgtctcccgtgtcgtacattgtcatgta

SEQ ID NO: 20521 - DNA, 36 bp, Artificial Sequence
  Synthetic oligonucleotide
attatgtgtcagcgacttcctgataaaatttggcaa

SEQ ID NO: 20522 - DNA, 35 bp, Artificial Sequence
  Synthetic oligonucleotide
attcgcacatagtgtcaatatggaaaccctattcg

SEQ ID NO: 20523 - DNA, 36 bp, Artificial Sequence
  Synthetic oligonucleotide
agaaacggcaatcaggatctcataggaagttaccca

SEQ ID NO: 20524 - DNA, 35 bp, Artificial Sequence
  Synthetic oligonucleotide
agttatcagcatgtcggctcgtgcctcaccccaac

SEQ ID NO: 20525 - DNA, 36 bp, Artificial Sequence
  Synthetic oligonucleotide
atcgcgacgctgtcgtcccagcaggagaatgcgata

SEQ ID NO: 20526 - DNA, 35 bp, Artificial Sequence; identical to SEQ ID NO: 9682
  Synthetic oligonucleotide

SEQ ID NO: 20527 - DNA, 38 bp, Artificial Sequence
  Synthetic oligonucleotide
gttagacagacaaacttctattttacggtttggagtga

SEQ ID NO: 20528 - DNA, 37 bp, Artificial Sequence
  Synthetic oligonucleotide
aaggtgttatgatgtccgtcgctagctaggatgtaga

SEQ ID NO: 20529 - DNA, 36 bp, Artificial Sequence
  Synthetic oligonucleotide
gggtggttcagatctgtccaaagttcgctatgccga

SEQ ID NO: 20530 - DNA, 36 bp, Artificial Sequence
  Synthetic oligonucleotide
tatgtggctgctatatgcagaaagacgcccgaaaaa

SEQ ID NO: 20531 - DNA, 37 bp, Artificial Sequence
  Synthetic oligonucleotide
gatggagccggttttaggctttccacacggagtgtga

SEQ ID NO: 20532 - DNA, 37 bp, Artificial Sequence
  Synthetic oligonucleotide
actcaggggcaaaattgtgctatccaacaatgcagga

SEQ ID NO: 20533 - DNA, 35 bp, Artificial Sequence
  Synthetic oligonucleotide
tgcatcgggggtatgggatccgtggatactcgcaa

SEQ ID NO: 20534 - DNA, 37 bp, Artificial Sequence
  Synthetic oligonucleotide
atacgagtcagcgaattcataggttcacttgagctga

SEQ ID NO: 20535 - DNA, 37 bp, Artificial Sequence
  Synthetic oligonucleotide
tgcgtggggtgtactttgtacaaagttacgaaatgga

SEQ ID NO: 20536 - DNA, 35 bp, Artificial Sequence
  Synthetic oligonucleotide
agcaagattgtacgatatacgctaggtacaaaggg

SEQ ID NO: 20537 - DNA, 36 bp, Artificial Sequence
  Synthetic oligonucleotide
ttacccagtaggcccgacacgttatcgctttttaaa

SEQ ID NO: 20538 - DNA, 35 bp, Artificial Sequence
  Synthetic oligonucleotide
gtgtaaatcacgatcagcggccgctaggcgctctg

SEQ ID NO: 20539 - DNA, 35 bp, Artificial Sequence
  Synthetic oligonucleotide
gccataaggcgttcggtcactcgtgcaaaggtgtg

SEQ ID NO: 20540 - DNA, 37 bp, Artificial Sequence
  Synthetic oligonucleotide
atcgactggctatggggttaatggagggtttctgtga

SEQ ID NO: 20541 - DNA, 36 bp, Artificial Sequence
  Synthetic oligonucleotide
gatagaatactggtcacgagggcttatggctataca

SEQ ID NO: 20542 - DNA, 36 bp, Artificial Sequence
  Synthetic oligonucleotide
atgacggatggagccgaatctgtcaagggacaggca

SEQ ID NO: 20543 - DNA, 38 bp, Artificial Sequence
  Synthetic oligonucleotide
gtgtgcagacagaaagacttatcgcccgtctgggctga

SEQ ID NO: 20544 - DNA, 38 bp, Artificial Sequence
  Synthetic oligonucleotide
aactcggggcctcaccagttgaacatcaggctggatga

SEQ ID NO: 20545 - DNA, 35 bp, Artificial Sequence
  Synthetic oligonucleotide
gcgacttatgccgtattttttgttaagaagacatt

SEQ ID NO: 20546 - DNA, 36 bp, Artificial Sequence
  Synthetic oligonucleotide
gagacgagtatcaagcaagggtgccccgtacacgca

SEQ ID NO: 20547 - DNA, 37 bp, Artificial Sequence
  Synthetic oligonucleotide
ttatctgtgacaaaagtctacttcttgtccatgtgga

SEQ ID NO: 20548 - DNA, 36 bp, Artificial Sequence
  Synthetic oligonucleotide
tgggacgtgtggaggatcctaagatgtattcgggga

SEQ ID NO: 20549 - DNA, 37 bp, Artificial Sequence
  Synthetic oligonucleotide
gccgcacaagttacttgaggaaggccacctagggcga

SEQ ID NO: 20550 - DNA, 36 bp, Artificial Sequence
  Synthetic oligonucleotide
agctggacgttggggcctttacgaccgcggacgcga

SEQ ID NO: 20551 - DNA, 35 bp, Artificial Sequence
  Synthetic oligonucleotide
gacactcagaatgggatggtcgcgagatggaatgt

SEQ ID NO: 20552 - DNA, 37 bp, Artificial Sequence
  Synthetic oligonucleotide
tcaaaatggaggtacaacgcgatgcccgttctgttga

SEQ ID NO: 20553 - DNA, 38 bp, Artificial Sequence
  Synthetic oligonucleotide
tgtagctaccgcatcgggttgcgcgaagagagttctga

SEQ ID NO: 20554 - DNA, 38 bp, Artificial Sequence
  Synthetic oligonucleotide
agtacctaccgtccagaacgtaagcgcgcctcttgtga

SEQ ID NO: 20555 - DNA, 35 bp, Artificial Sequence
  Synthetic oligonucleotide
acagccacggcatgtgatgggtggctgttggtttt

SEQ ID NO: 20556 - DNA, 37 bp, Artificial Sequence
  Synthetic oligonucleotide
gccgagaattgccgagaatagttttgacagcagttga

SEQ ID NO: 20557 - DNA, 37 bp, Artificial Sequence
  Synthetic oligonucleotide
agctccgttgaagtagtgctcacggctactgttgtga

SEQ ID NO: 20558 - DNA, 35 bp, Artificial Sequence
  Synthetic oligonucleotide
gcgtatacatactatagatgtggttagtattgtcg

SEQ ID NO: 20559 - DNA, 35 bp, Artificial Sequence
  Synthetic oligonucleotide
gaatgcaattgcctggtcctacacgcagtgcgtgt

SEQ ID NO: 20560 - DNA, 38 bp, Artificial Sequence
  Synthetic oligonucleotide
acatcccacagtctaagaccgggatccccaatacatga

SEQ ID NO: 20561 - DNA, 35 bp, Artificial Sequence
  Synthetic oligonucleotide
gattctcgggatgagcactggccaccgtagacata

SEQ ID NO: 20562 - DNA, 37 bp, Artificial Sequence
  Synthetic oligonucleotide
gaaggtctggatccatgccatatcgctcccctcttga

SEQ ID NO: 20563 - DNA, 36 bp, Artificial Sequence
  Synthetic oligonucleotide
tgtctcgctcaggtacctggatgtggcatcttgcta

SEQ ID NO: 20564 - DNA, 37 bp, Artificial Sequence
  Synthetic oligonucleotide
acggaggggcgttcgaacttgtccgagcaagacctga

SEQ ID NO: 20565 - DNA, 36 bp, Artificial Sequence
  Synthetic oligonucleotide
gaaaaccgtcactgagcttgaaggctaggcaattaa

SEQ ID NO: 20566 - DNA, 36 bp, Artificial Sequence
  Synthetic oligonucleotide
gcttcaaggcagggatcggttactacatggatttaa

SEQ ID NO: 20567 - DNA, 36 bp, Artificial Sequence
  Synthetic oligonucleotide
gcacgtgaactcattgacgtgaaaccttcaaactta

SEQ ID NO: 20568 - DNA, 37 bp, Artificial Sequence
  Synthetic oligonucleotide
aatggagtttgttcgagttacacgaaggagtccacga

SEQ ID NO: 20569 - DNA, 37 bp, Artificial Sequence
  Synthetic oligonucleotide
gaagactaagattggtaaggtttcgtctgagtaaaga

SEQ ID NO: 20570 - DNA, 35 bp, Artificial Sequence
  Synthetic oligonucleotide
gagatcgtctcgtacgtttattgcgaatatctcac

SEQ ID NO: 20571 - DNA, 36 bp, Artificial Sequence
  Synthetic oligonucleotide
tccacagaataaacgcggtacagtgacaatgtaata

SEQ ID NO: 20572 - DNA, 37 bp, Artificial Sequence
  Synthetic oligonucleotide
atcaagagtcagttaaggtcgttccgcattgatcgga

SEQ ID NO: 20573 - DNA, 36 bp, Artificial Sequence
  Synthetic oligonucleotide
ttcgacgcacgaatggcacacgtgttggtcaatgga

SEQ ID NO: 20574 - DNA, 37 bp, Artificial Sequence
  Synthetic oligonucleotide
accatcgaaaggtaggaagactacctgaagtgtgcga

SEQ ID NO: 20575 - DNA, 37 bp, Artificial Sequence
  Synthetic oligonucleotide
gcgcctggacagattcggtggcctcacggttcatcga

SEQ ID NO: 20576 - DNA, 36 bp, Artificial Sequence
  Synthetic oligonucleotide
ttaccagaagtacccgaggtgctgtacagtagctga

SEQ ID NO: 20577 - DNA, 37 bp, Artificial Sequence
  Synthetic oligonucleotide
ttgggctgcatcgcaggatgtaaaccggaatatgcga

SEQ ID NO: 20578 - DNA, 36 bp, Artificial Sequence
  Synthetic oligonucleotide
gtcaatccaaagcacacaagtctgctgttgctgata

SEQ ID NO: 20579 - DNA, 36 bp, Artificial Sequence
  Synthetic oligonucleotide
tgtcattcctcaaacatactcttaagagctgctaca

SEQ ID NO: 20580 - DNA, 35 bp, Artificial Sequence
  Synthetic oligonucleotide
gtcacaactaacgtggagtaaagccaggtagtgca

SEQ ID NO: 20581 - DNA, 35 bp, Artificial Sequence
  Synthetic oligonucleotide
tggggaaacatcaattaataagtagccaatctggt

SEQ ID NO: 20582 - DNA, 36 bp, Artificial Sequence
  Synthetic oligonucleotide
gcttgcgtttcagcaaggtttgatgctttgtaccta

SEQ ID NO: 20583 - DNA, 36 bp, Artificial Sequence
  Synthetic oligonucleotide
gtacgaaaaaactcgtgcgagtcgcagagacgtaga

SEQ ID NO: 20584 - DNA, 36 bp, Artificial Sequence
  Synthetic oligonucleotide
atgaatgcggtcttctggagccgttcgagggcataa

SEQ ID NO: 20585 - DNA, 36 bp, Artificial Sequence
  Synthetic oligonucleotide
tagctctgtggtcaagtcgagatcagactccttata

SEQ ID NO: 20586 - DNA, 38 bp, Artificial Sequence
  Synthetic oligonucleotide
tagtacgtgcatatgtaacgaagcccatgccgaaatga

SEQ ID NO: 20587 - DNA, 35 bp, Artificial Sequence
  Synthetic oligonucleotide
aggagcattcctgattatggaacactagaggacga

SEQ ID NO: 20588 - DNA, 38 bp, Artificial Sequence
  Synthetic oligonucleotide
ggactcacgctacgaataagacatagttgaccatctga

SEQ ID NO: 20589 - DNA, 36 bp, Artificial Sequence
  Synthetic oligonucleotide
aacagtcacaatctttgtcaggcgagaatggcgata

SEQ ID NO: 20590 - DNA, 35 bp, Artificial Sequence
  Synthetic oligonucleotide
gagctctggcactacttgaagtacgacattctata

SEQ ID NO: 20591 - DNA, 35 bp, Artificial Sequence
  Synthetic oligonucleotide
atcctcctcgtcgcgtacgaaaatttgccggtttt

SEQ ID NO: 20592 - DNA, 36 bp, Artificial Sequence
  Synthetic oligonucleotide
agagcgggtagctgtaacgcgaggatacaaatacga

SEQ ID NO: 20593 - DNA, 38 bp, Artificial Sequence
  Synthetic oligonucleotide
tgatggcgctgctgattacggatccatgtgcgtattga

SEQ ID NO: 20594 - DNA, 35 bp, Artificial Sequence
  Synthetic oligonucleotide
aatgcacacgggcgctgatatacttcattcgcggt

SEQ ID NO: 20595 - DNA, 36 bp, Artificial Sequence
  Synthetic oligonucleotide
gctgaactagtccgaacgccacccccaacgagggaa

SEQ ID NO: 20596 - DNA, 35 bp, Artificial Sequence
  Synthetic oligonucleotide
ttcggacgcttaatatggcaaatatattgtcgatc

SEQ ID NO: 20597 - DNA, 36 bp, Artificial Sequence
  Synthetic oligonucleotide
tcgagccacgcgacgtacgtgtcgaggagtttaaaa

SEQ ID NO: 20598 - DNA, 35 bp, Artificial Sequence
  Synthetic oligonucleotide
gccaaggagtttggttcctatgacggctaacggtt

SEQ ID NO: 20599 - DNA, 36 bp, Artificial Sequence
  Synthetic oligonucleotide
tacctcaatcaggtcacgttcgttagacaatgaata

SEQ ID NO: 20600 - DNA, 38 bp, Artificial Sequence
  Synthetic oligonucleotide
ttcgtgccgcgcttggctgacggagtatctgtttctga

SEQ ID NO: 20601 - DNA, 35 bp, Artificial Sequence
  Synthetic oligonucleotide
tgtaaggggcgtgtcaggccttagcttggaggttc

SEQ ID NO: 20602 - DNA, 35 bp, Artificial Sequence
  Synthetic oligonucleotide
atgcaaaactcggatggataaatgtatgcacaaga

SEQ ID NO: 20603 - DNA, 36 bp, Artificial Sequence
  Synthetic oligonucleotide
aaagtgacaatgatgcgaattttagaacttcgttta

SEQ ID NO: 20604 - DNA, 37 bp, Artificial Sequence
  Synthetic oligonucleotide
tgccaggtttctgagtcttgtcaggtttgctaaagga

SEQ ID NO: 20605 - DNA, 35 bp, Artificial Sequence; identical to SEQ ID NO: 17079
  Synthetic oligonucleotide

SEQ ID NO: 20606 - DNA, 35 bp, Artificial Sequence
  Synthetic oligonucleotide
gccagaatcgatgcataaacagaatggtggacctt

SEQ ID NO: 20607 - DNA, 35 bp, Artificial Sequence
  Synthetic oligonucleotide
gtacaacacataagcctgaacttgaatgcctaggg

SEQ ID NO: 20608 - DNA, 37 bp, Artificial Sequence
  Synthetic oligonucleotide
acaacatgggcgttaacaagcatgggcatatctaaga

SEQ ID NO: 20609 - DNA, 36 bp, Artificial Sequence
  Synthetic oligonucleotide
accgatatgtaggtctaggaacaagagcgatcttta

SEQ ID NO: 20610 - DNA, 35 bp, Artificial Sequence
  Synthetic oligonucleotide
ttgctagagggaggccaacagaaacaagttccggg

SEQ ID NO: 20611 - DNA, 35 bp, Artificial Sequence
  Synthetic oligonucleotide
tccaacaagaattttttgcacacgtatgttatagt

SEQ ID NO: 20612 - DNA, 33 bp, Artificial Sequence
  Synthetic oligonucleotide
gttcgatattggcgccggttcacatagaccatg

SEQ ID NO: 20613 - DNA, 26 bp, Artificial Sequence
  Synthetic oligonucleotide
aatagaacgcgtgagcatgtctccga

SEQ ID NO: 20614 - DNA, 35 bp, Artificial Sequence
  Synthetic oligonucleotide
agacacggtgaggtatgtcatttgatctcggatgg

SEQ ID NO: 20615 - DNA, 35 bp, Artificial Sequence
  Synthetic oligonucleotide
tttccttcgtcatggcatagcctgcaacattcctc

SEQ ID NO: 20616 - DNA, 36 bp, Artificial Sequence
  Synthetic oligonucleotide
aagacggcgggagactgccgaggttaatccgggaaa

SEQ ID NO: 20617 - DNA, 35 bp, Artificial Sequence
  Synthetic oligonucleotide
gagcacacgtcgattaactaaaggtgtgttgggct

SEQ ID NO: 20618 - DNA, 35 bp, Artificial Sequence
  Synthetic oligonucleotide
agacggaaaactgctcgttcattgctgcattgcaa

SEQ ID NO: 20619 - DNA, 35 bp, Artificial Sequence
  Synthetic oligonucleotide
tcgcgaaggtatgcttaagccggggcgaagaacct

SEQ ID NO: 20620 - DNA, 35 bp, Artificial Sequence
  Synthetic oligonucleotide
gatcgtgagactggggatcattattggttggctat

SEQ ID NO: 20621 - DNA, 36 bp, Artificial Sequence
  Synthetic oligonucleotide
gcttcggttaggatggggtgagagtctcgtctaaaa

SEQ ID NO: 20622 - DNA, 36 bp, Artificial Sequence
  Synthetic oligonucleotide
gtgtgagataggactggccctagtccgtggacggga

SEQ ID NO: 20623 - DNA, 35 bp, Artificial Sequence
  Synthetic oligonucleotide
ttgcctggcaacccccggccggggaacatactagt

SEQ ID NO: 20624 - DNA, 38 bp, Artificial Sequence
  Synthetic oligonucleotide
agtgtgctcccgagggacctggatgctaaggtgcacga

SEQ ID NO: 20625 - DNA, 37 bp, Artificial Sequence
  Synthetic oligonucleotide
agtcaagcaagcatgtatgaaccgaacgtagtgcgga

SEQ ID NO: 20626 - DNA, 37 bp, Artificial Sequence
  Synthetic oligonucleotide
aaaggtaattgtctcgacagagccaactcccctaaga

SEQ ID NO: 20627 - DNA, 37 bp, Artificial Sequence
  Synthetic oligonucleotide
tctcgtgcagggaaaagactctcccgaaacgtaatga

SEQ ID NO: 20628 - DNA, 37 bp, Artificial Sequence
  Synthetic oligonucleotide
gccgtgcccatgtgttgcgtatcacccatccggttga

SEQ ID NO: 20629 - DNA, 35 bp, Artificial Sequence
  Synthetic oligonucleotide
gatctgctctgtaaaattacagaggtcgcactaag

SEQ ID NO: 20630 - DNA, 35 bp, Artificial Sequence
  Synthetic oligonucleotide
gaggagtgttagtctgactcgcataccggacgcac

SEQ ID NO: 20631 - DNA, 37 bp, Artificial Sequence
  Synthetic oligonucleotide
taaatactgcaagggcgtaaatccgttcgcacagaga

SEQ ID NO: 20632 - DNA, 37 bp, Artificial Sequence
  Synthetic oligonucleotide
gacccaggctaagattggctaaggatggtggtatcga

SEQ ID NO: 20633 - DNA, 35 bp, Artificial Sequence
  Synthetic oligonucleotide
acaggctaaccaggtgggacaaaagacaatcggcc

SEQ ID NO: 20634 - DNA, 38 bp, Artificial Sequence
  Synthetic oligonucleotide
aagtgcccgccgtgaacacgaacgttactggcgtttga

SEQ ID NO: 20635 - DNA, 38 bp, Artificial Sequence
  Synthetic oligonucleotide
gtgagatcgatgtttgaagtctcggaagtcctatctga

SEQ ID NO: 20636 - DNA, 37 bp, Artificial Sequence
  Synthetic oligonucleotide
attttggggatcgagccaactttgcgtaatgaatcga

SEQ ID NO: 20637 - DNA, 35 bp, Artificial Sequence
  Synthetic oligonucleotide
agttgtcaagctgtcaatattagttgctcccccgc

SEQ ID NO: 20638 - DNA, 35 bp, Artificial Sequence
  Synthetic oligonucleotide
tgaagattaggacggtttactggttaatgcaacag

SEQ ID NO: 20639 - DNA, 35 bp, Artificial Sequence
  Synthetic oligonucleotide
aagtgcaaaggggatttctctgataaacagacttg

SEQ ID NO: 20640 - DNA, 38 bp, Artificial Sequence
  Synthetic oligonucleotide
ctagggcaacatacgttgactaggacggtgcagggtga

SEQ ID NO: 20641 - DNA, 38 bp, Artificial Sequence
  Synthetic oligonucleotide
ttacgtcacaggggattactgatagcgattccccatga

SEQ ID NO: 20642 - DNA, 35 bp, Artificial Sequence
  Synthetic oligonucleotide
tctaaatggcatggtcattctaagggctgggaggc

SEQ ID NO: 20643 - DNA, 38 bp, Artificial Sequence
  Synthetic oligonucleotide
atggctaggtttggatgctgagtatgctaagtgattga

SEQ ID NO: 20644 - DNA, 36 bp, Artificial Sequence
  Synthetic oligonucleotide
gtcacgctttgggcaattgggacatccggtgaccca

SEQ ID NO: 20645 - DNA, 36 bp, Artificial Sequence
  Synthetic oligonucleotide
gaccgggaaccatgcttgtggccgttccaactagca

SEQ ID NO: 20646 - DNA, 36 bp, Artificial Sequence
  Synthetic oligonucleotide
tagtcatgagacaaaggcggaagagcgggtattaca

SEQ ID NO: 20647 - DNA, 35 bp, Artificial Sequence
  Synthetic oligonucleotide
agcgagagttcctgctgccatggcttgatagggta

SEQ ID NO: 20648 - DNA, 35 bp, Artificial Sequence
  Synthetic oligonucleotide
gtgggatgtttgtcaaagttgtatgatctgctccc

SEQ ID NO: 20649 - DNA, 37 bp, Artificial Sequence
  Synthetic oligonucleotide
aaggttcgtgacgcaaagttcatggttgtattagaga

SEQ ID NO: 20650 - DNA, 38 bp, Artificial Sequence
  Synthetic oligonucleotide
gtttgcgttgagggggacgtcaatggtttacggggtga

SEQ ID NO: 20651 - DNA, 35 bp, Artificial Sequence
  Synthetic oligonucleotide
aagcggatggctctcattggtgatggtgtagtccg

SEQ ID NO: 20652 - DNA, 35 bp, Artificial Sequence
  Synthetic oligonucleotide
taatagcaggagacgtcccacactgaggcgcgata

SEQ ID NO: 20653 - DNA, 35 bp, Artificial Sequence
  Synthetic oligonucleotide
tgcgagtagtcgatattttaccccgtaggtggcct

SEQ ID NO: 20654 - DNA, 35 bp, Artificial Sequence
  Synthetic oligonucleotide
gggtaactacaaggatcgtagagaggtgttgtcca

SEQ ID NO: 20655 - DNA, 36 bp, Artificial Sequence
  Synthetic oligonucleotide
gtgccagggcacagattgcgtttcaagtattgttga

SEQ ID NO: 20656 - DNA, 37 bp, Artificial Sequence
  Synthetic oligonucleotide
gagaagctcctgagggaatcagaattttccctagcga

SEQ ID NO: 20657 - DNA, 35 bp, Artificial Sequence
  Synthetic oligonucleotide
gttgcacgagatcaacgctgtatgaactactgggt

SEQ ID NO: 20658 - DNA, 36 bp, Artificial Sequence
  Synthetic oligonucleotide
gacgtgttataccttcagagtgctttcgaaacatta

SEQ ID NO: 20659 - DNA, 37 bp, Artificial Sequence
  Synthetic oligonucleotide
gccgctccccgctaaataagtccgggccatgcggtga

SEQ ID NO: 20660 - DNA, 37 bp, Artificial Sequence
  Synthetic oligonucleotide
tcgaacgtggataggttcatgagctgaacataacgga

SEQ ID NO: 20661 - DNA, 35 bp, Artificial Sequence
  Synthetic oligonucleotide
gacgcctacgtcaatgtaatgttgatctgatagaa

SEQ ID NO: 20662 - DNA, 35 bp, Artificial Sequence
  Synthetic oligonucleotide
gacgcgtcctcatgtacatgtaacgtaactaatag

SEQ ID NO: 20663 - DNA, 35 bp, Artificial Sequence
  Synthetic oligonucleotide
tgcagagtccgtgcatattcgagggtgccttcgct

SEQ ID NO: 20664 - DNA, 36 bp, Artificial Sequence
  Synthetic oligonucleotide
ttcagggcgccgtccggaaccacgagtagtatgtaa

SEQ ID NO: 20665 - DNA, 36 bp, Artificial Sequence
  Synthetic oligonucleotide
aatacggtcacctgtaagagtgcgtattctagctca

SEQ ID NO: 20666 - DNA, 36 bp, Artificial Sequence
  Synthetic oligonucleotide
atctcgggtgccttggtaagtagctcctaagcctaa

SEQ ID NO: 20667 - DNA, 38 bp, Artificial Sequence
  Synthetic oligonucleotide
agtgaggtgcagtcttgggctaaacgttgtgctattga

SEQ ID NO: 20668 - DNA, 36 bp, Artificial Sequence
  Synthetic oligonucleotide
gacattgggggccggagagtcttcaagtttacatca

SEQ ID NO: 20669 - DNA, 38 bp, Artificial Sequence
  Synthetic oligonucleotide
aattgccctcagccagcgagacagcattgcggacttga

SEQ ID NO: 20670 - DNA, 37 bp, Artificial Sequence
  Synthetic oligonucleotide
tcgaggatgcttgtggagtggtacagacgggagaaga

SEQ ID NO: 20671 - DNA, 35 bp, Artificial Sequence
  Synthetic oligonucleotide
gatcactgataaccggggcgaagagctgggcatcg

SEQ ID NO: 20672 - DNA, 37 bp, Artificial Sequence
  Synthetic oligonucleotide
atacctggtttgaggatacgaggtacagtcatgcaga

SEQ ID NO: 20673 - DNA, 35 bp, Artificial Sequence
  Synthetic oligonucleotide
ttagtgctctagtgaaaccaacatggtgggggtac

SEQ ID NO: 20674 - DNA, 37 bp, Artificial Sequence
  Synthetic oligonucleotide
atgtttgcggatactagatacggagacgggcttagga

SEQ ID NO: 20675 - DNA, 35 bp, Artificial Sequence
  Synthetic oligonucleotide
gactggacaagatacgttagttcgaatgaggctat

SEQ ID NO: 20676 - DNA, 36 bp, Artificial Sequence
  Synthetic oligonucleotide
tcacaacataaaagcacataagagctactgagcaaa

SEQ ID NO: 20677 - DNA, 37 bp, Artificial Sequence
  Synthetic oligonucleotide
gtagctatgctgggggaccatgtacgtgccttcggga

SEQ ID NO: 20678 - DNA, 35 bp, Artificial Sequence
  Synthetic oligonucleotide
cactcggacgtataggctatgcgggttgagctata

SEQ ID NO: 20679 - DNA, 36 bp, Artificial Sequence
  Synthetic oligonucleotide
gatcatgctgcggcgtgttatcgcatgatagttgga

SEQ ID NO: 20680 - DNA, 36 bp, Artificial Sequence
  Synthetic oligonucleotide
accgagtttgttccagaggaggagggctccttcgta

SEQ ID NO: 20681 - DNA, 37 bp, Artificial Sequence
  Synthetic oligonucleotide
ttgggcgaacagcatttggactttaggtagtcttaga

SEQ ID NO: 20682 - DNA, 36 bp, Artificial Sequence
  Synthetic oligonucleotide
gaacgtcaggacggcgctagtattctgtcagcttga

SEQ ID NO: 20683 - DNA, 35 bp, Artificial Sequence
  Synthetic oligonucleotide
ggggatcgcgcaagtaggagggcattataaaacga

SEQ ID NO: 20684 - DNA, 38 bp, Artificial Sequence
  Synthetic oligonucleotide
gtgtggtgcggcattagtcacgtcgttatccgtcgtga

SEQ ID NO: 20685 - DNA, 37 bp, Artificial Sequence
  Synthetic oligonucleotide
acccagtcgagctatctttggaacagggaagactaga

SEQ ID NO: 20686 - DNA, 37 bp, Artificial Sequence
  Synthetic oligonucleotide
atcgcataggtatcatgggagacagcagaacttttga

SEQ ID NO: 20687 - DNA, 35 bp, Artificial Sequence
  Synthetic oligonucleotide
gtcgcattcagtcctttagagaggtacaccatagt

SEQ ID NO: 20688 - DNA, 37 bp, Artificial Sequence
  Synthetic oligonucleotide
ggggaccggaaaaaaagggggtttagcgaccctgaga

SEQ ID NO: 20689 - DNA, 35 bp, Artificial Sequence
  Synthetic oligonucleotide
aatcaggatccagaacggaacatggatggagttga

SEQ ID NO: 20690 - DNA, 31 bp, Artificial Sequence
  Synthetic oligonucleotide
ggagatagacatcggttaacacagcggtgcg

SEQ ID NO: 20691 - DNA, 36 bp, Artificial Sequence
  Synthetic oligonucleotide
aacgagatgatgggacatgatgcgtggtgtgtcaca

SEQ ID NO: 20692 - DNA, 38 bp, Artificial Sequence
  Synthetic oligonucleotide
gccacccaggtaggcccgtagttggtcgtagtacttga

SEQ ID NO: 20693 - DNA, 38 bp, Artificial Sequence
  Synthetic oligonucleotide
gcacttaaggtgcgacgatgaatcattttagtcattga

SEQ ID NO: 20694 - DNA, 35 bp, Artificial Sequence
  Synthetic oligonucleotide
agtaagacggtggatctagatcctatgcattaatt

SEQ ID NO: 20695 - DNA, 36 bp, Artificial Sequence
  Synthetic oligonucleotide
ttccgtctggctgaggatggcggaatggtagtatta

SEQ ID NO: 20696 - DNA, 36 bp, Artificial Sequence
  Synthetic oligonucleotide
gggttgttactcaatgtgctcgtagtcccggcttca

SEQ ID NO: 20697 - DNA, 37 bp, Artificial Sequence
  Synthetic oligonucleotide
ggttgttcggactgatgttgtaagagactttgtgaga

SEQ ID NO: 20698 - DNA, 36 bp, Artificial Sequence
  Synthetic oligonucleotide
aatgcgttaaaggggtcggtgaagtttggaggtgta

SEQ ID NO: 20699 - DNA, 38 bp, Artificial Sequence
  Synthetic oligonucleotide
tgttatcatagggatcgatggttaagatcgagcgctga

SEQ ID NO: 20700 - DNA, 35 bp, Artificial Sequence
  Synthetic oligonucleotide
gtccccccgagatgagtatagctaagtcaactgct

SEQ ID NO: 20701 - DNA, 36 bp, Artificial Sequence
  Synthetic oligonucleotide
aagttcagtcaggccatccggtgctcccccgcctca

SEQ ID NO: 20702 - DNA, 37 bp, Artificial Sequence
  Synthetic oligonucleotide
gagctgaagtggtgtcttccgtgaccaacacagttga

SEQ ID NO: 20703 - DNA, 37 bp, Artificial Sequence
  Synthetic oligonucleotide
atttgtccgggcgaccgcagtcgggcttaattgtaga

SEQ ID NO: 20704 - DNA, 35 bp, Artificial Sequence
  Synthetic oligonucleotide
gaatcgtctaattctccaactgggcttactcaaag

SEQ ID NO: 20705 - DNA, 37 bp, Artificial Sequence
  Synthetic oligonucleotide
tgccgggtggtctggtaaaggcttcgtgaggtgatga

SEQ ID NO: 20706 - DNA, 37 bp, Artificial Sequence
  Synthetic oligonucleotide
ttcactacgtatgggccgccgatatcatcgcggggga

SEQ ID NO: 20707 - DNA, 37 bp, Artificial Sequence
  Synthetic oligonucleotide
gacatgaacaaagaggtgatatacttgtgccagtcga

SEQ ID NO: 20708 - DNA, 38 bp, Artificial Sequence
  Synthetic oligonucleotide
gacgtgcgggggttgaaagggagctacgtttaaggtga

SEQ ID NO: 20709 - DNA, 35 bp, Artificial Sequence
  Synthetic oligonucleotide
aatacaagtggtaggaagctgacgtaaggcatgca

SEQ ID NO: 20710 - DNA, 35 bp, Artificial Sequence
  Synthetic oligonucleotide
gtaaatcgtgcttgtatgcgcgacggttggtaaat

SEQ ID NO: 20711 - DNA, 35 bp, Artificial Sequence
  Synthetic oligonucleotide
ttgcccagtgttacactgtcatccgggttgtgaaa

SEQ ID NO: 20712 - DNA, 36 bp, Artificial Sequence
  Synthetic oligonucleotide
aggagtgcggtcaggtctgttacttgtatatcggaa

SEQ ID NO: 20713 - DNA, 35 bp, Artificial Sequence
  Synthetic oligonucleotide
gtcgaaacgatggctgcttggaagtccaggtctga

SEQ ID NO: 20714 - DNA, 35 bp, Artificial Sequence
  Synthetic oligonucleotide
ggagtcatgtcatctgtatactagtctacgtggct

SEQ ID NO: 20715 - DNA, 37 bp, Artificial Sequence
  Synthetic oligonucleotide
gaacattacgcttgctcagccgacataggactttcga

SEQ ID NO: 20716 - DNA, 35 bp, Artificial Sequence
  Synthetic oligonucleotide
gacgcggctactgatattcagaaattattcatggg

SEQ ID NO: 20717 - DNA, 35 bp, Artificial Sequence
  Synthetic oligonucleotide
gtgccgcgtgtcaacgcgatgcgtcaatactaccg

SEQ ID NO: 20718 - DNA, 38 bp, Artificial Sequence
  Synthetic oligonucleotide
gacgcaatgtccgatgcctagccgtcgttgatcgatga

SEQ ID NO: 20719 - DNA, 36 bp, Artificial Sequence
  Synthetic oligonucleotide
ttccaaagtgccgacgcgacgcgattggttaaggga

SEQ ID NO: 20720 - DNA, 36 bp, Artificial Sequence
  Synthetic oligonucleotide
acgcttagcggccgaataggacgggagaaagctaca

SEQ ID NO: 20721 - DNA, 37 bp, Artificial Sequence
  Synthetic oligonucleotide
aagcaaccgcggagcggcaaactgggacgtccacaga

SEQ ID NO: 20722 - DNA, 37 bp, Artificial Sequence
  Synthetic oligonucleotide
ggaactgccagatagctttggacgcgtggccacggga

SEQ ID NO: 20723 - DNA, 36 bp, Artificial Sequence
  Synthetic oligonucleotide
atcctgtgccggtacttgtgtagccgcgcccgccca

SEQ ID NO: 20724 - DNA, 37 bp, Artificial Sequence
  Synthetic oligonucleotide
gcccggtcgccgcccccccacatgcctgagctgcgga

SEQ ID NO: 20725 - DNA, 37 bp, Artificial Sequence
  Synthetic oligonucleotide
gactgtacgctgctgaacacgaggttagcctcgatga

SEQ ID NO: 20726 - DNA, 35 bp, Artificial Sequence
  Synthetic oligonucleotide
gagtcaatgtcacgggacgcaagttcagataccgt

SEQ ID NO: 20727 - DNA, 38 bp, Artificial Sequence
  Synthetic oligonucleotide
aagtgacaaaagggtggactgtaaggcgatgccattga

SEQ ID NO: 20728 - DNA, 37 bp, Artificial Sequence
  Synthetic oligonucleotide
accgaagcggagatccccccgtcccacctgtgcccga

SEQ ID NO: 20729 - DNA, 37 bp, Artificial Sequence
  Synthetic oligonucleotide
aggatcaaccccatttcgtggtaagctctaaagtcga

SEQ ID NO: 20730 - DNA, 38 bp, Artificial Sequence
  Synthetic oligonucleotide
gttggtaacctcaggtctgaacaggtcttgatatatga

SEQ ID NO: 20731 - DNA, 37 bp, Artificial Sequence
  Synthetic oligonucleotide
gagtaagactgaggcgcgataacagtttttccagtga

SEQ ID NO: 20732 - DNA, 36 bp, Artificial Sequence
  Synthetic oligonucleotide
agcaatcaactaggaagtcggccccagaaagatcca

SEQ ID NO: 20733 - DNA, 38 bp, Artificial Sequence
  Synthetic oligonucleotide
gttcgagggggagattacattagtgtagtcccttgtga

SEQ ID NO: 20734 - DNA, 35 bp, Artificial Sequence
  Synthetic oligonucleotide
tccgtcatacgatgtcggtgaaggtagtgaaacgt

SEQ ID NO: 20735 - DNA, 35 bp, Artificial Sequence
  Synthetic oligonucleotide
gcattcgccgcgtttatgtctcgttttgaccagat

SEQ ID NO: 20736 - DNA, 35 bp, Artificial Sequence
  Synthetic oligonucleotide
aacgtgcggggagtggtagcagtagttcctccgtg

SEQ ID NO: 20737 - DNA, 36 bp, Artificial Sequence
  Synthetic oligonucleotide
gattgtgtatcaccctgaatccatcttacgttgaga

SEQ ID NO: 20738 - DNA, 37 bp, Artificial Sequence
  Synthetic oligonucleotide
gtcagacggtttgggatttttaccttctgatcgtgga

SEQ ID NO: 20739 - DNA, 37 bp, Artificial Sequence
  Synthetic oligonucleotide
agagtacggtccagggacagtcagagtgtactcacga

SEQ ID NO: 20740 - DNA, 38 bp, Artificial Sequence
  Synthetic oligonucleotide
agggcggtaatcatcaacggagaccctctgagtaatga

SEQ ID NO: 20741 - DNA, 35 bp, Artificial Sequence
  Synthetic oligonucleotide
aggtggctcggctccgttatttgagagttgtacca

SEQ ID NO: 20742 - DNA, 36 bp, Artificial Sequence
  Synthetic oligonucleotide
acatgagccgaggttctccgtcatcctgggaattta

SEQ ID NO: 20743 - DNA, 36 bp, Artificial Sequence
  Synthetic oligonucleotide
acagctatcgaggttgggcttggtcagcccatttga

SEQ ID NO: 20744 - DNA, 38 bp, Artificial Sequence
  Synthetic oligonucleotide
tgaagctcccggcgtctcctgctgtgtcagaaccatga

SEQ ID NO: 20745 - DNA, 36 bp, Artificial Sequence
  Synthetic oligonucleotide
acaggtagggcaagatcagcttagagatgggcggaa

SEQ ID NO: 20746 - DNA, 35 bp, Artificial Sequence
  Synthetic oligonucleotide
tcgagcctagtgtcgcatctgaagtcgtggggcac

SEQ ID NO: 20747 - DNA, 35 bp, Artificial Sequence
  Synthetic oligonucleotide
aagtgacatgggggcatgtaccgagtaagtttatt

SEQ ID NO: 20748 - DNA, 38 bp, Artificial Sequence
  Synthetic oligonucleotide
cctcccgaagttggcatagctaagtgtcctttcaatga

SEQ ID NO: 20749 - DNA, 35 bp, Artificial Sequence; identical to SEQ ID NO: 8102
  Synthetic oligonucleotide

SEQ ID NO: 20750 - DNA, 35 bp, Artificial Sequence
  Synthetic oligonucleotide
gcttcacatgtgaatgttccgttgttctagtaaca

SEQ ID NO: 20751 - DNA, 37 bp, Artificial Sequence
  Synthetic oligonucleotide
tcgtaatgcctttgactccgtctccagtctctctaga

SEQ ID NO: 20752 - DNA, 35 bp, Artificial Sequence
  Synthetic oligonucleotide
actatgagcgtgaaggtggtatgattcaggaggtc

SEQ ID NO: 20753 - DNA, 37 bp, Artificial Sequence
  Synthetic oligonucleotide
actctgtatccagcgggcacacggaagtcgggatcga

SEQ ID NO: 20754 - DNA, 35 bp, Artificial Sequence
  Synthetic oligonucleotide
gctcgaaagatggaggacactacccttagcgcggg

SEQ ID NO: 20755 - DNA, 37 bp, Artificial Sequence
  Synthetic oligonucleotide
tgcgcgggctgaactggaacgcgcccgagatatcgga

SEQ ID NO: 20756 - DNA, 38 bp, Artificial Sequence
  Synthetic oligonucleotide
ggagaattacgtggtatagaaccgtagtggcttaatga

SEQ ID NO: 20757 - DNA, 38 bp, Artificial Sequence
  Synthetic oligonucleotide
aaaacgcgcccgttgagtatttcaaggatatactctga

SEQ ID NO: 20758 - DNA, 35 bp, Artificial Sequence
  Synthetic oligonucleotide
accccgatcgtgtcatggttgttgtactattcgcc

SEQ ID NO: 20759 - DNA, 36 bp, Artificial Sequence
  Synthetic oligonucleotide
gcatggacggatatcggaaaggggagccgacgtgaa

SEQ ID NO: 20760 - DNA, 37 bp, Artificial Sequence
  Synthetic oligonucleotide
ggatcgctctcggtacagggtccaaggtgcgtccgga

SEQ ID NO: 20761 - DNA, 35 bp, Artificial Sequence
  Synthetic oligonucleotide
ggtgcgctagagttgtctccccctgaacgattaag

SEQ ID NO: 20762 - DNA, 35 bp, Artificial Sequence
  Synthetic oligonucleotide
gtgggcgattgaagaaaataaaggacgggtagttc

SEQ ID NO: 20763 - DNA, 36 bp, Artificial Sequence
  Synthetic oligonucleotide
agtctttggggtcaaatgcttctaacgtggacgcta

SEQ ID NO: 20764 - DNA, 35 bp, Artificial Sequence
  Synthetic oligonucleotide
gtgaggacttatcaagcgctttaatggccggatgc

SEQ ID NO: 20765 - DNA, 38 bp, Artificial Sequence
  Synthetic oligonucleotide
tgtcgggtttgtgggggaagtagtcccgcggaagctga

SEQ ID NO: 20766 - DNA, 36 bp, Artificial Sequence
  Synthetic oligonucleotide
gctcaaatcgtgatgtaggtatattgtgatttacaa

SEQ ID NO: 20767 - DNA, 28 bp, Artificial Sequence
  Synthetic oligonucleotide
agggtggaagcacggttatgctatcccc

SEQ ID NO: 20768 - DNA, 35 bp, Artificial Sequence
  Synthetic oligonucleotide
tcatatagctgtagtgaccacttggcgtaatggat

SEQ ID NO: 20769 - DNA, 35 bp, Artificial Sequence
  Synthetic oligonucleotide
gatgactctgcttgtgcaccacttatcatatggac

SEQ ID NO: 20770 - DNA, 38 bp, Artificial Sequence
  Synthetic oligonucleotide
gggagggtcgcgggagtcatagagtccccaggacgtga

SEQ ID NO: 20771 - DNA, 37 bp, Artificial Sequence
  Synthetic oligonucleotide
gcatcatcaaagtgaaattaacaggttggtagtggga

SEQ ID NO: 20772 - DNA, 37 bp, Artificial Sequence
  Synthetic oligonucleotide
atgtcacggaagccaccccggttacgggtagaggaga

SEQ ID NO: 20773 - DNA, 37 bp, Artificial Sequence; identical to SEQ ID NO: 14727
  Synthetic oligonucleotide

SEQ ID NO: 20774 - DNA, 36 bp, Artificial Sequence
  Synthetic oligonucleotide
taacgagagtaattctcgcaggagggtcgggctcaa

SEQ ID NO: 20775 - DNA, 35 bp, Artificial Sequence
  Synthetic oligonucleotide
aaaacgagcctgaaaagccatagaaaattcttcta

SEQ ID NO: 20776 - DNA, 35 bp, Artificial Sequence
  Synthetic oligonucleotide
tccgttgaaaggagctgctagagggtgtacgaagt

SEQ ID NO: 20777 - DNA, 37 bp, Artificial Sequence
  Synthetic oligonucleotide
tgatagtaggaccaacgccgcctccaatcgagacaga

SEQ ID NO: 20778 - DNA, 36 bp, Artificial Sequence
  Synthetic oligonucleotide
gactatgcgatcagacgcctggtttcgagtatgcaa

SEQ ID NO: 20779 - DNA, 35 bp, Artificial Sequence
  Synthetic oligonucleotide
gccagttttatgcggagtgttgttcggagaggctt

SEQ ID NO: 20780 - DNA, 37 bp, Artificial Sequence
  Synthetic oligonucleotide
gtggccgcgccaccatacggataccggggtctataga

SEQ ID NO: 20781 - DNA, 36 bp, Artificial Sequence
  Synthetic oligonucleotide
acgcttgtcgcgccaatgcacactcaacttggtaga

SEQ ID NO: 20782 - DNA, 38 bp, Artificial Sequence
  Synthetic oligonucleotide
gatcaaagagtcaccagactagtagtatcctccggtga

SEQ ID NO: 20783 - DNA, 38 bp, Artificial Sequence
  Synthetic oligonucleotide
taggagattgcaggttactgagcaagctgggttaatga

SEQ ID NO: 20784 - DNA, 37 bp, Artificial Sequence
  Synthetic oligonucleotide
accgggccacatgcccgaagttaaatgatccgaggga

SEQ ID NO: 20785 - DNA, 36 bp, Artificial Sequence
  Synthetic oligonucleotide
tgttctggttgagtcaagcattaagatatcttgcta

SEQ ID NO: 20786 - DNA, 36 bp, Artificial Sequence
  Synthetic oligonucleotide
ggggcgtgcatcacaccaatgatccttcttttgaga

SEQ ID NO: 20787 - DNA, 37 bp, Artificial Sequence
  Synthetic oligonucleotide
ccgataactttggggtcaccaggtcattaaaagctga

SEQ ID NO: 20788 - DNA, 35 bp, Artificial Sequence
  Synthetic oligonucleotide
agagcactaatgattggtaacgccctttgtcgttg

SEQ ID NO: 20789 - DNA, 37 bp, Artificial Sequence
  Synthetic oligonucleotide
gttcattctctaagccgcccattgaatttcgcccgga

SEQ ID NO: 20790 - DNA, 35 bp, Artificial Sequence
  Synthetic oligonucleotide
agcaaggggtctgcatcagtagcaccatgcggagt

SEQ ID NO: 20791 - DNA, 35 bp, Artificial Sequence
  Synthetic oligonucleotide
ttctatcagcatgaatttaatccaattagggacgt

SEQ ID NO: 20792 - DNA, 37 bp, Artificial Sequence
  Synthetic oligonucleotide
gagtgtctcgaacataggggtcagaatgctatagcga

SEQ ID NO: 20793 - DNA, 36 bp, Artificial Sequence
  Synthetic oligonucleotide
tgctggagttaccgaggcagtcgactcttgtagcta

SEQ ID NO: 20794 - DNA, 36 bp, Artificial Sequence
  Synthetic oligonucleotide
ggttgcacgagggtaggagaagtcgttgtttcggta

SEQ ID NO: 20795 - DNA, 36 bp, Artificial Sequence
  Synthetic oligonucleotide
tttgcgaaatatgtgacttagaagcatacagtacca

SEQ ID NO: 20796 - DNA, 35 bp, Artificial Sequence
  Synthetic oligonucleotide
gtttgcgctttatgtttgctagtcaagcccctcaa

SEQ ID NO: 20797 - DNA, 38 bp, Artificial Sequence
  Synthetic oligonucleotide
acatgtacaaggtgtctatgcccagccttgattcttga

SEQ ID NO: 20798 - DNA, 36 bp, Artificial Sequence; identical to SEQ ID NO: 10279
  Synthetic oligonucleotide

SEQ ID NO: 20799 - DNA, 38 bp, Artificial Sequence
  Synthetic oligonucleotide
tttgacgtccgcttggttagggtgtaactgttgcgtga

SEQ ID NO: 20800 - DNA, 37 bp, Artificial Sequence
  Synthetic oligonucleotide
tgtgggtcctcgtgacgtaagctccctgcggcctaga

SEQ ID NO: 20801 - DNA, 38 bp, Artificial Sequence
  Synthetic oligonucleotide
tgggagtgtcgattttttatagtcttcgtcagagatga

SEQ ID NO: 20802 - DNA, 36 bp, Artificial Sequence
  Synthetic oligonucleotide
tacttagggtcctgtttaaggacgctactgcaaaca

SEQ ID NO: 20803 - DNA, 36 bp, Artificial Sequence
  Synthetic oligonucleotide
aagtaacatccgtcgcgatcctgtctgggacgttta

SEQ ID NO: 20804 - DNA, 36 bp, Artificial Sequence
  Synthetic oligonucleotide
gggggagttacggagagcttggtcaggcctctgtga

SEQ ID NO: 20805 - DNA, 35 bp, Artificial Sequence
  Synthetic oligonucleotide
taggattacgtctgtgaacggtgttcgttgaaagt

SEQ ID NO: 20806 - DNA, 38 bp, Artificial Sequence
  Synthetic oligonucleotide
tccttccgcacggatgtcacgccttacgtcactggtga

SEQ ID NO: 20807 - DNA, 38 bp, Artificial Sequence
  Synthetic oligonucleotide
gtgtgtccggtgggaggttcgtgtttctcaacgggtga

SEQ ID NO: 20808 - DNA, 38 bp, Artificial Sequence
  Synthetic oligonucleotide
acaggcctatctagtctctttgttagacatatacttga

SEQ ID NO: 20809 - DNA, 36 bp, Artificial Sequence
  Synthetic oligonucleotide
gctccagccggagctcacgataatgggggttggaaa

SEQ ID NO: 20810 - DNA, 36 bp, Artificial Sequence
  Synthetic oligonucleotide
tgaccatcactttgttcgcaaggcgttttcaacgta

SEQ ID NO: 20811 - DNA, 36 bp, Artificial Sequence
  Synthetic oligonucleotide
tcggggaggaaagagacacgtcgattcccccgttga

SEQ ID NO: 20812 - DNA, 35 bp, Artificial Sequence
  Synthetic oligonucleotide
gactaccgtcgtgtccgcaccacatcggaactatg

SEQ ID NO: 20813 - DNA, 36 bp, Artificial Sequence
  Synthetic oligonucleotide
ttaacggtaatgcactcctcagatcctcgttgccta

SEQ ID NO: 20814 - DNA, 38 bp, Artificial Sequence
  Synthetic oligonucleotide
accgcggttctcgactatacgggatggtcactatttga

SEQ ID NO: 20815 - DNA, 35 bp, Artificial Sequence
  Synthetic oligonucleotide
aagtgtcaagtagtttaaagaccagtaaggctcga

SEQ ID NO: 20816 - DNA, 35 bp, Artificial Sequence
  Synthetic oligonucleotide
gacgtaggtccaagatcagtaagtgggatcggtcg

SEQ ID NO: 20817 - DNA, 35 bp, Artificial Sequence; identical to SEQ ID NO: 14661
  Synthetic oligonucleotide

SEQ ID NO: 20818 - DNA, 35 bp, Artificial Sequence
  Synthetic oligonucleotide
gtgtattccgatctacacgctaagtgtaactccat

SEQ ID NO: 20819 - DNA, 36 bp, Artificial Sequence
  Synthetic oligonucleotide
gggataaggccgcgactcccgtctgcgctatatgtc

SEQ ID NO: 20820 - DNA, 38 bp, Artificial Sequence
  Synthetic oligonucleotide
gcgttccttagacagaatacctacgccctcccccgtga

SEQ ID NO: 20821 - DNA, 38 bp, Artificial Sequence; identical to SEQ ID NO: 13573
  Synthetic oligonucleotide

SEQ ID NO: 20822 - DNA, 36 bp, Artificial Sequence
  Synthetic oligonucleotide
aacagttgaaaaacggtggtgcttttcctcaggtca

SEQ ID NO: 20823 - DNA, 35 bp, Artificial Sequence
  Synthetic oligonucleotide
gaacgtacgggcaagtgtcaatagctcgcatttcc

SEQ ID NO: 20824 - DNA, 36 bp, Artificial Sequence
  Synthetic oligonucleotide
ttgacattgacaacgccggtagttgcgccaagcgga

SEQ ID NO: 20825 - DNA, 36 bp, Artificial Sequence
  Synthetic oligonucleotide
agcgatggaagtctttggggtttgtggcatatgtaa

SEQ ID NO: 20826 - DNA, 36 bp, Artificial Sequence
  Synthetic oligonucleotide
gacgttgggcttcagatatggtcaaacattacgtaa

SEQ ID NO: 20827 - DNA, 35 bp, Artificial Sequence
  Synthetic oligonucleotide
aggacggacaagtgatcgatcattcggaagcaaag

SEQ ID NO: 20828 - DNA, 35 bp, Artificial Sequence
  Synthetic oligonucleotide
atgtacgcattgctattcctttcgctcatgtttcc

SEQ ID NO: 20829 - DNA, 36 bp, Artificial Sequence
  Synthetic oligonucleotide
gggttgtttatttagtaggtctccgtaatgcgagca

SEQ ID NO: 20830 - DNA, 37 bp, Artificial Sequence
  Synthetic oligonucleotide
gctactctagatatcatgggactgggtggtagagtga

SEQ ID NO: 20831 - DNA, 35 bp, Artificial Sequence
  Synthetic oligonucleotide
gcttagggcaaaagttggccgtcaaaacttgtcag

SEQ ID NO: 20832 - DNA, 37 bp, Artificial Sequence
  Synthetic oligonucleotide
tcgatgtcagggtactttaacttcacatcttggatga

SEQ ID NO: 20833 - DNA, 35 bp, Artificial Sequence
  Synthetic oligonucleotide
tgaggcgtgactgcaactatacaatccacggaggc

SEQ ID NO: 20834 - DNA, 35 bp, Artificial Sequence
  Synthetic oligonucleotide
ttgtgtggtattccggtccaattgcgatctggggt

SEQ ID NO: 20835 - DNA, 35 bp, Artificial Sequence
  Synthetic oligonucleotide
ggaaggggaagaaaccgcaatgtgaccgtgactgg

SEQ ID NO: 20836 - DNA, 35 bp, Artificial Sequence
  Synthetic oligonucleotide
ggggaccgtggcgagtgcgctgaccaaccaggcgc

SEQ ID NO: 20837 - DNA, 35 bp, Artificial Sequence
  Synthetic oligonucleotide
acgccgaggacgttcgtacaaattggattgcttta

SEQ ID NO: 20838 - DNA, 35 bp, Artificial Sequence
  Synthetic oligonucleotide
gacggaccaacttgtacgattctgctcctcgctaa

SEQ ID NO: 20839 - DNA, 36 bp, Artificial Sequence
  Synthetic oligonucleotide
tgacattcccatgtatcactgtagatacgaaaggca

SEQ ID NO: 20840 - DNA, 37 bp, Artificial Sequence
  Synthetic oligonucleotide
tgacgcacgttaattattccagtcgtttctatcgtga

SEQ ID NO: 20841 - DNA, 35 bp, Artificial Sequence
  Synthetic oligonucleotide
ggcccaatttcacaggtggtcaagtgtctctgcaa

SEQ ID NO: 20842 - DNA, 36 bp, Artificial Sequence
  Synthetic oligonucleotide
tcaagggtgatttagtcagtctaggaggacgcctga

SEQ ID NO: 20843 - DNA, 36 bp, Artificial Sequence
  Synthetic oligonucleotide
tgaagacataggtacgtatagcggctaattccggaa

SEQ ID NO: 20844 - DNA, 35 bp, Artificial Sequence
  Synthetic oligonucleotide
tgaatatgttcagggtgcgagaggcccaagatatg

SEQ ID NO: 20845 - DNA, 36 bp, Artificial Sequence
  Synthetic oligonucleotide
gcttcatgtaaatacgcgtcgtgctcaatgccaaga

SEQ ID NO: 20846 - DNA, 36 bp, Artificial Sequence
  Synthetic oligonucleotide
gccgtcgcccttatagttacccttcgcggctggtga

SEQ ID NO: 20847 - DNA, 35 bp, Artificial Sequence
  Synthetic oligonucleotide
agaggacgacggaccgggacccatcaatgtgatat

SEQ ID NO: 20848 - DNA, 37 bp, Artificial Sequence
  Synthetic oligonucleotide
tgggtatggttcaggttatgttatcaattcgtaaaga

SEQ ID NO: 20849 - DNA, 35 bp, Artificial Sequence
  Synthetic oligonucleotide
tgatccactcaggtaacacttagaaataaaacgtc

SEQ ID NO: 20850 - DNA, 36 bp, Artificial Sequence
  Synthetic oligonucleotide
atgacaggggcatggctaggggtaaagtttagtcta

SEQ ID NO: 20851 - DNA, 35 bp, Artificial Sequence
  Synthetic oligonucleotide
gtaccggtgccacatggaacaaactctacataagg

SEQ ID NO: 20852 - DNA, 36 bp, Artificial Sequence
  Synthetic oligonucleotide
tgatggcacgcagtctcatgttagtacataggtaca

SEQ ID NO: 20853 - DNA, 37 bp, Artificial Sequence
  Synthetic oligonucleotide
gggagctaggattcagggttacgactagagctcagga

SEQ ID NO: 20854 - DNA, 36 bp, Artificial Sequence
  Synthetic oligonucleotide
aggacaacatgcaacggagcatttgggccatagcaa

SEQ ID NO: 20855 - DNA, 38 bp, Artificial Sequence
  Synthetic oligonucleotide
aaggtgtcaagggaggtcagtccgcaataaacgcgtga

SEQ ID NO: 20856 - DNA, 37 bp, Artificial Sequence
  Synthetic oligonucleotide
atagtgcggggatcagagtcatattgtttcaccgaga

SEQ ID NO: 20857 - DNA, 36 bp, Artificial Sequence
  Synthetic oligonucleotide
tcaattgccagaggtatatgagggaagcaatgaata

SEQ ID NO: 20858 - DNA, 35 bp, Artificial Sequence
  Synthetic oligonucleotide
atctggggcaagataagcaattagtagacatacgt

SEQ ID NO: 20859 - DNA, 36 bp, Artificial Sequence
  Synthetic oligonucleotide
tgttcatgcatttaagagatgcgttccgagggtaaa

SEQ ID NO: 20860 - DNA, 36 bp, Artificial Sequence
  Synthetic oligonucleotide
gggaaatcaaacagttggttgacaccgggtggtata

SEQ ID NO: 20861 - DNA, 36 bp, Artificial Sequence
  Synthetic oligonucleotide
gcttcatcgcctcagacttcctcttcacgtaggcca

SEQ ID NO: 20862 - DNA, 37 bp, Artificial Sequence
  Synthetic oligonucleotide
gtcaactttggaatcatagataggcatattgccatga

SEQ ID NO: 20863 - DNA, 36 bp, Artificial Sequence
  Synthetic oligonucleotide
gggtggtacgttagagtttatttggtcaaaggacta

SEQ ID NO: 20864 - DNA, 35 bp, Artificial Sequence
  Synthetic oligonucleotide
agaggggccaaaggggttgcttaaacgtctagctt

SEQ ID NO: 20865 - DNA, 38 bp, Artificial Sequence
  Synthetic oligonucleotide
gaaaacgtaaagggaggtattgtcgactgtgtctgtga

SEQ ID NO: 20866 - DNA, 35 bp, Artificial Sequence
  Synthetic oligonucleotide
gtaggaacatcgtacggcgtatgttacatcgatct

SEQ ID NO: 20867 - DNA, 37 bp, Artificial Sequence
  Synthetic oligonucleotide
tactttagtcctggtcatgaatagggaagattcggta

SEQ ID NO: 20868 - DNA, 36 bp, Artificial Sequence
  Synthetic oligonucleotide
gaagcgcagtattatttaagtggccccaggcaagta

SEQ ID NO: 20869 - DNA, 36 bp, Artificial Sequence
  Synthetic oligonucleotide
tatactctcaagtgtttcgactcagcgggcttgtaa

SEQ ID NO: 20870 - DNA, 36 bp, Artificial Sequence
  Synthetic oligonucleotide
aaaggagtaatttgtgtgttcatttccaaacgatga

SEQ ID NO: 20871 - DNA, 38 bp, Artificial Sequence
  Synthetic oligonucleotide
atgtcgcacagcctctgggggagacgaggccgaagtga

SEQ ID NO: 20872 - DNA, 38 bp, Artificial Sequence
  Synthetic oligonucleotide
gtggggttggtcgtgcgctttagggtccctttgggtga

SEQ ID NO: 20873 - DNA, 35 bp, Artificial Sequence
  Synthetic oligonucleotide
ggttcgtaagaaccaaatgtgcgacaggatctagt

SEQ ID NO: 20874 - DNA, 35 bp, Artificial Sequence
  Synthetic oligonucleotide
gttatagcggatttcgtaatgaacagccttcgtcg

SEQ ID NO: 20875 - DNA, 35 bp, Artificial Sequence
  Synthetic oligonucleotide
ttaggagtcggtgatagggaggctaaataaaatct

SEQ ID NO: 20876 - DNA, 38 bp, Artificial Sequence
  Synthetic oligonucleotide
gtactgatacgtataatggcccgagagatatatgctga

SEQ ID NO: 20877 - DNA, 35 bp, Artificial Sequence
  Synthetic oligonucleotide
gattgcactggtgccgaagtattcgcatactccgg

SEQ ID NO: 20878 - DNA, 38 bp, Artificial Sequence
  Synthetic oligonucleotide
tcccggtcgccactcgagatgcaatacggttgtcctga

SEQ ID NO: 20879 - DNA, 35 bp, Artificial Sequence
  Synthetic oligonucleotide
acccaaagccggtatctggggatttgtctccaagt

SEQ ID NO: 20880 - DNA, 36 bp, Artificial Sequence
  Synthetic oligonucleotide
tccgacggaggcaaaattgctgagatcattcctaaa

SEQ ID NO: 20881 - DNA, 37 bp, Artificial Sequence
  Synthetic oligonucleotide
ggttggcgagtaaaaactaagagttggcccggctgga

SEQ ID NO: 20882 - DNA, 36 bp, Artificial Sequence
  Synthetic oligonucleotide
agcgacgagagagtagaatggttgtccttacgtcca

SEQ ID NO: 20883 - DNA, 35 bp, Artificial Sequence
  Synthetic oligonucleotide
agttgtcaagcaccgttttgaaccagatgcgagtc

SEQ ID NO: 20884 - DNA, 37 bp, Artificial Sequence
  Synthetic oligonucleotide
tttgctgacgaggcgagaatgtgagtagctccaggga

SEQ ID NO: 20885 - DNA, 38 bp, Artificial Sequence
  Synthetic oligonucleotide
gtctgggttagatccgaatcaacatgagatgccagtga

SEQ ID NO: 20886 - DNA, 36 bp, Artificial Sequence
  Synthetic oligonucleotide
ttttgcggtcagggggggtgccctggacaaggtcga

SEQ ID NO: 20887 - DNA, 35 bp, Artificial Sequence
  Synthetic oligonucleotide
gagttgcggtgtgtcgtagaagtacatctatctaa

SEQ ID NO: 20888 - DNA, 36 bp, Artificial Sequence
  Synthetic oligonucleotide
aggtctgattatagagacacaatgagtgggatagta

SEQ ID NO: 20889 - DNA, 35 bp, Artificial Sequence
  Synthetic oligonucleotide
caaaacggtcagtggcgctatgataatacggcact

SEQ ID NO: 20890 - DNA, 35 bp, Artificial Sequence
  Synthetic oligonucleotide
tagcggagtcgaacggggtgagcttagaactcccg

SEQ ID NO: 20891 - DNA, 35 bp, Artificial Sequence
  Synthetic oligonucleotide
gcgcttgtcagtttaaatctgattcctggtccttc

SEQ ID NO: 20892 - DNA, 37 bp, Artificial Sequence
  Synthetic oligonucleotide
tcaggagtctccgtgttggttgttgaaacgcctaaga

SEQ ID NO: 20893 - DNA, 35 bp, Artificial Sequence
  Synthetic oligonucleotide
tcaggttcttctgccatggttgaacgggctctttg

SEQ ID NO: 20894 - DNA, 35 bp, Artificial Sequence
  Synthetic oligonucleotide
ttacgtctaacactgaggggagactgcctcgccgc

SEQ ID NO: 20895 - DNA, 36 bp, Artificial Sequence
  Synthetic oligonucleotide
ggatagccgcatggaaattctgttttaagtactaca

SEQ ID NO: 20896 - DNA, 36 bp, Artificial Sequence
  Synthetic oligonucleotide
aatgagcgcgcgatgggagtggcctagtgggactca

SEQ ID NO: 20897 - DNA, 35 bp, Artificial Sequence
  Synthetic oligonucleotide
tatgttaatagcgctgacgtatagcagaaggtaaa

SEQ ID NO: 20898 - DNA, 38 bp, Artificial Sequence
  Synthetic oligonucleotide
ggagaagtggacacttttagacccctccgcgtaagtga

SEQ ID NO: 20899 - DNA, 37 bp, Artificial Sequence
  Synthetic oligonucleotide
attagtcatcggtcgggaagtggtgaattccgcctga

SEQ ID NO: 20900 - DNA, 38 bp, Artificial Sequence
  Synthetic oligonucleotide
gcatcggcccgttgaaggatgatgcgccctgcctgtga

SEQ ID NO: 20901 - DNA, 36 bp, Artificial Sequence
  Synthetic oligonucleotide
gcccaacgcgctggagcggttaagtttcgggttgga

SEQ ID NO: 20902 - DNA, 37 bp, Artificial Sequence
  Synthetic oligonucleotide
ggagagagggcgagttcaatggtggtagccgggagga

SEQ ID NO: 20903 - DNA, 38 bp, Artificial Sequence
  Synthetic oligonucleotide
ggtgtttcggcggtacggtcgaagaacacggaccatga

SEQ ID NO: 20904 - DNA, 35 bp, Artificial Sequence
  Synthetic oligonucleotide
gtgatagatgtgattgcgtcgcgtatatgttcagt

SEQ ID NO: 20905 - DNA, 37 bp, Artificial Sequence; identical to SEQ ID NO: 15205
  Synthetic oligonucleotide

SEQ ID NO: 20906 - DNA, 36 bp, Artificial Sequence
  Synthetic oligonucleotide
gtcgagctaccctgtcgctacccaagtcaattggca

SEQ ID NO: 20907 - DNA, 35 bp, Artificial Sequence; identical to SEQ ID NO: 1477
  Synthetic oligonucleotide

SEQ ID NO: 20908 - DNA, 37 bp, Artificial Sequence
  Synthetic oligonucleotide
tccaccttgcgacccgaacactttaggaagtccttga

SEQ ID NO: 20909 - DNA, 38 bp, Artificial Sequence
  Synthetic oligonucleotide
ggtggggtaggttagcaccaactaggggcaaattctga

SEQ ID NO: 20910 - DNA, 38 bp, Artificial Sequence
  Synthetic oligonucleotide
tcgataacaccccccgtcgagtccgcgcaagcggctga

SEQ ID NO: 20911 - DNA, 35 bp, Artificial Sequence
  Synthetic oligonucleotide
ataccgacgagtagctgatcagcgcctggaacacc

SEQ ID NO: 20912 - DNA, 38 bp, Artificial Sequence
  Synthetic oligonucleotide
gtcataggaagtgcatcaggattgataagtacttatga

SEQ ID NO: 20913 - DNA, 38 bp, Artificial Sequence
  Synthetic oligonucleotide
aacactgtcgcgttgcatgaggaagtgccgtgaactga

SEQ ID NO: 20914 - DNA, 35 bp, Artificial Sequence
  Synthetic oligonucleotide
gcacgcgctgcaaaccgggttcacgtgtatattcg

SEQ ID NO: 20915 - DNA, 36 bp, Artificial Sequence
  Synthetic oligonucleotide
gaaaggggtccgtaacgaggggggtaagggtagcga

SEQ ID NO: 20916 - DNA, 36 bp, Artificial Sequence
  Synthetic oligonucleotide
gatctgcccgtactaaaatgtaggttcacgtctgga

SEQ ID NO: 20917 - DNA, 36 bp, Artificial Sequence
  Synthetic oligonucleotide
ttgcactatgctcggcaacaacgagcatttgaatga

SEQ ID NO: 20918 - DNA, 37 bp, Artificial Sequence
  Synthetic oligonucleotide
gaagacagccttgcgttcacttccccgccgcgcaaga

SEQ ID NO: 20919 - DNA, 36 bp, Artificial Sequence
  Synthetic oligonucleotide
gcactgcgtaggcggttaaatatagtctgagggcga

SEQ ID NO: 20920 - DNA, 37 bp, Artificial Sequence
  Synthetic oligonucleotide
aagcctagtgatgaatgtgccttgccctcgaagtaga

SEQ ID NO: 20921 - DNA, 36 bp, Artificial Sequence
  Synthetic oligonucleotide
tccagtaagtgaaaataaagtgttttgcgcacgtga

SEQ ID NO: 20922 - DNA, 35 bp, Artificial Sequence
  Synthetic oligonucleotide
tgctgctcggtcggctaggccgaagtgatttcggt

SEQ ID NO: 20923 - DNA, 36 bp, Artificial Sequence
  Synthetic oligonucleotide
agtatgagcagtttatgctagaaaagtattatcata

SEQ ID NO: 20924 - DNA, 35 bp, Artificial Sequence
  Synthetic oligonucleotide
ggacatctgagaacagtggacagtgtatggtatca

SEQ ID NO: 20925 - DNA, 36 bp, Artificial Sequence
  Synthetic oligonucleotide
accccaggcttagggagtaacttcatgtacgaacga

SEQ ID NO: 20926 - DNA, 37 bp, Artificial Sequence
  Synthetic oligonucleotide
tagggcaggggattcgagaagcgaccataacatatga

SEQ ID NO: 20927 - DNA, 35 bp, Artificial Sequence
  Synthetic oligonucleotide
tgtaatcaccgctgtctttgttcagaccgtatgag

SEQ ID NO: 20928 - DNA, 38 bp, Artificial Sequence
  Synthetic oligonucleotide
gcctcaacgcaaggaaggggcacgtggtcacttgttga

SEQ ID NO: 20929 - DNA, 38 bp, Artificial Sequence
  Synthetic oligonucleotide
agcactccgcggagggagttcggatgcggggaatatga

SEQ ID NO: 20930 - DNA, 35 bp, Artificial Sequence
  Synthetic oligonucleotide
gcggggaagatattgtacccgagtttaatgttcac

SEQ ID NO: 20931 - DNA, 36 bp, Artificial Sequence
  Synthetic oligonucleotide
ggtgtcgtgtggctcttcaatgtgtccatgatggca

SEQ ID NO: 20932 - DNA, 36 bp, Artificial Sequence
  Synthetic oligonucleotide
atcattgccggcaacagtgcatagggagactccgga

SEQ ID NO: 20933 - DNA, 37 bp, Artificial Sequence
  Synthetic oligonucleotide
gagaagacctaaatagttaggtgatacgagaaaccga

SEQ ID NO: 20934 - DNA, 37 bp, Artificial Sequence
  Synthetic oligonucleotide
aaggttagccagttattacgaaggaggggctcgtaga

SEQ ID NO: 20935 - DNA, 38 bp, Artificial Sequence
  Synthetic oligonucleotide
gggaaacgcatgccatcatgaggtataggagctgatga

SEQ ID NO: 20936 - DNA, 37 bp, Artificial Sequence
  Synthetic oligonucleotide
tagattcggctagatatgctggctcgggtaggctgga

SEQ ID NO: 20937 - DNA, 35 bp, Artificial Sequence
  Synthetic oligonucleotide
gaagtggctcgcccgctaaattggacgtgctgcca

SEQ ID NO: 20938 - DNA, 35 bp, Artificial Sequence
  Synthetic oligonucleotide
ataacgcttaagagtgtgtcctgtcgcacgttaca

SEQ ID NO: 20939 - DNA, 36 bp, Artificial Sequence
  Synthetic oligonucleotide
acagtcataggtggcatgacaggggtcataaagata

SEQ ID NO: 20940 - DNA, 35 bp, Artificial Sequence
  Synthetic oligonucleotide
gacgcccagatatttaatatgggcgcaatacaaca

SEQ ID NO: 20941 - DNA, 36 bp, Artificial Sequence
  Synthetic oligonucleotide
gacactccccccaagcctttaatccggtgagactca

SEQ ID NO: 20942 - DNA, 38 bp, Artificial Sequence
  Synthetic oligonucleotide
tgtatttggagagcgatctgagctgttttaatggctga

SEQ ID NO: 20943 - DNA, 37 bp, Artificial Sequence
  Synthetic oligonucleotide
gtgcgagtagccgatgtcagacgtagattatatttga

SEQ ID NO: 20944 - DNA, 37 bp, Artificial Sequence
  Synthetic oligonucleotide
tacagagttggctgtagcatgttatgtagttggatga

SEQ ID NO: 20945 - DNA, 35 bp, Artificial Sequence
  Synthetic oligonucleotide
atagcccccggttgctccagttaaggtcggtctgc

SEQ ID NO: 20946 - DNA, 38 bp, Artificial Sequence
  Synthetic oligonucleotide
tcaagcgtttttggtcctcgtagacagcttgtctctga

SEQ ID NO: 20947 - DNA, 38 bp, Artificial Sequence
  Synthetic oligonucleotide
gggacttgtgaggtgggttgctaaagtttctcccttga

SEQ ID NO: 20948 - DNA, 36 bp, Artificial Sequence
  Synthetic oligonucleotide
actcgacgtgtaaagggagtacgtactcaggactca

SEQ ID NO: 20949 - DNA, 35 bp, Artificial Sequence
  Synthetic oligonucleotide
ggtcacccgtccgggcgttgcgacaatcgggccat

SEQ ID NO: 20950 - DNA, 35 bp, Artificial Sequence
  Synthetic oligonucleotide
acacttgtagacgtatttctccgagtatgtccctc

SEQ ID NO: 20951 - DNA, 38 bp, Artificial Sequence; identical to SEQ ID NO: 14666
  Synthetic oligonucleotide

SEQ ID NO: 20952 - DNA, 38 bp, Artificial Sequence
  Synthetic oligonucleotide
gaatttcctctgcccccgcacgacggcctgcatgctga

SEQ ID NO: 20953 - DNA, 37 bp, Artificial Sequence
  Synthetic oligonucleotide
tctatgcgtagcggaaggggcactcgcagcataagga

SEQ ID NO: 20954 - DNA, 38 bp, Artificial Sequence
  Synthetic oligonucleotide
aactcagagagtgcaggttgccgatagcagacatctga

SEQ ID NO: 20955 - DNA, 37 bp, Artificial Sequence
  Synthetic oligonucleotide
taggcgggcgacacgtccggaaaggggtttctctcga

SEQ ID NO: 20956 - DNA, 35 bp, Artificial Sequence
  Synthetic oligonucleotide
gtggatccggtggtgttgggtacaactgactcgcg

SEQ ID NO: 20957 - DNA, 35 bp, Artificial Sequence
  Synthetic oligonucleotide
gtggcccaggtctgagatggaccctgacagagtca

SEQ ID NO: 20958 - DNA, 35 bp, Artificial Sequence
  Synthetic oligonucleotide
gtcaatccttactcggagttgggacacaagacgat

SEQ ID NO: 20959 - DNA, 38 bp, Artificial Sequence
  Synthetic oligonucleotide
tatgcgggacgcgtagaccatggatagttgccctctga

SEQ ID NO: 20960 - DNA, 37 bp, Artificial Sequence
  Synthetic oligonucleotide
caccatggagtgcactgttgttggggctggttaagga

SEQ ID NO: 20961 - DNA, 35 bp, Artificial Sequence
  Synthetic oligonucleotide
ttgacacaaatggggggagatagttgcccgtcgtg

SEQ ID NO: 20962 - DNA, 37 bp, Artificial Sequence
  Synthetic oligonucleotide
agtgggtaggaacagttgcggttttatgagcgttcga

SEQ ID NO: 20963 - DNA, 37 bp, Artificial Sequence
  Synthetic oligonucleotide
gctgttccttgaggtccaacaggattcacctgcggga

SEQ ID NO: 20964 - DNA, 36 bp, Artificial Sequence
  Synthetic oligonucleotide
atttgataggcggctgtaaaaaagcggattgtgcga

SEQ ID NO: 20965 - DNA, 37 bp, Artificial Sequence
  Synthetic oligonucleotide
aagcgagctacttaacagatagggtcctagagtaaga

SEQ ID NO: 20966 - DNA, 35 bp, Artificial Sequence; identical to SEQ ID NO: 15550
  Synthetic oligonucleotide

SEQ ID NO: 20967 - DNA, 36 bp, Artificial Sequence
  Synthetic oligonucleotide
agcggtgtggccgtggggatagtgaaaaagttgcga

SEQ ID NO: 20968 - DNA, 37 bp, Artificial Sequence
  Synthetic oligonucleotide
gtactccacagcgcttggtaaagtgccagtaccaaga

SEQ ID NO: 20969 - DNA, 38 bp, Artificial Sequence
  Synthetic oligonucleotide
tgacgaagagcaacgagagaagtcgggtgagaatgtga

SEQ ID NO: 20970 - DNA, 38 bp, Artificial Sequence
  Synthetic oligonucleotide
tgctacgggcacgacactacgatcatgggtatgactga

SEQ ID NO: 20971 - DNA, 36 bp, Artificial Sequence
  Synthetic oligonucleotide
tcctttgcgtagggcgcttcgccggtaagtgggcca

SEQ ID NO: 20972 - DNA, 38 bp, Artificial Sequence
  Synthetic oligonucleotide
gagttagtttactgggtttgcgatggacatctgtctga

SEQ ID NO: 20973 - DNA, 35 bp, Artificial Sequence
  Synthetic oligonucleotide
accgaactgggccctctgctcaatggtgtcgtgcg

SEQ ID NO: 20974 - DNA, 34 bp, Artificial Sequence
  Synthetic oligonucleotide
gatgtcttagtggatgtacgaattcggtcccacc

SEQ ID NO: 20975 - DNA, 38 bp, Artificial Sequence
  Synthetic oligonucleotide
gccggagtgatgccgggcagttcaattgaagacgatga

SEQ ID NO: 20976 - DNA, 37 bp, Artificial Sequence
  Synthetic oligonucleotide
tcccaccctcaacggtggtggagaagacttgggggga

SEQ ID NO: 20977 - DNA, 38 bp, Artificial Sequence
  Synthetic oligonucleotide
tgtggtgcaggcgctgtcgctaagatgtcgcttcgtga

SEQ ID NO: 20978 - DNA, 37 bp, Artificial Sequence
  Synthetic oligonucleotide
ggggaagttagtgagtttcctaaggcgcggtcacaga

SEQ ID NO: 20979 - DNA, 36 bp, Artificial Sequence
  Synthetic oligonucleotide
tccgacacctgacggtaaagtacagagggttttcga

SEQ ID NO: 20980 - DNA, 35 bp, Artificial Sequence
  Synthetic oligonucleotide
gatgccaaggcccttgctatagaagtacctgtatt

SEQ ID NO: 20981 - DNA, 37 bp, Artificial Sequence
  Synthetic oligonucleotide
gaaatcctgctacgtgcagtcaagcttgggtgcccga

SEQ ID NO: 20982 - DNA, 38 bp, Artificial Sequence
  Synthetic oligonucleotide
gcgattaattgtgtgcaggaacggtacgggggatttga

SEQ ID NO: 20983 - DNA, 35 bp, Artificial Sequence
  Synthetic oligonucleotide
tcacacgtctcgtggtgatctagcacttcaatatc

SEQ ID NO: 20984 - DNA, 35 bp, Artificial Sequence
  Synthetic oligonucleotide
gttggtcggagtgggattctgcggtcatgtccggc

SEQ ID NO: 20985 - DNA, 35 bp, Artificial Sequence
  Synthetic oligonucleotide
aatgatccgctgcatgttttgtgagtacagtcgta

SEQ ID NO: 20986 - DNA, 38 bp, Artificial Sequence
  Synthetic oligonucleotide
tatgggcggacgagggatagcgcggctcacgacaatga

SEQ ID NO: 20987 - DNA, 35 bp, Artificial Sequence; identical to SEQ ID NO: 10905
  Synthetic oligonucleotide

SEQ ID NO: 20988 - DNA, 33 bp, Artificial Sequence
  Synthetic oligonucleotide
tcctatgtttggcatacttcaggcactgccacc

SEQ ID NO: 20989 - DNA, 37 bp, Artificial Sequence
  Synthetic oligonucleotide
tctactataggcaaggcaagtgacagcaccaagggga

SEQ ID NO: 20990 - DNA, 38 bp, Artificial Sequence
  Synthetic oligonucleotide
cctgtgatagggagcccctcgttgagagactaatatga

SEQ ID NO: 20991 - DNA, 36 bp, Artificial Sequence
  Synthetic oligonucleotide
tttcgccgagggcgagctaaatttagtccttctgta

SEQ ID NO: 20992 - DNA, 35 bp, Artificial Sequence
  Synthetic oligonucleotide
gctgtggatgcagcatgtatatagtcttgtaatgt

SEQ ID NO: 20993 - DNA, 36 bp, Artificial Sequence
  Synthetic oligonucleotide
tcgatacacccgactgtttgtatgagcgcaattcca

SEQ ID NO: 20994 - DNA, 35 bp, Artificial Sequence
  Synthetic oligonucleotide
tgcgcggaccagtgctttcagccagcaatgttatc

SEQ ID NO: 20995 - DNA, 38 bp, Artificial Sequence
  Synthetic oligonucleotide
atacgaccaacgtcggggtacgcaaatagtgactttga

SEQ ID NO: 20996 - DNA, 37 bp, Artificial Sequence
  Synthetic oligonucleotide
aacgaatggccacgttatgatactgggctttttacga

SEQ ID NO: 20997 - DNA, 36 bp, Artificial Sequence
  Synthetic oligonucleotide
tcataaagccagaacacgctctgtagacgtgcttta

SEQ ID NO: 20998 - DNA, 32 bp, Artificial Sequence
  Synthetic oligonucleotide
gtgccatgacacgtgaatcatccaatagcttt

SEQ ID NO: 20999 - DNA, 38 bp, Artificial Sequence
  Synthetic oligonucleotide
tacatcggtgtcaaacggagtaaagagaggctgtctga

SEQ ID NO: 21000 - DNA, 36 bp, Artificial Sequence
  Synthetic oligonucleotide
tacgaacgctttcatacgggccgaggaaagttttca

SEQ ID NO: 21001 - DNA, 38 bp, Artificial Sequence
  Synthetic oligonucleotide
acacaggagtactgaccgggcaacagataaacatatga

SEQ ID NO: 21002 - DNA, 36 bp, Artificial Sequence
  Synthetic oligonucleotide
tgagttcgtctcatgctaaaccaccgcgcgtagcga

SEQ ID NO: 21003 - DNA, 35 bp, Artificial Sequence
  Synthetic oligonucleotide
atcagccatggggagtaacaggtgatacacgcgaa

SEQ ID NO: 21004 - DNA, 36 bp, Artificial Sequence
  Synthetic oligonucleotide
gtcatgctgccgctataacttgtcagtagattgata

SEQ ID NO: 21005 - DNA, 38 bp, Artificial Sequence
  Synthetic oligonucleotide
acgagagcttggttgcgggaacaatagaacctgtgtga

SEQ ID NO: 21006 - DNA, 37 bp, Artificial Sequence
  Synthetic oligonucleotide
ggtgagacgtattcaagctgtgatgtgctttacatga

SEQ ID NO: 21007 - DNA, 36 bp, Artificial Sequence
  Synthetic oligonucleotide
ttagctagtggaagtgcaatgcatgcgtatgataaa

SEQ ID NO: 21008 - DNA, 35 bp, Artificial Sequence
  Synthetic oligonucleotide
ttgctgggatgcggtacacacactacgatttctcg

SEQ ID NO: 21009 - DNA, 37 bp, Artificial Sequence
  Synthetic oligonucleotide
ttgggagccccttggttcgggcgtagggtaccacgga

SEQ ID NO: 21010 - DNA, 37 bp, Artificial Sequence
  Synthetic oligonucleotide
gcatgtactatctgtgtattatgtttcagcttatgga

SEQ ID NO: 21011 - DNA, 37 bp, Artificial Sequence
  Synthetic oligonucleotide
tcgacacgtccctcatgagctacgaaaggagcgcaga

SEQ ID NO: 21012 - DNA, 37 bp, Artificial Sequence
  Synthetic oligonucleotide
gtggtgccactaccacagactaacatcaccgcaaaga

SEQ ID NO: 21013 - DNA, 37 bp, Artificial Sequence
  Synthetic oligonucleotide
ttccatgagtgtcgtgcctatgactaattcctcgcga

SEQ ID NO: 21014 - DNA, 35 bp, Artificial Sequence
  Synthetic oligonucleotide
ggtacacattcggtcgcgaccaggattgttcaagg

SEQ ID NO: 21015 - DNA, 37 bp, Artificial Sequence
  Synthetic oligonucleotide
tagcgaggtctccgactgtaggagacaagttgtaaga

SEQ ID NO: 21016 - DNA, 37 bp, Artificial Sequence
  Synthetic oligonucleotide
tgataccgaaaacccggttaatcggcccctaagcaga

SEQ ID NO: 21017 - DNA, 37 bp, Artificial Sequence
  Synthetic oligonucleotide
ggaacgcgcaccactgtaggtattggttaggaagaga

SEQ ID NO: 21018 - DNA, 36 bp, Artificial Sequence
  Synthetic oligonucleotide
accacgattttgggcccagaatccgtcatgcattta

SEQ ID NO: 21019 - DNA, 35 bp, Artificial Sequence
  Synthetic oligonucleotide
gaatgctagacttccgtttacctagatctgttgct

SEQ ID NO: 21020 - DNA, 38 bp, Artificial Sequence
  Synthetic oligonucleotide
tggagacgatgctacggctgagtcatgttagaacatga

SEQ ID NO: 21021 - DNA, 38 bp, Artificial Sequence
  Synthetic oligonucleotide
gtgcgtggttatcatacagacttatctaacagtcctga

SEQ ID NO: 21022 - DNA, 38 bp, Artificial Sequence
  Synthetic oligonucleotide
gatccgacggaatgccggcgactgatccccattcttga

SEQ ID NO: 21023 - DNA, 35 bp, Artificial Sequence
  Synthetic oligonucleotide
gcccgactgcaatcttctttgagagttccttgttt

SEQ ID NO: 21024 - DNA, 37 bp, Artificial Sequence
  Synthetic oligonucleotide
gttttcaccggggagcgatggctcaattttccataga

SEQ ID NO: 21025 - DNA, 36 bp, Artificial Sequence
  Synthetic oligonucleotide
gctagttggcagaattcactacgtcaacgaggacta

SEQ ID NO: 21026 - DNA, 38 bp, Artificial Sequence
  Synthetic oligonucleotide
gcgtggatcgtataggccgtgaatgtacttgcccttga

SEQ ID NO: 21027 - DNA, 36 bp, Artificial Sequence
  Synthetic oligonucleotide
tacaaggggccatccgggcggtgataggttccgtga

SEQ ID NO: 21028 - DNA, 38 bp, Artificial Sequence
  Synthetic oligonucleotide
gctgttcgggggtgcatcaagagtggccccatgagtga

SEQ ID NO: 21029 - DNA, 37 bp, Artificial Sequence
  Synthetic oligonucleotide
gcaaacgaaacagaatatgtgatggggacgatgatga

SEQ ID NO: 21030 - DNA, 36 bp, Artificial Sequence
  Synthetic oligonucleotide
tacaactttgtcgattggtacgctttgcatggcgta

SEQ ID NO: 21031 - DNA, 38 bp, Artificial Sequence
  Synthetic oligonucleotide
tgtgctatccttgtagaaattgcagacaggtcatttga

SEQ ID NO: 21032 - DNA, 36 bp, Artificial Sequence
  Synthetic oligonucleotide
tctcagtcggggtctgcacttagttacattctggta

SEQ ID NO: 21033 - DNA, 36 bp, Artificial Sequence
  Synthetic oligonucleotide
tatccggtggggaacgatcgtacagaactcatcgga

SEQ ID NO: 21034 - DNA, 35 bp, Artificial Sequence
  Synthetic oligonucleotide
gtccaccccccgcgaccgttgtacaacattcaatg

SEQ ID NO: 21035 - DNA, 35 bp, Artificial Sequence
  Synthetic oligonucleotide
gaccgcgccagttctggatcgccgagtattcggaa

SEQ ID NO: 21036 - DNA, 35 bp, Artificial Sequence
  Synthetic oligonucleotide
agttccaaagcagtgaatttgggcaccttaagcca

SEQ ID NO: 21037 - DNA, 37 bp, Artificial Sequence
  Synthetic oligonucleotide
ttcgggacagtcaactccttttgccttcattcgatga

SEQ ID NO: 21038 - DNA, 36 bp, Artificial Sequence
  Synthetic oligonucleotide
tccctgctgtgagcggtgtgaactccataacagtga

SEQ ID NO: 21039 - DNA, 36 bp, Artificial Sequence
  Synthetic oligonucleotide
gcctacgggggatgtgcccttcgatttaagcatata

SEQ ID NO: 21040 - DNA, 36 bp, Artificial Sequence
  Synthetic oligonucleotide
aacgtgccctcgtttatggtgttaatctggtgttta

SEQ ID NO: 21041 - DNA, 35 bp, Artificial Sequence
  Synthetic oligonucleotide
aagtatcgacccggtggtctggaacctgagacttt

SEQ ID NO: 21042 - DNA, 36 bp, Artificial Sequence
  Synthetic oligonucleotide
aacgcattgcttagcgatttgcgacgtaaagcttaa

SEQ ID NO: 21043 - DNA, 38 bp, Artificial Sequence
  Synthetic oligonucleotide
atctctggtcgcattctgtgattaactgtcgaccatga

SEQ ID NO: 21044 - DNA, 36 bp, Artificial Sequence
  Synthetic oligonucleotide
gagtggcccaggttgtttagagtaggtagggtggaa

SEQ ID NO: 21045 - DNA, 38 bp, Artificial Sequence
  Synthetic oligonucleotide
ccccccgcgctaatctccctgtcatgcaaatttgttga

SEQ ID NO: 21046 - DNA, 35 bp, Artificial Sequence
  Synthetic oligonucleotide
tttgagaaagctttgcggtttttgacgtagaagct

SEQ ID NO: 21047 - DNA, 38 bp, Artificial Sequence
  Synthetic oligonucleotide
accatcgcattttgggggttttagctttctggtactga

SEQ ID NO: 21048 - DNA, 36 bp, Artificial Sequence
  Synthetic oligonucleotide
agtgtctgggaaagattgttatctggggtatcccga

SEQ ID NO: 21049 - DNA, 35 bp, Artificial Sequence
  Synthetic oligonucleotide
gacgacacctctctcaggagctgatccgccgaggt

SEQ ID NO: 21050 - DNA, 36 bp, Artificial Sequence
  Synthetic oligonucleotide
gacttgggggtcagcttgggggatggacgatcagta

SEQ ID NO: 21051 - DNA, 35 bp, Artificial Sequence
  Synthetic oligonucleotide
tacgattattcgttcaggtaggtgtagttttcatg

SEQ ID NO: 21052 - DNA, 36 bp, Artificial Sequence
  Synthetic oligonucleotide
gatcagattagggttgccggcgctcctaagttgaga

SEQ ID NO: 21053 - DNA, 35 bp, Artificial Sequence
  Synthetic oligonucleotide
catgcctggatgatgagtatttctactatgtgacg

SEQ ID NO: 21054 - DNA, 35 bp, Artificial Sequence
  Synthetic oligonucleotide
accgagctgaaacataggtaggatgtgacgtgggg

SEQ ID NO: 21055 - DNA, 36 bp, Artificial Sequence
  Synthetic oligonucleotide
gttgcgaggtcaaggcccctgtataacccccagtca

SEQ ID NO: 21056 - DNA, 36 bp, Artificial Sequence
  Synthetic oligonucleotide
atgcacagagtttggatatatacaggctgtacaaaa

SEQ ID NO: 21057 - DNA, 38 bp, Artificial Sequence
  Synthetic oligonucleotide
tgtgttgtctagcatcggtcggaggcaaagccgtgtga

SEQ ID NO: 21058 - DNA, 35 bp, Artificial Sequence
  Synthetic oligonucleotide
actcatcagttgtctagctcactctgctagttcca

SEQ ID NO: 21059 - DNA, 38 bp, Artificial Sequence
  Synthetic oligonucleotide
ccgttagccgcccccccttaaacggaatgaacgtctga

SEQ ID NO: 21060 - DNA, 35 bp, Artificial Sequence
  Synthetic oligonucleotide
agttcgcactcccccatcgtcctgcaacgagacaa

SEQ ID NO: 21061 - DNA, 38 bp, Artificial Sequence
  Synthetic oligonucleotide
actgggtgtctcgtgtgtattgtacgtgcgtgtgctga

SEQ ID NO: 21062 - DNA, 38 bp, Artificial Sequence
  Synthetic oligonucleotide
gcacatagggcgggttccttggtgacgagacgcaatga

SEQ ID NO: 21063 - DNA, 35 bp, Artificial Sequence
  Synthetic oligonucleotide
gttaaaaagcggtgaaagtaaaaaggggtgctccc

SEQ ID NO: 21064 - DNA, 36 bp, Artificial Sequence
  Synthetic oligonucleotide
agacaacgggctctctgcggaacagctataaggcta

SEQ ID NO: 21065 - DNA, 36 bp, Artificial Sequence
  Synthetic oligonucleotide
tcaggcttggtgaggcgttacggctattaagcgtaa

SEQ ID NO: 21066 - DNA, 36 bp, Artificial Sequence
  Synthetic oligonucleotide
aggacatggcatttgatttcttcttttgattctgaa

SEQ ID NO: 21067 - DNA, 35 bp, Artificial Sequence
  Synthetic oligonucleotide
gagtaggaacacgcgtgctgagagcaccggagatt

SEQ ID NO: 21068 - DNA, 37 bp, Artificial Sequence
  Synthetic oligonucleotide
tcatgcggtccctgtctataacgtgactagtatgtga

SEQ ID NO: 21069 - DNA, 36 bp, Artificial Sequence
  Synthetic oligonucleotide
acgggggttccgaggacgaagacgggctttagggga

SEQ ID NO: 21070 - DNA, 35 bp, Artificial Sequence
  Synthetic oligonucleotide
ttaggagcatgcaggtatagacgggctttggggaa

SEQ ID NO: 21071 - DNA, 37 bp, Artificial Sequence
  Synthetic oligonucleotide
gagaaggcaacgtgttgcaggaaccagaccggagcga

SEQ ID NO: 21072 - DNA, 35 bp, Artificial Sequence
  Synthetic oligonucleotide
gtcaaactaatccgttcgtaagtttaacggcgaca

SEQ ID NO: 21073 - DNA, 36 bp, Artificial Sequence
  Synthetic oligonucleotide
tgatttgagtgcacagtcgtgagtccgatagattca

SEQ ID NO: 21074 - DNA, 35 bp, Artificial Sequence
  Synthetic oligonucleotide
gcctgatcgtctcctagatttggagctgcgggacg

SEQ ID NO: 21075 - DNA, 36 bp, Artificial Sequence
  Synthetic oligonucleotide
ggagtgcggaggtaattgaatcacgctcttacgcga

SEQ ID NO: 21076 - DNA, 35 bp, Artificial Sequence
  Synthetic oligonucleotide
ggatgtcatgttctatgttttggtgtgtggctcgc

SEQ ID NO: 21077 - DNA, 35 bp, Artificial Sequence
  Synthetic oligonucleotide
gtcgaaccccgatgtgtgattacggggtgtaaggc

SEQ ID NO: 21078 - DNA, 38 bp, Artificial Sequence
  Synthetic oligonucleotide
tggtatcggaggaccatgcgaatgcggatcagtggtga

SEQ ID NO: 21079 - DNA, 37 bp, Artificial Sequence
  Synthetic oligonucleotide
aatcattacagatcgcagttgagacagtcgttttgga

SEQ ID NO: 21080 - DNA, 35 bp, Artificial Sequence
  Synthetic oligonucleotide
aatcggccctcagtaaattcccgacgtatcatcgt

SEQ ID NO: 21081 - DNA, 34 bp, Artificial Sequence
  Synthetic oligonucleotide
gagatatgcggatagtcatgggacgtgggctctt

SEQ ID NO: 21082 - DNA, 38 bp, Artificial Sequence
  Synthetic oligonucleotide
tacggggagctcctagtgggtgcctcctcgatacatga

SEQ ID NO: 21083 - DNA, 38 bp, Artificial Sequence
  Synthetic oligonucleotide
actccaaacgggtggatcgtatgtgtgttgcggactga

SEQ ID NO: 21084 - DNA, 35 bp, Artificial Sequence
  Synthetic oligonucleotide
tcgtaggatgcctcttatgctcaagttctgccgtt

SEQ ID NO: 21085 - DNA, 35 bp, Artificial Sequence
  Synthetic oligonucleotide
gcgaccacatgtcgtggaattcagagcaaatatcg

SEQ ID NO: 21086 - DNA, 35 bp, Artificial Sequence
  Synthetic oligonucleotide
gactcatcggggcaaaccgatgccgtgaatgggac

SEQ ID NO: 21087 - DNA, 35 bp, Artificial Sequence
  Synthetic oligonucleotide
gtaggctaacacaatgacaatattacagaacgtaa

SEQ ID NO: 21088 - DNA, 35 bp, Artificial Sequence
  Synthetic oligonucleotide
tgtgcccgtagggttgtccgaatatacgaccttgc

SEQ ID NO: 21089 - DNA, 35 bp, Artificial Sequence
  Synthetic oligonucleotide
ttgaccttcctctcacacaagtcgacatgtatagg

SEQ ID NO: 21090 - DNA, 37 bp, Artificial Sequence
  Synthetic oligonucleotide
attcgtcagtggttcctcgacgttcagtggagtatga

SEQ ID NO: 21091 - DNA, 35 bp, Artificial Sequence
  Synthetic oligonucleotide
gtcaacggcgtccggttagacatatttggggttga

SEQ ID NO: 21092 - DNA, 35 bp, Artificial Sequence
  Synthetic oligonucleotide
tgactggttaaacggggcactcccaattgctagtc

SEQ ID NO: 21093 - DNA, 36 bp, Artificial Sequence
  Synthetic oligonucleotide
aaatcgccgtctaaagggtcctggcaagtatctgga

SEQ ID NO: 21094 - DNA, 35 bp, Artificial Sequence
  Synthetic oligonucleotide
ggattcacgagccacgacgcctgcgcatttggaac

SEQ ID NO: 21095 - DNA, 38 bp, Artificial Sequence
  Synthetic oligonucleotide
gcaaataaaagggagtcggacaggtagagaagacttga

SEQ ID NO: 21096 - DNA, 36 bp, Artificial Sequence
  Synthetic oligonucleotide
tagcatcacaggactggtgccgtatgctatgtggga

SEQ ID NO: 21097 - DNA, 37 bp, Artificial Sequence
  Synthetic oligonucleotide
gccgcacgctaccctccgtcgtccgcacgtactgaga

SEQ ID NO: 21098 - DNA, 35 bp, Artificial Sequence
  Synthetic oligonucleotide
gcgaggggctgcagtataccgtccacactgagatt

SEQ ID NO: 21099 - DNA, 35 bp, Artificial Sequence
  Synthetic oligonucleotide
attcccacagacatcagtatccggacctacttgct

SEQ ID NO: 21100 - DNA, 35 bp, Artificial Sequence
  Synthetic oligonucleotide
tcgttactggttggggcattgcttggcgacttcct

SEQ ID NO: 21101 - DNA, 36 bp, Artificial Sequence
  Synthetic oligonucleotide
gggtcgtacctgttattattcggtctagttatggaa

SEQ ID NO: 21102 - DNA, 35 bp, Artificial Sequence
  Synthetic oligonucleotide
gaccttcttaggttggctaaaaagtgcatctaagg

SEQ ID NO: 21103 - DNA, 36 bp, Artificial Sequence
  Synthetic oligonucleotide
gcaggaccatcatgcttagcaattggaacttcctca

SEQ ID NO: 21104 - DNA, 38 bp, Artificial Sequence
  Synthetic oligonucleotide
gaagctagtagatacgggcattttataagggcccctga

SEQ ID NO: 21105 - DNA, 36 bp, Artificial Sequence
  Synthetic oligonucleotide
tatcaaacccccggtgggcgttaatggtactgtcta

SEQ ID NO: 21106 - DNA, 35 bp, Artificial Sequence
  Synthetic oligonucleotide
agttacagagcgttaaccgttagggtaggttcgga

SEQ ID NO: 21107 - DNA, 36 bp, Artificial Sequence
  Synthetic oligonucleotide
gccatcggcctgagcagagctcgacccggtatatga

SEQ ID NO: 21108 - DNA, 38 bp, Artificial Sequence
  Synthetic oligonucleotide
attgtctcatcgccctccggatatcatccacgtgctga

SEQ ID NO: 21109 - DNA, 36 bp, Artificial Sequence
  Synthetic oligonucleotide
tgagtggggttgcaggacgcatttgaagtcattgga

SEQ ID NO: 21110 - DNA, 36 bp, Artificial Sequence
  Synthetic oligonucleotide
catgcgagtctcaggggtgttaacgggggaatttga

SEQ ID NO: 21111 - DNA, 37 bp, Artificial Sequence
  Synthetic oligonucleotide
tgggataaatgggtagagttacagtcactttcagtga

SEQ ID NO: 21112 - DNA, 35 bp, Artificial Sequence
  Synthetic oligonucleotide
ggtggaaccacacgcgttcgaggcatgtaagaagc

SEQ ID NO: 21113 - DNA, 36 bp, Artificial Sequence
  Synthetic oligonucleotide
atgggagtagccataggagacgtttaagtacgggta

SEQ ID NO: 21114 - DNA, 35 bp, Artificial Sequence
  Synthetic oligonucleotide
agagtttgaagcgccgcgcactatcgtttaacgtg

SEQ ID NO: 21115 - DNA, 37 bp, Artificial Sequence
  Synthetic oligonucleotide
actcacgggctagactcgagacacggtcccctgcgga

SEQ ID NO: 21116 - DNA, 36 bp, Artificial Sequence
  Synthetic oligonucleotide
gtgcctagagttcggtgatactgggggttagagcaa

SEQ ID NO: 21117 - DNA, 36 bp, Artificial Sequence
  Synthetic oligonucleotide
atagcgtgcttgcggtgcatatattgcaattactaa

SEQ ID NO: 21118 - DNA, 38 bp, Artificial Sequence
  Synthetic oligonucleotide
taccagtaaatgggtggaatgtctagcgtgttcgttga

SEQ ID NO: 21119 - DNA, 37 bp, Artificial Sequence
  Synthetic oligonucleotide
gaagagcatgaggagtaggcattagtgcatttctaga

SEQ ID NO: 21120 - DNA, 35 bp, Artificial Sequence
  Synthetic oligonucleotide
aacgtaggggtaacaagcctatccgcgttttcgtg

SEQ ID NO: 21121 - DNA, 35 bp, Artificial Sequence
  Synthetic oligonucleotide
atgactggacatacctaaggttgcgcgtgagtccg

SEQ ID NO: 21122 - DNA, 37 bp, Artificial Sequence
  Synthetic oligonucleotide
gctggtacacatgctagccgcccccctcggaatagga

SEQ ID NO: 21123 - DNA, 35 bp, Artificial Sequence
  Synthetic oligonucleotide
agttacataggagacccggctccaatctaactgct

SEQ ID NO: 21124 - DNA, 37 bp, Artificial Sequence
  Synthetic oligonucleotide
gtgccgtgatgagtgccggagtattacctgagcagga

SEQ ID NO: 21125 - DNA, 38 bp, Artificial Sequence
  Synthetic oligonucleotide
taatggagaaaccacagattgcactgggcatgccctga

SEQ ID NO: 21126 - DNA, 37 bp, Artificial Sequence
  Synthetic oligonucleotide
ttatcggcctcctctggtacataaggtactgtgacga

SEQ ID NO: 21127 - DNA, 37 bp, Artificial Sequence
  Synthetic oligonucleotide
gctggttgcgcaaccttgctcttcataaaacaggcga

SEQ ID NO: 21128 - DNA, 38 bp, Artificial Sequence
  Synthetic oligonucleotide
atcatcaatgttgcgcctagcaaggactgaggtataga

SEQ ID NO: 21129 - DNA, 38 bp, Artificial Sequence
  Synthetic oligonucleotide
gatgcgacgcacaatgaatgcgggtcgttacaatctga

SEQ ID NO: 21130 - DNA, 35 bp, Artificial Sequence
  Synthetic oligonucleotide
gatccacacaaggatgagatatcttcgctctagga

SEQ ID NO: 21131 - DNA, 38 bp, Artificial Sequence
  Synthetic oligonucleotide
accaacccagaggagaagatgaatgtgaccctttgtga

SEQ ID NO: 21132 - DNA, 37 bp, Artificial Sequence
  Synthetic oligonucleotide
agctgtagggtgcatgacagtagctcgagctagggga

SEQ ID NO: 21133 - DNA, 36 bp, Artificial Sequence
  Synthetic oligonucleotide
tggttcccgcaaatcttatccagagtatcttctgaa

SEQ ID NO: 21134 - DNA, 37 bp, Artificial Sequence
  Synthetic oligonucleotide
ggatgtaagtcagggattgtgtggaacgagtcagaga

SEQ ID NO: 21135 - DNA, 37 bp, Artificial Sequence
  Synthetic oligonucleotide
gctgtgcgaatacgatacctagacactcccccccaga

SEQ ID NO: 21136 - DNA, 38 bp, Artificial Sequence
  Synthetic oligonucleotide
taaattgcaaacgggagtatagtcggaagtgatcttga

SEQ ID NO: 21137 - DNA, 38 bp, Artificial Sequence
  Synthetic oligonucleotide
ggacgggaacctctttgatgcctgtgcaaacgagatga

SEQ ID NO: 21138 - DNA, 37 bp, Artificial Sequence
  Synthetic oligonucleotide
aaaacgagctgccagacgaagggtcccctgctatgga

SEQ ID NO: 21139 - DNA, 36 bp, Artificial Sequence
  Synthetic oligonucleotide
gtcgaacagaggatggactctggattatgacgctca

SEQ ID NO: 21140 - DNA, 35 bp, Artificial Sequence
  Synthetic oligonucleotide
acgtaagactcaacggttcgaagacgggatggact

SEQ ID NO: 21141 - DNA, 35 bp, Artificial Sequence
  Synthetic oligonucleotide
tgggattgagaatccgtccctttctcgcggtccga

SEQ ID NO: 21142 - DNA, 37 bp, Artificial Sequence
  Synthetic oligonucleotide
tgcgtgtatccccccgcctcgcaatctgatgtctgga

SEQ ID NO: 21143 - DNA, 36 bp, Artificial Sequence
  Synthetic oligonucleotide
ttccgcgtagacccccccgtgaaggtcatggtcata

SEQ ID NO: 21144 - DNA, 36 bp, Artificial Sequence
  Synthetic oligonucleotide
tactcatgattgaggtgtatcccggccgtgaataaa

SEQ ID NO: 21145 - DNA, 37 bp, Artificial Sequence
  Synthetic oligonucleotide
ggtaatgggaagaacatagatcgagtagggttcccga

SEQ ID NO: 21146 - DNA, 35 bp, Artificial Sequence
  Synthetic oligonucleotide
acccctcagcctgacgtacgggacagttactttac

SEQ ID NO: 21147 - DNA, 35 bp, Artificial Sequence
  Synthetic oligonucleotide
tcctccatgcctaactaataagactttagggttca

SEQ ID NO: 21148 - DNA, 36 bp, Artificial Sequence
  Synthetic oligonucleotide
ggacgaccggtatcgaaaagtgctgggcccgcgtaa

SEQ ID NO: 21149 - DNA, 35 bp, Artificial Sequence
  Synthetic oligonucleotide
gggggtgtgtcgggggcatccatggcttaattaca

SEQ ID NO: 21150 - DNA, 38 bp, Artificial Sequence
  Synthetic oligonucleotide
tgcgttgagaggacggaagtaccacctcccccccgtga

SEQ ID NO: 21151 - DNA, 37 bp, Artificial Sequence
  Synthetic oligonucleotide
gttggatgaccgtcgcattcatggtgctatacgtgga

SEQ ID NO: 21152 - DNA, 35 bp, Artificial Sequence
  Synthetic oligonucleotide
tatctgccacagcaaaccacctggatctgctcaag

SEQ ID NO: 21153 - DNA, 37 bp, Artificial Sequence
  Synthetic oligonucleotide
gattaagggtggctactcatctgttctgtctcatcga

SEQ ID NO: 21154 - DNA, 35 bp, Artificial Sequence
  Synthetic oligonucleotide
gatattggaaatggctagaataggtctctcgtagg

SEQ ID NO: 21155 - DNA, 36 bp, Artificial Sequence
  Synthetic oligonucleotide
tgcgatttctggggtgttagttcgcatctaatgata

SEQ ID NO: 21156 - DNA, 35 bp, Artificial Sequence
  Synthetic oligonucleotide
acatcccctcccgcccgtggacgccttgctgtctc

SEQ ID NO: 21157 - DNA, 35 bp, Artificial Sequence
  Synthetic oligonucleotide
gttatcggtgaggtaaaaacgttaaagacgtgtgc

SEQ ID NO: 21158 - DNA, 38 bp, Artificial Sequence
  Synthetic oligonucleotide
gtcgcattgacgaatgctagtatgtagacgagaggtga

SEQ ID NO: 21159 - DNA, 36 bp, Artificial Sequence
  Synthetic oligonucleotide
gagcggctatagtttgcttagatggcccccccaata

SEQ ID NO: 21160 - DNA, 36 bp, Artificial Sequence
  Synthetic oligonucleotide
gttcgggtgcatacttcgttctgttataaactctaa

SEQ ID NO: 21161 - DNA, 37 bp, Artificial Sequence
  Synthetic oligonucleotide
agtgaggatcagttgactactaggggctgaataacga

SEQ ID NO: 21162 - DNA, 36 bp, Artificial Sequence
  Synthetic oligonucleotide
tgttaggggacgtgcaacggcacactcaaaaggtta

SEQ ID NO: 21163 - DNA, 36 bp, Artificial Sequence
  Synthetic oligonucleotide
gtgggaacggtaacaagacatatgagatcgtgctaa

SEQ ID NO: 21164 - DNA, 37 bp, Artificial Sequence
  Synthetic oligonucleotide
aatggccgagtagacataggcattaagctgcacggga

SEQ ID NO: 21165 - DNA, 38 bp, Artificial Sequence
  Synthetic oligonucleotide
agttcgcgaacggatcgggcatcttaatgctgttctga

SEQ ID NO: 21166 - DNA, 37 bp, Artificial Sequence
  Synthetic oligonucleotide
gtgtaacgtgggccgctcatgttagagtgcgctacga

SEQ ID NO: 21167 - DNA, 36 bp, Artificial Sequence
  Synthetic oligonucleotide
taagcactgctagtagtcagctcgttgtttaaggga

SEQ ID NO: 21168 - DNA, 36 bp, Artificial Sequence
  Synthetic oligonucleotide
actcctgactgcattatagtgcatttccaggaatta

SEQ ID NO: 21169 - DNA, 37 bp, Artificial Sequence
  Synthetic oligonucleotide
acagcgtagggggccgaggatttcggagacttagcga

SEQ ID NO: 21170 - DNA, 36 bp, Artificial Sequence
  Synthetic oligonucleotide
ttccggacgtgtgtaatacagactccacagcgggga

SEQ ID NO: 21171 - DNA, 37 bp, Artificial Sequence
  Synthetic oligonucleotide
gtgttgtggttgtcgcaaaagggttgaccctaggaga

SEQ ID NO: 21172 - DNA, 38 bp, Artificial Sequence
  Synthetic oligonucleotide
atctcagcgatccctctgtagctctccccggctaatga

SEQ ID NO: 21173 - DNA, 36 bp, Artificial Sequence
  Synthetic oligonucleotide
tgtgctaactcatgtgttcacagtgtctctgccaga

SEQ ID NO: 21174 - DNA, 35 bp, Artificial Sequence
  Synthetic oligonucleotide
gtttgtggttaccactaggctttgttaaagtccat

SEQ ID NO: 21175 - DNA, 36 bp, Artificial Sequence
  Synthetic oligonucleotide
tggtaggagcaggtttagtggaatggataccgtaca

SEQ ID NO: 21176 - DNA, 36 bp, Artificial Sequence
  Synthetic oligonucleotide
gcccacgtcgatataagaacgacccggcttaagtaa

SEQ ID NO: 21177 - DNA, 37 bp, Artificial Sequence
  Synthetic oligonucleotide
tcatggcgacgaccggcgactcgtggactcaagcaga

SEQ ID NO: 21178 - DNA, 35 bp, Artificial Sequence
  Synthetic oligonucleotide
gtggttacgagtccaggtggcccgtagacagtgtt

SEQ ID NO: 21179 - DNA, 37 bp, Artificial Sequence
  Synthetic oligonucleotide
attgtctccggattgttatgttattagggtatgtgga

SEQ ID NO: 21180 - DNA, 36 bp, Artificial Sequence
  Synthetic oligonucleotide
atggtctgacaggctattcttaggaaatacggaaga

SEQ ID NO: 21181 - DNA, 36 bp, Artificial Sequence
  Synthetic oligonucleotide
gaatctgcccagaattggtacgaacactctagcgaa

SEQ ID NO: 21182 - DNA, 35 bp, Artificial Sequence
  Synthetic oligonucleotide
taacataacgaagtgtctccaaggttgcgatatgg

SEQ ID NO: 21183 - DNA, 35 bp, Artificial Sequence
  Synthetic oligonucleotide
acaacgcccagtgatcatgagcctgcgatacctgt

SEQ ID NO: 21184 - DNA, 37 bp, Artificial Sequence
  Synthetic oligonucleotide
gaccagccataagaccgagtgctccccctatacgtga

SEQ ID NO: 21185 - DNA, 38 bp, Artificial Sequence
  Synthetic oligonucleotide
attgctgttgcgatacatagaaactggcatgctgttga

SEQ ID NO: 21186 - DNA, 35 bp, Artificial Sequence
  Synthetic oligonucleotide
accgctatggtcagggtatccactaacggacgaag

SEQ ID NO: 21187 - DNA, 35 bp, Artificial Sequence
  Synthetic oligonucleotide
gacgacagttagatggtctgtacctgttgactttg

SEQ ID NO: 21188 - DNA, 35 bp, Artificial Sequence
  Synthetic oligonucleotide
taagggcgggtgacgtattccccccccccgtgtca

SEQ ID NO: 21189 - DNA, 36 bp, Artificial Sequence
  Synthetic oligonucleotide
aatacctcgctaactgggtttcgagacaagagcgca

SEQ ID NO: 21190 - DNA, 36 bp, Artificial Sequence
  Synthetic oligonucleotide
agggcccttgcgggagttgagagtcaagcagtcgaa

SEQ ID NO: 21191 - DNA, 37 bp, Artificial Sequence
  Synthetic oligonucleotide
ggaggaatttcagtgggtgaccggaccggctattaga

SEQ ID NO: 21192 - DNA, 38 bp, Artificial Sequence
  Synthetic oligonucleotide
gctgtgcaacacagtttgtataaggtagtgaatgctga

SEQ ID NO: 21193 - DNA, 38 bp, Artificial Sequence
  Synthetic oligonucleotide
accgagcgcagtagtatgtagcgagaccttgcacctga

SEQ ID NO: 21194 - DNA, 37 bp, Artificial Sequence
  Synthetic oligonucleotide
tacaaaagcggtataatccgtagtcttagcgccagga

SEQ ID NO: 21195 - DNA, 35 bp, Artificial Sequence
  Synthetic oligonucleotide
ggtgacgggatattaaggttgacacttgtcttgac

SEQ ID NO: 21196 - DNA, 36 bp, Artificial Sequence
  Synthetic oligonucleotide
agacgagaagaggatggtataggaataatctcccga

SEQ ID NO: 21197 - DNA, 38 bp, Artificial Sequence
  Synthetic oligonucleotide
gctcacaacagcgcacggtcgggataactggactgtga

SEQ ID NO: 21198 - DNA, 37 bp, Artificial Sequence
  Synthetic oligonucleotide
gtcctcatatgtatcgagtgtaaatggcatggacgga

SEQ ID NO: 21199 - DNA, 36 bp, Artificial Sequence
  Synthetic oligonucleotide
gtacagttaagacggccctgcgttgggagaacagca

SEQ ID NO: 21200 - DNA, 35 bp, Artificial Sequence
  Synthetic oligonucleotide
tgcataacaaaccgcccccctgtagtcagctagtt

SEQ ID NO: 21201 - DNA, 35 bp, Artificial Sequence
  Synthetic oligonucleotide
gttgggttggaatcctggcggcttgccgcaactcg

SEQ ID NO: 21202 - DNA, 35 bp, Artificial Sequence
  Synthetic oligonucleotide
tatagttgcaggtggtcatacagatgatatggtgt

SEQ ID NO: 21203 - DNA, 36 bp, Artificial Sequence
  Synthetic oligonucleotide
ggagatggggatatcgattagtcagttgttgtcgta

SEQ ID NO: 21204 - DNA, 38 bp, Artificial Sequence
  Synthetic oligonucleotide
gtagacacagaagcggtttagctaaatgcattagctga

SEQ ID NO: 21205 - DNA, 38 bp, Artificial Sequence
  Synthetic oligonucleotide
tgataggttgctgtatgcgaattttaagagcgccctga

SEQ ID NO: 21206 - DNA, 35 bp, Artificial Sequence
  Synthetic oligonucleotide
tgatcgactcacgggcgtgtgttgtggaccctggt

SEQ ID NO: 21207 - DNA, 38 bp, Artificial Sequence
  Synthetic oligonucleotide
ggaggacattgaggccattttcgggcaagcctgtatga

SEQ ID NO: 21208 - DNA, 35 bp, Artificial Sequence
  Synthetic oligonucleotide
ggcacgcgggataccctcttaagacatcctccccc

SEQ ID NO: 21209 - DNA, 35 bp, Artificial Sequence
  Synthetic oligonucleotide
gacgctctccgtaagccggcgtctatttgctagat

SEQ ID NO: 21210 - DNA, 37 bp, Artificial Sequence
  Synthetic oligonucleotide
ttcggacgtaacgtgctgtctcactgcctcctgtcga

SEQ ID NO: 21211 - DNA, 36 bp, Artificial Sequence
  Synthetic oligonucleotide
tgccctatgtatagacttacgatgggttgcaattaa

SEQ ID NO: 21212 - DNA, 35 bp, Artificial Sequence
  Synthetic oligonucleotide
gagtaaacggcggatgcatgcattcgcatccatgc

SEQ ID NO: 21213 - DNA, 37 bp, Artificial Sequence
  Synthetic oligonucleotide
tggcgagtccctatgaaatattaattcctagtacgga

SEQ ID NO: 21214 - DNA, 36 bp, Artificial Sequence
  Synthetic oligonucleotide
acagcagtccaactacgggatgaggcatggtcacaa

SEQ ID NO: 21215 - DNA, 37 bp, Artificial Sequence
  Synthetic oligonucleotide
gtcaagatactgtgtagatttaagccctatcgttcga

SEQ ID NO: 21216 - DNA, 35 bp, Artificial Sequence
  Synthetic oligonucleotide
agatcgtcgcggtattgagagaggcactcgctaca

SEQ ID NO: 21217 - DNA, 37 bp, Artificial Sequence
  Synthetic oligonucleotide
tcccccaacgattcagttgctcgtatggtaagggtga

SEQ ID NO: 21218 - DNA, 35 bp, Artificial Sequence
  Synthetic oligonucleotide
gtaggagagtactatatgaatagcttgctaagtgt

SEQ ID NO: 21219 - DNA, 35 bp, Artificial Sequence
  Synthetic oligonucleotide
agtatctcagtagtactgtccatgttctgagaatt

SEQ ID NO: 21220 - DNA, 35 bp, Artificial Sequence
  Synthetic oligonucleotide
tgacggtaggcatcggagtggatccacctcttgag

SEQ ID NO: 21221 - DNA, 38 bp, Artificial Sequence
  Synthetic oligonucleotide
gatctagagtggtctagcaggtgccaacttataattga

SEQ ID NO: 21222 - DNA, 35 bp, Artificial Sequence
  Synthetic oligonucleotide
ttcgcggaagccattgtatgcggttgtcaagtgtg

SEQ ID NO: 21223 - DNA, 35 bp, Artificial Sequence
  Synthetic oligonucleotide
tgccagctcctcctatcggagcacagttttttagg

SEQ ID NO: 21224 - DNA, 35 bp, Artificial Sequence
  Synthetic oligonucleotide
aagtagaggtaagcatgcgagagaagagttatgat

SEQ ID NO: 21225 - DNA, 35 bp, Artificial Sequence
  Synthetic oligonucleotide
tcgctaaaaaggggaaggtcgtatactagccgacg

SEQ ID NO: 21226 - DNA, 35 bp, Artificial Sequence
  Synthetic oligonucleotide
gtcgtccgggactagtattcatagcctctcttgtt

SEQ ID NO: 21227 - DNA, 37 bp, Artificial Sequence
  Synthetic oligonucleotide
taggggccccgtcgagcagtattcacagttgcgacga

SEQ ID NO: 21228 - DNA, 34 bp, Artificial Sequence
  Synthetic oligonucleotide
gggaagaggccggttgagggtattactctgactg

SEQ ID NO: 21229 - DNA, 38 bp, Artificial Sequence
  Synthetic oligonucleotide
acttgtaatagcattaagtatgtgaatcagtaagatga

SEQ ID NO: 21230 - DNA, 37 bp, Artificial Sequence
  Synthetic oligonucleotide
gctaatggggatgttgaccaggttgacagccataaga

SEQ ID NO: 21231 - DNA, 37 bp, Artificial Sequence
  Synthetic oligonucleotide
aaacgtgcgaggatacgcagaggaggtagggcacgga

SEQ ID NO: 21232 - DNA, 35 bp, Artificial Sequence
  Synthetic oligonucleotide
tcccgcaaagagtccgctagtaatatgatatcgac

SEQ ID NO: 21233 - DNA, 35 bp, Artificial Sequence
  Synthetic oligonucleotide
atgagctaccggtgctggtgtgggactagggaatg

SEQ ID NO: 21234 - DNA, 36 bp, Artificial Sequence
  Synthetic oligonucleotide
tcagcccgtcattgcggattactaagtccttgcaga

SEQ ID NO: 21235 - DNA, 35 bp, Artificial Sequence
  Synthetic oligonucleotide
tgtggtgcgtgtctctgtttaaaggtccgttgaat

SEQ ID NO: 21236 - DNA, 35 bp, Artificial Sequence
  Synthetic oligonucleotide
tccgtaagcttggtatgttacatccgagatgggtt

SEQ ID NO: 21237 - DNA, 37 bp, Artificial Sequence
  Synthetic oligonucleotide
gaccgctgcgcgcgacctagtccgtgtacttcgttga

SEQ ID NO: 21238 - DNA, 36 bp, Artificial Sequence
  Synthetic oligonucleotide
taatgcgagcctgcctgagtgttcgccactttttga

SEQ ID NO: 21239 - DNA, 32 bp, Artificial Sequence
  Synthetic oligonucleotide
gcatccctttactgtagtaagttttagatgca

SEQ ID NO: 21240 - DNA, 35 bp, Artificial Sequence
  Synthetic oligonucleotide
aatggtggtcacagaatacatgtgtggtttcagca

SEQ ID NO: 21241 - DNA, 36 bp, Artificial Sequence
  Synthetic oligonucleotide
tactcaactgaattaacagagtcatgttggtgacga

SEQ ID NO: 21242 - DNA, 37 bp, Artificial Sequence
  Synthetic oligonucleotide
acacgagtagtcagggctaattaaacctgacacgaga

SEQ ID NO: 21243 - DNA, 37 bp, Artificial Sequence
  Synthetic oligonucleotide
tgcgggctatccaggaaggtaatacaagtgacaacga

SEQ ID NO: 21244 - DNA, 35 bp, Artificial Sequence
  Synthetic oligonucleotide
ggacgttcggagcgtgttaaccgtctatttgtccc

SEQ ID NO: 21245 - DNA, 35 bp, Artificial Sequence
  Synthetic oligonucleotide
gtccccaataagtagagtgtggaagcgtgactagg

SEQ ID NO: 21246 - DNA, 35 bp, Artificial Sequence
  Synthetic oligonucleotide
gactagagtttccccccagtgctgtgtggccagaa

SEQ ID NO: 21247 - DNA, 37 bp, Artificial Sequence
  Synthetic oligonucleotide
cgcctgttgccatcacgcgattacgtaaggcgtgcga

SEQ ID NO: 21248 - DNA, 38 bp, Artificial Sequence
  Synthetic oligonucleotide
tgtcctaaacgtcgtggagttccattggattgtcgtga

SEQ ID NO: 21249 - DNA, 37 bp, Artificial Sequence
  Synthetic oligonucleotide
agcccacggggtggtacataggagggtctacgcgtga

SEQ ID NO: 21250 - DNA, 35 bp, Artificial Sequence
  Synthetic oligonucleotide
agggtaacacaaatacaaaccgtgtaaaggatagg

SEQ ID NO: 21251 - DNA, 35 bp, Artificial Sequence
  Synthetic oligonucleotide
ttgaccggtagtggtaatcttcgtaggctccggaa

SEQ ID NO: 21252 - DNA, 37 bp, Artificial Sequence
  Synthetic oligonucleotide
acatagcttagttgaaaccgatcgtggggtatggtga

SEQ ID NO: 21253 - DNA, 37 bp, Artificial Sequence
  Synthetic oligonucleotide
gtaccccccgtcgtacacggtgctaaggtacatgaga

SEQ ID NO: 21254 - DNA, 37 bp, Artificial Sequence
  Synthetic oligonucleotide
gcaacgcactacgtcaagcgggcgtcatctcagacga

SEQ ID NO: 21255 - DNA, 37 bp, Artificial Sequence
  Synthetic oligonucleotide
gtgagatcacccaggagccactgagatgtgccatgga

SEQ ID NO: 21256 - DNA, 36 bp, Artificial Sequence
  Synthetic oligonucleotide
tgagtccgtcctcggtggttatcgctatacgtgcaa

SEQ ID NO: 21257 - DNA, 36 bp, Artificial Sequence
  Synthetic oligonucleotide
gtacccttagcatcatcaggcatattgtactagtaa

SEQ ID NO: 21258 - DNA, 38 bp, Artificial Sequence
  Synthetic oligonucleotide
actcgttacgagtgtatcacatggttttctcttagtga

SEQ ID NO: 21259 - DNA, 36 bp, Artificial Sequence
  Synthetic oligonucleotide
gaggggctgtgacagcgaaggtatcacaatcgaaaa

SEQ ID NO: 21260 - DNA, 35 bp, Artificial Sequence
  Synthetic oligonucleotide
ttttagctcttagccctacaatcgtagttaacggc

SEQ ID NO: 21261 - DNA, 35 bp, Artificial Sequence
  Synthetic oligonucleotide
gatcacgaactctttattaggaaggccgggagtga

SEQ ID NO: 21262 - DNA, 36 bp, Artificial Sequence
  Synthetic oligonucleotide
tattcgacatcgagagttgattgaacaaagttatca

SEQ ID NO: 21263 - DNA, 35 bp, Artificial Sequence
  Synthetic oligonucleotide
tcatctacagcgggtaagctaagggtaatattgaa

SEQ ID NO: 21264 - DNA, 38 bp, Artificial Sequence
  Synthetic oligonucleotide
cactagcagatcaatgctagtctttctccccctcctga

SEQ ID NO: 21265 - DNA, 37 bp, Artificial Sequence
  Synthetic oligonucleotide
ttggcatacccgttgtcagactcgcaggaacattcga

SEQ ID NO: 21266 - DNA, 38 bp, Artificial Sequence
  Synthetic oligonucleotide
agccgcgtgaggataacgtttaccctaatacgtcttga

SEQ ID NO: 21267 - DNA, 36 bp, Artificial Sequence
  Synthetic oligonucleotide
atggtaggaaagagtgttagtactgaggtgcttcta

SEQ ID NO: 21268 - DNA, 37 bp, Artificial Sequence
  Synthetic oligonucleotide
gctgtagggtcttgatccgatagtagcccccctccga

SEQ ID NO: 21269 - DNA, 36 bp, Artificial Sequence
  Synthetic oligonucleotide
agacgtcccccccccgtccccaattgtcgggactta

SEQ ID NO: 21270 - DNA, 37 bp, Artificial Sequence
  Synthetic oligonucleotide
ctgggtcaatttccccgctctcgcttccccccgccga

SEQ ID NO: 21271 - DNA, 37 bp, Artificial Sequence
  Synthetic oligonucleotide
gatgcagtgaacaatctcttaaatgcatctagacaga

SEQ ID NO: 21272 - DNA, 37 bp, Artificial Sequence
  Synthetic oligonucleotide
tcgcgtcggtctgtgacgtacacatgcgtacgttaga

SEQ ID NO: 21273 - DNA, 35 bp, Artificial Sequence
  Synthetic oligonucleotide
gatcaaagggtcacgtgcgcatccatcagatccta

SEQ ID NO: 21274 - DNA, 37 bp, Artificial Sequence
  Synthetic oligonucleotide
gtctcgcggataaactgaatcccgagttgaccactga

SEQ ID NO: 21275 - DNA, 35 bp, Artificial Sequence
  Synthetic oligonucleotide
tagagacgagctaggcacctgtcgtgtttccgaat

SEQ ID NO: 21276 - DNA, 35 bp, Artificial Sequence
  Synthetic oligonucleotide
atggcgataggatcaggttccgacgggggcactgg

SEQ ID NO: 21277 - DNA, 35 bp, Artificial Sequence
  Synthetic oligonucleotide
tagtacgtgctcccgccccccctcgtggtgtatcg

SEQ ID NO: 21278 - DNA, 36 bp, Artificial Sequence
  Synthetic oligonucleotide
ttaaagaacagccgactgactgggtatagtgctaca

SEQ ID NO: 21279 - DNA, 35 bp, Artificial Sequence
  Synthetic oligonucleotide
aaattgccacaacgttcccatgcgtacatcgccct

SEQ ID NO: 21280 - DNA, 35 bp, Artificial Sequence
  Synthetic oligonucleotide
cctcaccggtcgcccccccttgtatctctgtcttg

SEQ ID NO: 21281 - DNA, 37 bp, Artificial Sequence
  Synthetic oligonucleotide
taaacattcgtgagtgttatttagcttgatatagtga

SEQ ID NO: 21282 - DNA, 35 bp, Artificial Sequence
  Synthetic oligonucleotide
atgcgcattagggttctttattatcatgttcttcg

SEQ ID NO: 21283 - DNA, 35 bp, Artificial Sequence
  Synthetic oligonucleotide
gcttggaagggtccaacagcgtttcagaatgatcg

SEQ ID NO: 21284 - DNA, 35 bp, Artificial Sequence
  Synthetic oligonucleotide
ttaggtgatctacaccgatacctggcctcccgttc

SEQ ID NO: 21285 - DNA, 35 bp, Artificial Sequence
  Synthetic oligonucleotide
tgctgaaggtatgcgaattgttaaattgtccagca

SEQ ID NO: 21286 - DNA, 36 bp, Artificial Sequence
  Synthetic oligonucleotide
gaccgcgggagttaacctgcctagccctacgctgaa

SEQ ID NO: 21287 - DNA, 35 bp, Artificial Sequence
  Synthetic oligonucleotide
gaccggagttgtggggagcgagaggatgttgcaat

SEQ ID NO: 21288 - DNA, 35 bp, Artificial Sequence
  Synthetic oligonucleotide
gtgagcattgatcagggcgtaaacgatttgttaag

SEQ ID NO: 21289 - DNA, 35 bp, Artificial Sequence
  Synthetic oligonucleotide
aagaccccctccgcagccgcatggggatgcgataa

SEQ ID NO: 21290 - DNA, 36 bp, Artificial Sequence
  Synthetic oligonucleotide
acaaaattctcaccgtcctctaggtaatctcaccca

SEQ ID NO: 21291 - DNA, 37 bp, Artificial Sequence
  Synthetic oligonucleotide
accgttggagttcttttttcgaaatcatttgtcttga

SEQ ID NO: 21292 - DNA, 38 bp, Artificial Sequence
  Synthetic oligonucleotide
actttgttcggtcactatacttattacgctctctttga

SEQ ID NO: 21293 - DNA, 38 bp, Artificial Sequence
  Synthetic oligonucleotide
tggacctttcaaccgcctttattatccttggaccgtga

SEQ ID NO: 21294 - DNA, 37 bp, Artificial Sequence
  Synthetic oligonucleotide
gctccatgaagacattgtggtggcctttttttattga

SEQ ID NO: 21295 - DNA, 38 bp, Artificial Sequence
  Synthetic oligonucleotide
tgcgctgttcgggttcttactgtttgttgccttactga

SEQ ID NO: 21296 - DNA, 35 bp, Artificial Sequence
  Synthetic oligonucleotide
tccgggttttttcagccccgcaatccctcttatta

SEQ ID NO: 21297 - DNA, 36 bp, Artificial Sequence
  Synthetic oligonucleotide
aacggtactctctcgcttcggaatttggacttttga

SEQ ID NO: 21298 - DNA, 35 bp, Artificial Sequence
  Synthetic oligonucleotide
ccgttcctcctcttgtttttgggatccgttaatgc

SEQ ID NO: 21299 - DNA, 35 bp, Artificial Sequence
  Synthetic oligonucleotide
atataggttttgtgacttctgcgctcttattgttc

SEQ ID NO: 21300 - DNA, 38 bp, Artificial Sequence
  Synthetic oligonucleotide
tttcactttacgtgtgcccggtatttgttcgcccttga

SEQ ID NO: 21301 - DNA, 35 bp, Artificial Sequence
  Synthetic oligonucleotide
tgttaaggttgatccgttcttcctgctattcctcc

SEQ ID NO: 21302 - DNA, 35 bp, Artificial Sequence
  Synthetic oligonucleotide
accccgcctttcgtctttcagtccggaattacacc

SEQ ID NO: 21303 - DNA, 35 bp, Artificial Sequence
  Synthetic oligonucleotide
gttatcgccaatccccccggcccccatctggaaat

SEQ ID NO: 21304 - DNA, 35 bp, Artificial Sequence
  Synthetic oligonucleotide
cctactcgcgggtacacacccaaatcatttctcca

SEQ ID NO: 21305 - DNA, 35 bp, Artificial Sequence
  Synthetic oligonucleotide
tcctttttcctatctgggactcgcttagttcgtat

SEQ ID NO: 21306 - DNA, 38 bp, Artificial Sequence
  Synthetic oligonucleotide
attgctagggctatccattatgacgctctctttcttga

SEQ ID NO: 21307 - DNA, 38 bp, Artificial Sequence
  Synthetic oligonucleotide
ggcattccctgatttttttgttctcttcctaggcgtga

SEQ ID NO: 21308 - DNA, 35 bp, Artificial Sequence
  Synthetic oligonucleotide
tctgtgaaaacctacctcgccgtcgattactccac

SEQ ID NO: 21309 - DNA, 35 bp, Artificial Sequence
  Synthetic oligonucleotide
tctggtgcacgcctcttaatttcgttctaagtttt

SEQ ID NO: 21310 - DNA, 36 bp, Artificial Sequence
  Synthetic oligonucleotide
atacgcctcaactcgaagcccgcccaccctccacga

SEQ ID NO: 21311 - DNA, 37 bp, Artificial Sequence
  Synthetic oligonucleotide
ttaaccatctaacataagcaatattccgccaacctga

SEQ ID NO: 21312 - DNA, 38 bp, Artificial Sequence
  Synthetic oligonucleotide
gcccgcttggtgttattggttgcttctaatcctggtga

SEQ ID NO: 21313 - DNA, 38 bp, Artificial Sequence
  Synthetic oligonucleotide
atcgtgcgtccttacgattaatctacgcctccccctga

SEQ ID NO: 21314 - DNA, 35 bp, Artificial Sequence
  Synthetic oligonucleotide
tctttgtttcgtcgttgatctcctctccgtgtaaa

SEQ ID NO: 21315 - DNA, 34 bp, Artificial Sequence
  Synthetic oligonucleotide
ggtttcacttggtcttttttctgggattcgggtc

SEQ ID NO: 21316 - DNA, 36 bp, Artificial Sequence
  Synthetic oligonucleotide
gtgggctccaaagtcgttcctttccttttgctgtga

SEQ ID NO: 21317 - DNA, 36 bp, Artificial Sequence
  Synthetic oligonucleotide
taatgatttcctctgattgcttttcctccgtgttga

SEQ ID NO: 21318 - DNA, 34 bp, Artificial Sequence
  Synthetic oligonucleotide
gtcaccacctggatctagccattctgttgtttgt

SEQ ID NO: 21319 - DNA, 36 bp, Artificial Sequence
  Synthetic oligonucleotide
agttcacggttggtcccttttctctggctacataca

SEQ ID NO: 21320 - DNA, 35 bp, Artificial Sequence
  Synthetic oligonucleotide
attcgtgtccatccttacatcgcctaaccgctcct

SEQ ID NO: 21321 - DNA, 37 bp, Artificial Sequence
  Synthetic oligonucleotide
attgccaccccaaggttttatcccctttctgtcctga

SEQ ID NO: 21322 - DNA, 38 bp, Artificial Sequence
  Synthetic oligonucleotide
tggtcccactctagttgttgcgtttctttattgcctga

SEQ ID NO: 21323 - DNA, 35 bp, Artificial Sequence
  Synthetic oligonucleotide
tgtccgccttacgccacttatctttacgcactact

SEQ ID NO: 21324 - DNA, 37 bp, Artificial Sequence
  Synthetic oligonucleotide
tcccgctccattggtagtcagcttgacttcataccga

SEQ ID NO: 21325 - DNA, 36 bp, Artificial Sequence
  Synthetic oligonucleotide
aacacacggggcctacttgattttttccttggacta

SEQ ID NO: 21326 - DNA, 35 bp, Artificial Sequence
  Synthetic oligonucleotide
tctccgtttgaaatttttctcgttatacactcccc

SEQ ID NO: 21327 - DNA, 36 bp, Artificial Sequence
  Synthetic oligonucleotide
ctcctctctgtcgattgttcctccgcacttgatata

SEQ ID NO: 21328 - DNA, 35 bp, Artificial Sequence
  Synthetic oligonucleotide
ttgcacatccatcgccatccttgttgtctcctacg

SEQ ID NO: 21329 - DNA, 33 bp, Artificial Sequence
  Synthetic oligonucleotide
actgttctagctcctttatgttctccttcacat

SEQ ID NO: 21330 - DNA, 35 bp, Artificial Sequence
  Synthetic oligonucleotide
gggaactgctctccgcctgaaccaattgctactcc

SEQ ID NO: 21331 - DNA, 35 bp, Artificial Sequence
  Synthetic oligonucleotide
gtacgccgcccccaccagttctggaaatgtttatt

SEQ ID NO: 21332 - DNA, 35 bp, Artificial Sequence
  Synthetic oligonucleotide
ttgctctcccattttgtatacgcctcgtctctgtt

SEQ ID NO: 21333 - DNA, 38 bp, Artificial Sequence
  Synthetic oligonucleotide
gtaatattctttctttcatctggtcctcttactcgtga

SEQ ID NO: 21334 - DNA, 35 bp, Artificial Sequence
  Synthetic oligonucleotide
ctgcagggctcatttgggctcttttcccgcgtttt

SEQ ID NO: 21335 - DNA, 35 bp, Artificial Sequence
  Synthetic oligonucleotide
tgtgcttgttgtcccggattatcctgttgtcttta

SEQ ID NO: 21336 - DNA, 36 bp, Artificial Sequence
  Synthetic oligonucleotide
gtctgtggcggttttttattcttgctataggtttca

SEQ ID NO: 21337 - DNA, 36 bp, Artificial Sequence
  Synthetic oligonucleotide
acaagcccccgttccttcttcaccgttatttaagta

SEQ ID NO: 21338 - DNA, 36 bp, Artificial Sequence
  Synthetic oligonucleotide
aggggattaccggccttcaacttcacacatattcaa

SEQ ID NO: 21339 - DNA, 35 bp, Artificial Sequence
  Synthetic oligonucleotide
ttgccgtaaattgtttcccccttcgagttgttcca

SEQ ID NO: 21340 - DNA, 36 bp, Artificial Sequence
  Synthetic oligonucleotide
ttacatatttcactactattcttccttgtcccacga

SEQ ID NO: 21341 - DNA, 37 bp, Artificial Sequence
  Synthetic oligonucleotide
gaccttaattgcgccttataacggacctccactccga

SEQ ID NO: 21342 - DNA, 35 bp, Artificial Sequence
  Synthetic oligonucleotide
gtcgtgggataacctttcattcccttcttcttgtg

SEQ ID NO: 21343 - DNA, 34 bp, Artificial Sequence
  Synthetic oligonucleotide
ttttttcggttttttccccattggtcatttaatt

SEQ ID NO: 21344 - DNA, 37 bp, Artificial Sequence
  Synthetic oligonucleotide
tctgtcttatcgttttcaatttctcctatcctagaga

SEQ ID NO: 21345 - DNA, 35 bp, Artificial Sequence
  Synthetic oligonucleotide
tattgggttcgttttgctctcactgaggccttttt

SEQ ID NO: 21346 - DNA, 35 bp, Artificial Sequence
  Synthetic oligonucleotide
tgtccaggttcggatctcatttctcctctattggg

SEQ ID NO: 21347 - DNA, 38 bp, Artificial Sequence
  Synthetic oligonucleotide
tactacgaccctttctatcgcttccattttatgtatga

SEQ ID NO: 21348 - DNA, 36 bp, Artificial Sequence
  Synthetic oligonucleotide
gaatgcggcctcccagaccttactcttactcatcca

SEQ ID NO: 21349 - DNA, 35 bp, Artificial Sequence
  Synthetic oligonucleotide
gtccggctccgatttacttgcctatttgtttggtt

SEQ ID NO: 21350 - DNA, 35 bp, Artificial Sequence
  Synthetic oligonucleotide
ttcgtgagatatgcgattttttccggttgttttgc

SEQ ID NO: 21351 - DNA, 36 bp, Artificial Sequence
  Synthetic oligonucleotide
tccatgtctctccaaggcgccttttttccgcagtta

SEQ ID NO: 21352 - DNA, 38 bp, Artificial Sequence
  Synthetic oligonucleotide
gttccgcgatcttccccttctacacacccggattgtga

SEQ ID NO: 21353 - DNA, 36 bp, Artificial Sequence
  Synthetic oligonucleotide
atcctcgaatcgtggtttaatctgggatcttttcaa

SEQ ID NO: 21354 - DNA, 35 bp, Artificial Sequence
  Synthetic oligonucleotide
tttgcctccgtgctcttattccaactctaccgcat

SEQ ID NO: 21355 - DNA, 36 bp, Artificial Sequence
  Synthetic oligonucleotide
acggccttttcctcctctctcggagctccacatcta

SEQ ID NO: 21356 - DNA, 38 bp, Artificial Sequence
  Synthetic oligonucleotide
ggaccgtacgtggcgacgcctcccactttattttctga

SEQ ID NO: 21357 - DNA, 35 bp, Artificial Sequence
  Synthetic oligonucleotide
tgttacatgggcgctccctgggtttcttcatacca

SEQ ID NO: 21358 - DNA, 37 bp, Artificial Sequence
  Synthetic oligonucleotide
gcgaaccgggccgacattgccaatccaccaaacatga

SEQ ID NO: 21359 - DNA, 35 bp, Artificial Sequence
  Synthetic oligonucleotide
attgttttcctaccttgttttcttgggaagctcta

SEQ ID NO: 21360 - DNA, 38 bp, Artificial Sequence
  Synthetic oligonucleotide
ttacgatcattttccacatagctgattcaatttcctga

SEQ ID NO: 21361 - DNA, 38 bp, Artificial Sequence
  Synthetic oligonucleotide
ggtctgtttcctgaattccctagtaggactatttttga

SEQ ID NO: 21362 - DNA, 36 bp, Artificial Sequence
  Synthetic oligonucleotide
accctgttccacttgcgcctgacttcggaatcctta

SEQ ID NO: 21363 - DNA, 37 bp, Artificial Sequence
  Synthetic oligonucleotide
cgcactaatcgccgttttattactttttcccgggtga

SEQ ID NO: 21364 - DNA, 38 bp, Artificial Sequence
  Synthetic oligonucleotide
agtccggggcactacttcctcacgcgatttgttcttga

SEQ ID NO: 21365 - DNA, 35 bp, Artificial Sequence
  Synthetic oligonucleotide
agagctttccgcgacgcaccgggcctaattcatca

SEQ ID NO: 21366 - DNA, 36 bp, Artificial Sequence
  Synthetic oligonucleotide
tttccggtcccgtttttgtttctactggggtaacaa

SEQ ID NO: 21367 - DNA, 35 bp, Artificial Sequence
  Synthetic oligonucleotide
tattcactcccttccgtctggtcgcctgctttccc

SEQ ID NO: 21368 - DNA, 38 bp, Artificial Sequence
  Synthetic oligonucleotide
cgttcttctttcctgtttgtgttccgcctttgtcctga

SEQ ID NO: 21369 - DNA, 35 bp, Artificial Sequence
  Synthetic oligonucleotide
gtgccgtccaccgagtttcgttttctaggtactcc

SEQ ID NO: 21370 - DNA, 37 bp, Artificial Sequence
  Synthetic oligonucleotide
acctgtcgtttattctctccaattttgcttgttatga

SEQ ID NO: 21371 - DNA, 35 bp, Artificial Sequence
  Synthetic oligonucleotide
tgcccttgcgctttcttgtcttcgtgtcgtggtct

SEQ ID NO: 21372 - DNA, 37 bp, Artificial Sequence
  Synthetic oligonucleotide
tgctcatgtcctcttgttgtgtcttcttccgttccga

SEQ ID NO: 21373 - DNA, 35 bp, Artificial Sequence
  Synthetic oligonucleotide
ttcatatggggtccgttttatcccgcgatcgattt

SEQ ID NO: 21374 - DNA, 36 bp, Artificial Sequence
  Synthetic oligonucleotide
ctctattttgctcgcgttcgtaatttggtccatgta

SEQ ID NO: 21375 - DNA, 35 bp, Artificial Sequence
  Synthetic oligonucleotide
taacgctcctacaatgacccgtactcgttcctctt

SEQ ID NO: 21376 - DNA, 35 bp, Artificial Sequence
  Synthetic oligonucleotide
aggtttgcacccgcgattcgtagatatctggcaag

SEQ ID NO: 21377 - DNA, 37 bp, Artificial Sequence
  Synthetic oligonucleotide
tcgtatcggggatacgtgttatcttacttgttggtga

SEQ ID NO: 21378 - DNA, 35 bp, Artificial Sequence
  Synthetic oligonucleotide
agtatcgcgaagtactattgatagggtctccctct

SEQ ID NO: 21379 - DNA, 35 bp, Artificial Sequence
  Synthetic oligonucleotide
gaggtgtacgcaggaatgtgtaggtttaacgaaat

SEQ ID NO: 21380 - DNA, 35 bp, Artificial Sequence
  Synthetic oligonucleotide
tgtagttaaactaacaactcgcgctgtcttcgccc

SEQ ID NO: 21381 - DNA, 35 bp, Artificial Sequence
  Synthetic oligonucleotide
ccaggtctaaatctgagagagacttgggtaaggtg

SEQ ID NO: 21382 - DNA, 37 bp, Artificial Sequence
  Synthetic oligonucleotide
cccctggaaaagtggaacagattcccgaggattcgga

SEQ ID NO: 21383 - DNA, 35 bp, Artificial Sequence
  Synthetic oligonucleotide
gtttcacgtttgcataacggggattcccgcacgta

SEQ ID NO: 21384 - DNA, 38 bp, Artificial Sequence
  Synthetic oligonucleotide
ggttaggaccacgctagcgggatacgcaagagaaatga

SEQ ID NO: 21385 - DNA, 37 bp, Artificial Sequence
  Synthetic oligonucleotide
tcaacatccactaggatagaagacgtacaggattgga

SEQ ID NO: 21386 - DNA, 36 bp, Artificial Sequence
  Synthetic oligonucleotide
cccaggtatgttcggaactgctgggtcaaggcataa

SEQ ID NO: 21387 - DNA, 37 bp, Artificial Sequence
  Synthetic oligonucleotide
tcggtcacgtatggcgcgagaaagtaaatccggaaga

SEQ ID NO: 21388 - DNA, 36 bp, Artificial Sequence
  Synthetic oligonucleotide
ttcgcgaatcagcgatgcttaaaatacgaggtgtta

SEQ ID NO: 21389 - DNA, 35 bp, Artificial Sequence
  Synthetic oligonucleotide
ggtgggacacggggactgctcaggtcctgcagtca

SEQ ID NO: 21390 - DNA, 36 bp, Artificial Sequence
  Synthetic oligonucleotide
ctcaatccgggcgcgatgtatgctaccacttgagta

SEQ ID NO: 21391 - DNA, 35 bp, Artificial Sequence
  Synthetic oligonucleotide
gcgacttaggactgggcatatctggtaccactgtc

SEQ ID NO: 21392 - DNA, 35 bp, Artificial Sequence
  Synthetic oligonucleotide
gccgtacggtcgaggataatggaatttttgggcta

SEQ ID NO: 21393 - DNA, 35 bp, Artificial Sequence
  Synthetic oligonucleotide
ctgttcattcaccactacgttcgagtgaggttggg

SEQ ID NO: 21394 - DNA, 36 bp, Artificial Sequence
  Synthetic oligonucleotide
gaacgagatattacagtcgcactccgtccgcgatta

SEQ ID NO: 21395 - DNA, 35 bp, Artificial Sequence
  Synthetic oligonucleotide
ccgtagccagactccacaagaatcggggtagtgca

SEQ ID NO: 21396 - DNA, 37 bp, Artificial Sequence
  Synthetic oligonucleotide
tggttagcgatgacatctctcttggggtcgcagacga

SEQ ID NO: 21397 - DNA, 37 bp, Artificial Sequence
  Synthetic oligonucleotide
tagctagcctgaacaaaaacgcaccaaaaaggttgga

SEQ ID NO: 21398 - DNA, 35 bp, Artificial Sequence
  Synthetic oligonucleotide
ggagtcccatggagggggatgacgcctcgcggcta

SEQ ID NO: 21399 - DNA, 37 bp, Artificial Sequence
  Synthetic oligonucleotide
ctggaggaccgcggcaaggtctgctggtattatccga

SEQ ID NO: 21400 - DNA, 36 bp, Artificial Sequence
  Synthetic oligonucleotide
ccgtgctagcaacctgagttgaggtgtgagtctaca

SEQ ID NO: 21401 - DNA, 37 bp, Artificial Sequence
  Synthetic oligonucleotide
tttggccgtgctgtggatgtgacaggaatcacggcga

SEQ ID NO: 21402 - DNA, 36 bp, Artificial Sequence
  Synthetic oligonucleotide
tattcgagatggcccgcatgtggacgtactagatga

SEQ ID NO: 21403 - DNA, 35 bp, Artificial Sequence
  Synthetic oligonucleotide
ctggtacggggattggactgttacttcccatcgcg

SEQ ID NO: 21404 - DNA, 38 bp, Artificial Sequence
  Synthetic oligonucleotide
ataggggctcgtgaccaggcggttttttcacgggttga

SEQ ID NO: 21405 - DNA, 36 bp, Artificial Sequence
  Synthetic oligonucleotide
ctaccagtacaaggggggaatcctgtgatgatgcta

SEQ ID NO: 21406 - DNA, 35 bp, Artificial Sequence
  Synthetic oligonucleotide
ttcggagaggtattctcgagtgtatgttccttggg

SEQ ID NO: 21407 - DNA, 35 bp, Artificial Sequence
  Synthetic oligonucleotide
tgtttgggtagtccgggaggtttttagtatactgg

SEQ ID NO: 21408 - DNA, 37 bp, Artificial Sequence
  Synthetic oligonucleotide
tcgaagacgaaagacttgataactggttccagtggga

SEQ ID NO: 21409 - DNA, 35 bp, Artificial Sequence
  Synthetic oligonucleotide
tcttaccacgccccgttatacaacggatcaggctg

SEQ ID NO: 21410 - DNA, 37 bp, Artificial Sequence
  Synthetic oligonucleotide
cttggaagtatcacaactcgtataactcctaagccga

SEQ ID NO: 21411 - DNA, 36 bp, Artificial Sequence
  Synthetic oligonucleotide
catgtcatgtaatccccctatgtattcaaacgttta

SEQ ID NO: 21412 - DNA, 38 bp, Artificial Sequence
  Synthetic oligonucleotide
ccgctcaacatcaccagaaatgttcacagcagtcatga

SEQ ID NO: 21413 - DNA, 35 bp, Artificial Sequence
  Synthetic oligonucleotide
gcggagtgattgggacgcgtacgcgtaaaaattgt

SEQ ID NO: 21414 - DNA, 37 bp, Artificial Sequence
  Synthetic oligonucleotide
tggggagcacagttcatctgatcatcaatttcctaga

SEQ ID NO: 21415 - DNA, 35 bp, Artificial Sequence
  Synthetic oligonucleotide
tgcgtgattgatcgctcgtcttgcagatgttttgg

SEQ ID NO: 21416 - DNA, 35 bp, Artificial Sequence
  Synthetic oligonucleotide
acgggttgttgtgctaaaagttattaacttgacta

SEQ ID NO: 21417 - DNA, 35 bp, Artificial Sequence
  Synthetic oligonucleotide
tctcggaatccggtgcttgtgattatctcggggtg

SEQ ID NO: 21418 - DNA, 35 bp, Artificial Sequence
  Synthetic oligonucleotide
cctgatccaaggcgtggtgctttaatcgcctagtg

SEQ ID NO: 21419 - DNA, 37 bp, Artificial Sequence
  Synthetic oligonucleotide
attttcgcaagccgcaatggtagccatgccttacaga

SEQ ID NO: 21420 - DNA, 35 bp, Artificial Sequence
  Synthetic oligonucleotide
gacggcacgtgccctgtaactcctctgacccgtca

SEQ ID NO: 21421 - DNA, 38 bp, Artificial Sequence
  Synthetic oligonucleotide
tggagcttcctgtacgcttttgtcgggtgagagattga

SEQ ID NO: 21422 - DNA, 38 bp, Artificial Sequence
  Synthetic oligonucleotide
ggcggagctggggtccgacgctctttgttaggccttga

SEQ ID NO: 21423 - DNA, 38 bp, Artificial Sequence
  Synthetic oligonucleotide
cttgcgttttcactataccaacgtaagccaactattga

SEQ ID NO: 21424 - DNA, 35 bp, Artificial Sequence
  Synthetic oligonucleotide
ggatctaagtcgctttcctactccttgattcatga

SEQ ID NO: 21425 - DNA, 37 bp, Artificial Sequence
  Synthetic oligonucleotide
tgggaatcaatggtacgtacgtcgataaactggtcga

SEQ ID NO: 21426 - DNA, 35 bp, Artificial Sequence
  Synthetic oligonucleotide
gactccgtcaccaattggaccttagtagatatcta

SEQ ID NO: 21427 - DNA, 36 bp, Artificial Sequence
  Synthetic oligonucleotide
ggagaggggccgacactaaaggtggacctttggcca

SEQ ID NO: 21428 - DNA, 36 bp, Artificial Sequence
  Synthetic oligonucleotide
taggcatgtgatgggtcatatgcctaaggctctaca

SEQ ID NO: 21429 - DNA, 36 bp, Artificial Sequence
  Synthetic oligonucleotide
gtgtaaacatagcgaaaaccgtgagcccggatatga

SEQ ID NO: 21430 - DNA, 37 bp, Artificial Sequence
  Synthetic oligonucleotide
gagattcagtcgctcgaacacccgttagggacttgga

SEQ ID NO: 21431 - DNA, 37 bp, Artificial Sequence
  Synthetic oligonucleotide
ccccggctccacgattcgtgccgttatgcgcattgga

SEQ ID NO: 21432 - DNA, 35 bp, Artificial Sequence
  Synthetic oligonucleotide
gcgattgaacgtcatattaatcgtagagaaagcgg

SEQ ID NO: 21433 - DNA, 38 bp, Artificial Sequence
  Synthetic oligonucleotide
gtgtagatacgtgatggtattatgcaattggtctgtga

SEQ ID NO: 21434 - DNA, 35 bp, Artificial Sequence
  Synthetic oligonucleotide
gtcaatccggaagacctatgttgcctccgttaccg

SEQ ID NO: 21435 - DNA, 36 bp, Artificial Sequence
  Synthetic oligonucleotide
actatgcagggaacatggacggaagccccggactta

SEQ ID NO: 21436 - DNA, 36 bp, Artificial Sequence
  Synthetic oligonucleotide
caagcgcaatctaattcgaggaagggtgtggttcca

SEQ ID NO: 21437 - DNA, 37 bp, Artificial Sequence
  Synthetic oligonucleotide
atttagtccagaagcaaaggggacattgttgcgctga

SEQ ID NO: 21438 - DNA, 38 bp, Artificial Sequence
  Synthetic oligonucleotide
ggctagtcaaactgcaatgcccatacttggccacttga

SEQ ID NO: 21439 - DNA, 35 bp, Artificial Sequence
  Synthetic oligonucleotide
gtgctgtcgggctccgacaggcccccggattttag

SEQ ID NO: 21440 - DNA, 35 bp, Artificial Sequence
  Synthetic oligonucleotide
cttacgtcaacctggtaaacgtatataactcccgc

SEQ ID NO: 21441 - DNA, 35 bp, Artificial Sequence
  Synthetic oligonucleotide
ctcgttactgtctacccttggagctgatgtacgta

SEQ ID NO: 21442 - DNA, 35 bp, Artificial Sequence
  Synthetic oligonucleotide
agatagccactaatgaccgggagcacaaggtgcga

SEQ ID NO: 21443 - DNA, 38 bp, Artificial Sequence
  Synthetic oligonucleotide
tgcgggattacgttagatttctgaggtgttatgcctga

SEQ ID NO: 21444 - DNA, 36 bp, Artificial Sequence
  Synthetic oligonucleotide
agatcgcatacgatctttttgaaccccccgcttcga

SEQ ID NO: 21445 - DNA, 35 bp, Artificial Sequence
  Synthetic oligonucleotide
aaataccagcaggcatagccatgcatgcatattca

SEQ ID NO: 21446 - DNA, 36 bp, Artificial Sequence
  Synthetic oligonucleotide
agtcagctgagtcaggtctgagaaccataaggtaca

SEQ ID NO: 21447 - DNA, 36 bp, Artificial Sequence
  Synthetic oligonucleotide
agtagctgcggaattccattatgggcgtaggcataa

SEQ ID NO: 21448 - DNA, 37 bp, Artificial Sequence; identical to SEQ ID NO: 17095
  Synthetic oligonucleotide

SEQ ID NO: 21449 - DNA, 36 bp, Artificial Sequence; identical to SEQ ID NO: 3540
  Synthetic oligonucleotide

SEQ ID NO: 21450 - DNA, 35 bp, Artificial Sequence
  Synthetic oligonucleotide
cagcatttgcgagcataaatctatcgtccagaggt

SEQ ID NO: 21451 - DNA, 36 bp, Artificial Sequence
  Synthetic oligonucleotide
aacacggcccgagtaaataacggggcttacgcccaa

SEQ ID NO: 21452 - DNA, 34 bp, Artificial Sequence
  Synthetic oligonucleotide
tatacgtttatacggccatgcaaatttgcatgat

SEQ ID NO: 21453 - DNA, 35 bp, Artificial Sequence
  Synthetic oligonucleotide
cccaacgcctcttattacgccacaccagaagttgg

SEQ ID NO: 21454 - DNA, 37 bp, Artificial Sequence
  Synthetic oligonucleotide
ggtcagttctaaaacagcgagaatgggtctatgcgga

SEQ ID NO: 21455 - DNA, 38 bp, Artificial Sequence
  Synthetic oligonucleotide
cacgctggaattccctaagcgtacgagttctcgggtga

SEQ ID NO: 21456 - DNA, 36 bp, Artificial Sequence
  Synthetic oligonucleotide
ggtgcaaacatagctgcctgcataagcgtgcctaaa

SEQ ID NO: 21457 - DNA, 38 bp, Artificial Sequence
  Synthetic oligonucleotide
gggcgttcgaattgctacataatgctgttgatttctga

SEQ ID NO: 21458 - DNA, 36 bp, Artificial Sequence
  Synthetic oligonucleotide
ggaatgctagacttaagctcaagtttggcgagggta

SEQ ID NO: 21459 - DNA, 37 bp, Artificial Sequence
  Synthetic oligonucleotide
aagcaggatttgggtaagccgggcctgggatcgttga

SEQ ID NO: 21460 - DNA, 35 bp, Artificial Sequence
  Synthetic oligonucleotide
gagtaatgaacctgtggtctaaaaacaaccctggt

SEQ ID NO: 21461 - DNA, 35 bp, Artificial Sequence
  Synthetic oligonucleotide
gggcaactcgtgagttgccagactggttatcgggc

SEQ ID NO: 21462 - DNA, 36 bp, Artificial Sequence
  Synthetic oligonucleotide
agctagggccaggttttagatcgggttgttgtcaaa

SEQ ID NO: 21463 - DNA, 37 bp, Artificial Sequence
  Synthetic oligonucleotide
tagttaacgcccggtaggctgaaccgagggcacaaga

SEQ ID NO: 21464 - DNA, 35 bp, Artificial Sequence; identical to SEQ ID NO: 9093
  Synthetic oligonucleotide

SEQ ID NO: 21465 - DNA, 35 bp, Artificial Sequence
  Synthetic oligonucleotide
tcggaggtctccgagtatgctgtggctatcgttcc

SEQ ID NO: 21466 - DNA, 37 bp, Artificial Sequence
  Synthetic oligonucleotide
gacgggccccaggggtattactacgtccgttaggaga

SEQ ID NO: 21467 - DNA, 37 bp, Artificial Sequence; identical to SEQ ID NO: 19153
  Synthetic oligonucleotide

SEQ ID NO: 21468 - DNA, 35 bp, Artificial Sequence
  Synthetic oligonucleotide
tgcagaacgtagatatggttcctatgcatggatct

SEQ ID NO: 21469 - DNA, 37 bp, Artificial Sequence
  Synthetic oligonucleotide
tcgggtctcgtaaggcatggtgcatgggtacctttga

SEQ ID NO: 21470 - DNA, 35 bp, Artificial Sequence
  Synthetic oligonucleotide
ggccacgaccagccttaagtttttacgtgccacgg

SEQ ID NO: 21471 - DNA, 37 bp, Artificial Sequence
  Synthetic oligonucleotide
gcgactgcctgtgagaccgcggtgctggatgcacgga

SEQ ID NO: 21472 - DNA, 37 bp, Artificial Sequence
  Synthetic oligonucleotide
ggcttggggtaaacgtgtgtagtcacacgaccattga

SEQ ID NO: 21473 - DNA, 38 bp, Artificial Sequence
  Synthetic oligonucleotide
gcagacggaccctcccagttcccgctgatgccctgtga

SEQ ID NO: 21474 - DNA, 35 bp, Artificial Sequence
  Synthetic oligonucleotide
ctcatcttgcatccctacgtttgctatggtaaggg

SEQ ID NO: 21475 - DNA, 36 bp, Artificial Sequence
  Synthetic oligonucleotide
ttagcctgccgcgcgacgtatatagtactctatcca

SEQ ID NO: 21476 - DNA, 38 bp, Artificial Sequence
  Synthetic oligonucleotide
ggccgcgaacggtttggagcgacggggacctagtatga

SEQ ID NO: 21477 - DNA, 37 bp, Artificial Sequence
  Synthetic oligonucleotide
tgacctaattccgacttgaacgaagttctcaacagga

SEQ ID NO: 21478 - DNA, 36 bp, Artificial Sequence
  Synthetic oligonucleotide
aacctgagtacaccgcaggcaactctgaatgtcata

SEQ ID NO: 21479 - DNA, 36 bp, Artificial Sequence
  Synthetic oligonucleotide
agtgtcgtgagataacacggcgcgttctagcggaga

SEQ ID NO: 21480 - DNA, 37 bp, Artificial Sequence
  Synthetic oligonucleotide
acgtcgacactttgttgattcgactgggatgtaacga

SEQ ID NO: 21481 - DNA, 37 bp, Artificial Sequence
  Synthetic oligonucleotide
ggccacggctataccgtggtccgtcgggccatcacga

SEQ ID NO: 21482 - DNA, 38 bp, Artificial Sequence
  Synthetic oligonucleotide
ggcgtgtgttatacttagccgttgtttgcaagagttga

SEQ ID NO: 21483 - DNA, 35 bp, Artificial Sequence
  Synthetic oligonucleotide
catgcaggaacagagggtagggcgcaacgtaccgg

SEQ ID NO: 21484 - DNA, 37 bp, Artificial Sequence
  Synthetic oligonucleotide
gttacttccgtcatagacgcctgggtgagtgttccga

SEQ ID NO: 21485 - DNA, 35 bp, Artificial Sequence
  Synthetic oligonucleotide
tgaaacacatcgtggacgtatacaccacagggcgt

SEQ ID NO: 21486 - DNA, 34 bp, Artificial Sequence
  Synthetic oligonucleotide
gcccccccccggctaagaacagcaggcatcccac

SEQ ID NO: 21487 - DNA, 37 bp, Artificial Sequence
  Synthetic oligonucleotide
tgagcaaatagacatcttgcaacgctcgcatcaatga

SEQ ID NO: 21488 - DNA, 35 bp, Artificial Sequence
  Synthetic oligonucleotide
gcaatatgtggaattgccagatggcaatccgacag

SEQ ID NO: 21489 - DNA, 35 bp, Artificial Sequence
  Synthetic oligonucleotide
tctcatgccaccaaacatgcgactgatgcgacatg

SEQ ID NO: 21490 - DNA, 37 bp, Artificial Sequence
  Synthetic oligonucleotide
caacagaacatgacgacaaggtcgtccttttagtcga

SEQ ID NO: 21491 - DNA, 36 bp, Artificial Sequence
  Synthetic oligonucleotide
aactgggcagacacgtctgcacgtcttcgataagga

SEQ ID NO: 21492 - DNA, 38 bp, Artificial Sequence
  Synthetic oligonucleotide
ggagcattacaggggctaaagccgaataatcggattga

SEQ ID NO: 21493 - DNA, 35 bp, Artificial Sequence
  Synthetic oligonucleotide
ccgtagaatatgctttcagcctttcgcatggaatc

SEQ ID NO: 21494 - DNA, 35 bp, Artificial Sequence
  Synthetic oligonucleotide
ttcaagctaatgaaacgacttgaccacacgtcgcg

SEQ ID NO: 21495 - DNA, 36 bp, Artificial Sequence
  Synthetic oligonucleotide
gttggcccgagttcttcctggggctgccctacttga

SEQ ID NO: 21496 - DNA, 37 bp, Artificial Sequence
  Synthetic oligonucleotide
ttcgcttcgaggactaagtacaggacgttgcgcctga

SEQ ID NO: 21497 - DNA, 37 bp, Artificial Sequence
  Synthetic oligonucleotide
ctcaaatgctatttgcagtccgaattattggaggcga

SEQ ID NO: 21498 - DNA, 36 bp, Artificial Sequence
  Synthetic oligonucleotide
cacgtctcaccccgtgttggaaatgtgcctcaagca

SEQ ID NO: 21499 - DNA, 38 bp, Artificial Sequence
  Synthetic oligonucleotide
gtaataaagcaggcgtgttcctatgtgtttccccttga

SEQ ID NO: 21500 - DNA, 38 bp, Artificial Sequence
  Synthetic oligonucleotide
atgtagcgaactcaccgccgtcttcgcccaactagtga

SEQ ID NO: 21501 - DNA, 38 bp, Artificial Sequence
  Synthetic oligonucleotide
acacacgcgcagaagccaccagagaatgtggggcatga

SEQ ID NO: 21502 - DNA, 36 bp, Artificial Sequence
  Synthetic oligonucleotide
ctactaagttagcttatttgtaaggtagtagattga

SEQ ID NO: 21503 - DNA, 36 bp, Artificial Sequence
  Synthetic oligonucleotide
caggccgaccattagctgtccttgaaaatgggctca

SEQ ID NO: 21504 - DNA, 35 bp, Artificial Sequence
  Synthetic oligonucleotide
gcatactcggggcttaacccgacggaaggaccact

SEQ ID NO: 21505 - DNA, 35 bp, Artificial Sequence
  Synthetic oligonucleotide
gcgaattctactgagacagtcgaaggtagagccag

SEQ ID NO: 21506 - DNA, 37 bp, Artificial Sequence
  Synthetic oligonucleotide
agccaaagtaggacatagaggtcctagtggatataga

SEQ ID NO: 21507 - DNA, 37 bp, Artificial Sequence
  Synthetic oligonucleotide
gatactgacgtgcgcgaaactaactggatattcgaga

SEQ ID NO: 21508 - DNA, 36 bp, Artificial Sequence
  Synthetic oligonucleotide
ccttgagaaggccattagtctggtaaggagtcataa

SEQ ID NO: 21509 - DNA, 35 bp, Artificial Sequence
  Synthetic oligonucleotide
ccatctgtaggtttgtcggacactccggaatatag

SEQ ID NO: 21510 - DNA, 37 bp, Artificial Sequence
  Synthetic oligonucleotide
gttggaactccaagcgccggtcggacggtatttctga

SEQ ID NO: 21511 - DNA, 35 bp, Artificial Sequence
  Synthetic oligonucleotide
tccatgtgtctcaataagtagtgggattcaaagct

SEQ ID NO: 21512 - DNA, 38 bp, Artificial Sequence
  Synthetic oligonucleotide
tcgcggttttgatctatttgggacccggttatggttga

SEQ ID NO: 21513 - DNA, 38 bp, Artificial Sequence
  Synthetic oligonucleotide
gagctgcctcgtgggtgggtactatttggacgtgttga

SEQ ID NO: 21514 - DNA, 35 bp, Artificial Sequence
  Synthetic oligonucleotide
gctcaggacctcgtgctaatctaaaaatctagtac

SEQ ID NO: 21515 - DNA, 37 bp, Artificial Sequence
  Synthetic oligonucleotide
aagtactacatagggtgcggcctgagggcgccgtgga

SEQ ID NO: 21516 - DNA, 38 bp, Artificial Sequence
  Synthetic oligonucleotide
gacagcacgggaggttatccttactgaagtcatgttga

SEQ ID NO: 21517 - DNA, 35 bp, Artificial Sequence
  Synthetic oligonucleotide
atgcggatctaacttcctcctcctgttcccgggat

SEQ ID NO: 21518 - DNA, 31 bp, Artificial Sequence
  Synthetic oligonucleotide
tttgacaggccctagcaatgcgatgttgtca

SEQ ID NO: 21519 - DNA, 37 bp, Artificial Sequence
  Synthetic oligonucleotide
ggagcagtattgttcttctattgtaccgtcgataaga

SEQ ID NO: 21520 - DNA, 35 bp, Artificial Sequence
  Synthetic oligonucleotide
cagtaatgaagtggctagagattcacgttcgccag

SEQ ID NO: 21521 - DNA, 38 bp, Artificial Sequence
  Synthetic oligonucleotide
gagacgacgggttagcgataaacattcgaatcccttga

SEQ ID NO: 21522 - DNA, 37 bp, Artificial Sequence
  Synthetic oligonucleotide
gcattgcacttttaaggctacagtcatcatagataga

SEQ ID NO: 21523 - DNA, 36 bp, Artificial Sequence
  Synthetic oligonucleotide
gtccaggtggacgggacgcgggtaggagtggaataa

SEQ ID NO: 21524 - DNA, 36 bp, Artificial Sequence
  Synthetic oligonucleotide
gcccgaatatcgagatagttcaatgattttgcagta

SEQ ID NO: 21525 - DNA, 37 bp, Artificial Sequence
  Synthetic oligonucleotide
tcgttactagatcatcccgttgaaacgaatccaggga

SEQ ID NO: 21526 - DNA, 36 bp, Artificial Sequence
  Synthetic oligonucleotide
gtgagggaagtgagtggccctccatttgcaaatgta

SEQ ID NO: 21527 - DNA, 37 bp, Artificial Sequence
  Synthetic oligonucleotide
tcttcactaccaggcatccgcattggttccgaatcga

SEQ ID NO: 21528 - DNA, 37 bp, Artificial Sequence
  Synthetic oligonucleotide
tactatcgtacattgttgcaggcgttccttagtcaga

SEQ ID NO: 21529 - DNA, 38 bp, Artificial Sequence
  Synthetic oligonucleotide
ccggctcaaagtggcggacggacgtgttaaactggtga

SEQ ID NO: 21530 - DNA, 36 bp, Artificial Sequence
  Synthetic oligonucleotide
gccgatcaaattgtggccgttgggttgatagttgga

SEQ ID NO: 21531 - DNA, 37 bp, Artificial Sequence
  Synthetic oligonucleotide
atacgcctctaaggtgttttgcggtactgcgctacga

SEQ ID NO: 21532 - DNA, 37 bp, Artificial Sequence
  Synthetic oligonucleotide
cacggtctggggcgtggtaggggctagctagggttga

SEQ ID NO: 21533 - DNA, 36 bp, Artificial Sequence
  Synthetic oligonucleotide
tgtcatgccgtacgctctgtgttcacactgatgtga

SEQ ID NO: 21534 - DNA, 37 bp, Artificial Sequence
  Synthetic oligonucleotide
tgacggcgtctcttcgcgagacgatacgcggtcatga

SEQ ID NO: 21535 - DNA, 36 bp, Artificial Sequence
  Synthetic oligonucleotide
cctagggtatgtttcgagacctttccctttagagaa

SEQ ID NO: 21536 - DNA, 36 bp, Artificial Sequence
  Synthetic oligonucleotide
gtacgcgcaacgatcatgcctcccgatgctaggata

SEQ ID NO: 21537 - DNA, 36 bp, Artificial Sequence
  Synthetic oligonucleotide
ggccggaatcatactatttaaacctaccggaggtca

SEQ ID NO: 21538 - DNA, 36 bp, Artificial Sequence
  Synthetic oligonucleotide
tagttacaaccgtgggccctctccagcgggtcttca

SEQ ID NO: 21539 - DNA, 35 bp, Artificial Sequence
  Synthetic oligonucleotide
ccggtttcgggtatagttaacgctgccaaattatt

SEQ ID NO: 21540 - DNA, 34 bp, Artificial Sequence
  Synthetic oligonucleotide
gagtcactgggccaatgcctacgtataagcctcc

SEQ ID NO: 21541 - DNA, 35 bp, Artificial Sequence
  Synthetic oligonucleotide
gcaaagagcgtaatgatcttaatttgtaggagctc

SEQ ID NO: 21542 - DNA, 35 bp, Artificial Sequence
  Synthetic oligonucleotide
aatgcgggccgcgcttacccctcccgtgatccccg

SEQ ID NO: 21543 - DNA, 37 bp, Artificial Sequence
  Synthetic oligonucleotide
cactctgcaattctgcagtatgacgcacgagaaagga

SEQ ID NO: 21544 - DNA, 35 bp, Artificial Sequence
  Synthetic oligonucleotide
gcgcaactgccgcagatatcaacttccgcgcctca

SEQ ID NO: 21545 - DNA, 38 bp, Artificial Sequence
  Synthetic oligonucleotide
tgatcactggtgtgcccatatcgttcatcgatatttga

SEQ ID NO: 21546 - DNA, 35 bp, Artificial Sequence
  Synthetic oligonucleotide
tcatatggacaagtcgcatagagcccgtcgataag

SEQ ID NO: 21547 - DNA, 35 bp, Artificial Sequence
  Synthetic oligonucleotide
gtgcacggttccatgccacgtaagcatgttacttc

SEQ ID NO: 21548 - DNA, 35 bp, Artificial Sequence
  Synthetic oligonucleotide
gtgtttactcacgatcaattgcccctttggacacc

SEQ ID NO: 21549 - DNA, 36 bp, Artificial Sequence
  Synthetic oligonucleotide
gtcaaagcaacgatccacgtaatttttgcatgggga

SEQ ID NO: 21550 - DNA, 37 bp, Artificial Sequence
  Synthetic oligonucleotide
ctccaccaaaaagtgtcctaatgggggaggtacgcta

SEQ ID NO: 21551 - DNA, 35 bp, Artificial Sequence
  Synthetic oligonucleotide
aagtctatgggtcagtctgggaagtacgcacagaa

SEQ ID NO: 21552 - DNA, 35 bp, Artificial Sequence
  Synthetic oligonucleotide
tgggaaccaacatagcttttttgtacgtcatttgt

SEQ ID NO: 21553 - DNA, 37 bp, Artificial Sequence
  Synthetic oligonucleotide
gtagagtcgctctgtatttttatgccccccagacaga

SEQ ID NO: 21554 - DNA, 36 bp, Artificial Sequence
  Synthetic oligonucleotide
gaaaccgaacgggaccaacccgggttttcgtaaaga

SEQ ID NO: 21555 - DNA, 37 bp, Artificial Sequence
  Synthetic oligonucleotide
gtcactgccgctgctcctgggatcatataccccggga

SEQ ID NO: 21556 - DNA, 35 bp, Artificial Sequence
  Synthetic oligonucleotide
tcagctggaaacaacgcatacctgaagttcacgta

SEQ ID NO: 21557 - DNA, 38 bp, Artificial Sequence
  Synthetic oligonucleotide
caattaggagctaacagggaaccttcggcctggattga

SEQ ID NO: 21558 - DNA, 35 bp, Artificial Sequence
  Synthetic oligonucleotide
cactacgtcgccggtccgccacggtcgctgatagg

SEQ ID NO: 21559 - DNA, 35 bp, Artificial Sequence
  Synthetic oligonucleotide
tttcaggcgggaatcgccctccttagtgtttgagt

SEQ ID NO: 21560 - DNA, 35 bp, Artificial Sequence
  Synthetic oligonucleotide
agtgttttgggttggagtactgggcggagcaggag

SEQ ID NO: 21561 - DNA, 36 bp, Artificial Sequence
  Synthetic oligonucleotide
ctagcacccatagcgaccggtaaatgtaggttagga

SEQ ID NO: 21562 - DNA, 35 bp, Artificial Sequence
  Synthetic oligonucleotide
atactaacgagtataccagctttgccacgcgctaa

SEQ ID NO: 21563 - DNA, 35 bp, Artificial Sequence
  Synthetic oligonucleotide
tacaaatagagtctagctcataagcagacctgacg

SEQ ID NO: 21564 - DNA, 37 bp, Artificial Sequence
  Synthetic oligonucleotide
acgctgaggtggacgttgcacaccggggacctccaga

SEQ ID NO: 21565 - DNA, 35 bp, Artificial Sequence
  Synthetic oligonucleotide
gaggtcatcatggatattaatgtagagacaggtgc

SEQ ID NO: 21566 - DNA, 35 bp, Artificial Sequence
  Synthetic oligonucleotide
agccgtcattggagtacggatagtaccctacgtta

SEQ ID NO: 21567 - DNA, 37 bp, Artificial Sequence
  Synthetic oligonucleotide
ggaggccggtatgttttatccgacacatcttttaaga

SEQ ID NO: 21568 - DNA, 35 bp, Artificial Sequence
  Synthetic oligonucleotide
gaaagttgctagatgacttggcgagaccttgatgt

SEQ ID NO: 21569 - DNA, 35 bp, Artificial Sequence
  Synthetic oligonucleotide
catggttgaatccattacatcaaatgctctgccgc

SEQ ID NO: 21570 - DNA, 38 bp, Artificial Sequence
  Synthetic oligonucleotide
gcggtgaggacgtgcctcctgaaaggagtattgcatga

SEQ ID NO: 21571 - DNA, 35 bp, Artificial Sequence
  Synthetic oligonucleotide
tgaccttcgtgatcagctgtgagtccaatctcggt

SEQ ID NO: 21572 - DNA, 38 bp, Artificial Sequence
  Synthetic oligonucleotide
cctcccctgcagttcgcctatctcatgtcacacggtga

SEQ ID NO: 21573 - DNA, 35 bp, Artificial Sequence
  Synthetic oligonucleotide
tagttaacactagcgccctactagtggccttttta

SEQ ID NO: 21574 - DNA, 35 bp, Artificial Sequence
  Synthetic oligonucleotide
accaatcggagatttgccgccgtactttacgcaac

SEQ ID NO: 21575 - DNA, 37 bp, Artificial Sequence
  Synthetic oligonucleotide
atgcgtaatgtccaacccagtacttgtgtaggttaga

SEQ ID NO: 21576 - DNA, 37 bp, Artificial Sequence
  Synthetic oligonucleotide
tagttaagggcgaaaaagttaagagaggtcaaatcga

SEQ ID NO: 21577 - DNA, 36 bp, Artificial Sequence
  Synthetic oligonucleotide
acgtgaacgcgctgcatgtcagttcgaatgatatta

SEQ ID NO: 21578 - DNA, 37 bp, Artificial Sequence
  Synthetic oligonucleotide
atgctgtaagaggacgcggccggctcctactagtgga

SEQ ID NO: 21579 - DNA, 36 bp, Artificial Sequence
  Synthetic oligonucleotide
agtacgtgatcgggtttagatcactcgctataggta

SEQ ID NO: 21580 - DNA, 36 bp, Artificial Sequence
  Synthetic oligonucleotide
atagcatgtatcgccggttgacaacacttcaccaga

SEQ ID NO: 21581 - DNA, 37 bp, Artificial Sequence
  Synthetic oligonucleotide
gttcccatccgaacccgagaggtgcaaacttgtatga

SEQ ID NO: 21582 - DNA, 35 bp, Artificial Sequence
  Synthetic oligonucleotide
tgtttcgaagctactcggtgatggactgtgaattt

SEQ ID NO: 21583 - DNA, 34 bp, Artificial Sequence
  Synthetic oligonucleotide
tgatgacgatttcacactgccttgccatgcccac

SEQ ID NO: 21584 - DNA, 36 bp, Artificial Sequence
  Synthetic oligonucleotide
atctgggctataatgcgtgctgccgtgcccaccgaa

SEQ ID NO: 21585 - DNA, 37 bp, Artificial Sequence
  Synthetic oligonucleotide
ttcgtaattgtctgaatgcttagcaatttacatacga

SEQ ID NO: 21586 - DNA, 37 bp, Artificial Sequence
  Synthetic oligonucleotide
ttagtcattcgtttgacgacttagagtatccttatga

SEQ ID NO: 21587 - DNA, 35 bp, Artificial Sequence
  Synthetic oligonucleotide
ttccgcaaacgtatgacagaatactgttcgtgtca

SEQ ID NO: 21588 - DNA, 35 bp, Artificial Sequence
  Synthetic oligonucleotide
gcaagcaggggtccgaaccagtttgacatcgagca

SEQ ID NO: 21589 - DNA, 36 bp, Artificial Sequence
  Synthetic oligonucleotide
taacggcgtagctcccgggactgggaggcccttcta

SEQ ID NO: 21590 - DNA, 37 bp, Artificial Sequence
  Synthetic oligonucleotide
tgccttcatggttatctgtagcgggagaagcaacgga

SEQ ID NO: 21591 - DNA, 35 bp, Artificial Sequence
  Synthetic oligonucleotide
tgatcagggtgacccgaagagctccgctgggctcg

SEQ ID NO: 21592 - DNA, 37 bp, Artificial Sequence
  Synthetic oligonucleotide
tgggtagatcggacttcttaaatgttgtttggctgga

SEQ ID NO: 21593 - DNA, 37 bp, Artificial Sequence
  Synthetic oligonucleotide
gctacgttaattgagactcgacgctcctcgtttgaga

SEQ ID NO: 21594 - DNA, 35 bp, Artificial Sequence
  Synthetic oligonucleotide
ggctaagggacgaccctgaagatgattgatgccga

SEQ ID NO: 21595 - DNA, 36 bp, Artificial Sequence
  Synthetic oligonucleotide
tggggcgcattgctgtagacgccccgcgtgcgcgta

SEQ ID NO: 21596 - DNA, 35 bp, Artificial Sequence
  Synthetic oligonucleotide
cacagtcctaaagatcttattcaaggtcactcaag

SEQ ID NO: 21597 - DNA, 35 bp, Artificial Sequence
  Synthetic oligonucleotide
tgtactagggttagagtctcagtcgctaccctaga

SEQ ID NO: 21598 - DNA, 37 bp, Artificial Sequence
  Synthetic oligonucleotide
ggcttccttaaagctgggttcgaagtttgcgcactga

SEQ ID NO: 21599 - DNA, 35 bp, Artificial Sequence
  Synthetic oligonucleotide
ctgggatgcaaacattcggacgcgtcttgtcactg

SEQ ID NO: 21600 - DNA, 36 bp, Artificial Sequence
  Synthetic oligonucleotide
agagggtaacgagggtttcgtaggctcatagtgcaa

SEQ ID NO: 21601 - DNA, 35 bp, Artificial Sequence
  Synthetic oligonucleotide
tactgtcgtttcattcagtaggactgcttgcttgc

SEQ ID NO: 21602 - DNA, 36 bp, Artificial Sequence
  Synthetic oligonucleotide
gtgtgagctggcgagtaaacggtttactgtacacga

SEQ ID NO: 21603 - DNA, 37 bp, Artificial Sequence
  Synthetic oligonucleotide
ccgacattgggacattaataaagaatgataggatgga

SEQ ID NO: 21604 - DNA, 37 bp, Artificial Sequence
  Synthetic oligonucleotide
gtgtccgtattgctgtggccagtctcttttctttcga

SEQ ID NO: 21605 - DNA, 37 bp, Artificial Sequence
  Synthetic oligonucleotide
agcagtacatatacagacgatcacccgatgtggcgga

SEQ ID NO: 21606 - DNA, 36 bp, Artificial Sequence
  Synthetic oligonucleotide
caaaatgctacgtgcgcaagatttgctggaattaga

SEQ ID NO: 21607 - DNA, 36 bp, Artificial Sequence
  Synthetic oligonucleotide
ggcaaaggagtgtcatactagggctttacgattgta

SEQ ID NO: 21608 - DNA, 37 bp, Artificial Sequence
  Synthetic oligonucleotide
tatttgtaatcaggggtgtgcgagttttccaaaacga

SEQ ID NO: 21609 - DNA, 36 bp, Artificial Sequence
  Synthetic oligonucleotide
gccataccacacaaatgccatcgacttgttctgcaa

SEQ ID NO: 21610 - DNA, 37 bp, Artificial Sequence
  Synthetic oligonucleotide
gagttggtcgcaagtctgtacctaatccacatctaga

SEQ ID NO: 21611 - DNA, 36 bp, Artificial Sequence
  Synthetic oligonucleotide
ggcaacttggcatgacatacgaggctaggtacaata

SEQ ID NO: 21612 - DNA, 36 bp, Artificial Sequence
  Synthetic oligonucleotide
gtacaggtattatgggacacaaccgaagggtattta

SEQ ID NO: 21613 - DNA, 38 bp, Artificial Sequence
  Synthetic oligonucleotide
tttgggggtaagcaatccgggcattcgacggggtgtga

SEQ ID NO: 21614 - DNA, 35 bp, Artificial Sequence
  Synthetic oligonucleotide
cccgagcgggtcgcccgttgcctaaatcttatgat

SEQ ID NO: 21615 - DNA, 38 bp, Artificial Sequence
  Synthetic oligonucleotide
aacagtctagaggtctgggtattctctttctagattga

SEQ ID NO: 21616 - DNA, 37 bp, Artificial Sequence
  Synthetic oligonucleotide
gagcattatttataaggcaacgccgaaccttgaagga

SEQ ID NO: 21617 - DNA, 38 bp, Artificial Sequence
  Synthetic oligonucleotide
cctgtttgcgacgcgtgttagggcataccaagcaatga

SEQ ID NO: 21618 - DNA, 37 bp, Artificial Sequence
  Synthetic oligonucleotide
agcattacgtaggtggtctgcaaatatactttcatga

SEQ ID NO: 21619 - DNA, 35 bp, Artificial Sequence
  Synthetic oligonucleotide
tgggaaaactcgttcaattatccgaatagtccatg

SEQ ID NO: 21620 - DNA, 35 bp, Artificial Sequence
  Synthetic oligonucleotide
atcatcacgggctcagatccacgggaggtcaaagt

SEQ ID NO: 21621 - DNA, 36 bp, Artificial Sequence
  Synthetic oligonucleotide
tggtctgagcgccattcggacacgggggacatgctc

SEQ ID NO: 21622 - DNA, 38 bp, Artificial Sequence
  Synthetic oligonucleotide
gcatgcgcgcgacagtacctgcagactagccatgttga

SEQ ID NO: 21623 - DNA, 35 bp, Artificial Sequence
  Synthetic oligonucleotide
aagatccgtgtaccagggtgtagggcgtatgctag

SEQ ID NO: 21624 - DNA, 36 bp, Artificial Sequence
  Synthetic oligonucleotide
gttgccccgatgatctcgtttgaatcttgcgtacta

SEQ ID NO: 21625 - DNA, 35 bp, Artificial Sequence
  Synthetic oligonucleotide
gttctgattcgtctgcctcgggagatgccggttat

SEQ ID NO: 21626 - DNA, 38 bp, Artificial Sequence
  Synthetic oligonucleotide
agcttgggatacgcactagcatcagtgcttccttgtga

SEQ ID NO: 21627 - DNA, 35 bp, Artificial Sequence
  Synthetic oligonucleotide
aggtgaacggaagacaatttagattgcgagtgatc

SEQ ID NO: 21628 - DNA, 35 bp, Artificial Sequence
  Synthetic oligonucleotide
atgaacagcagtgtaggcataaactgggcaatgta

SEQ ID NO: 21629 - DNA, 37 bp, Artificial Sequence
  Synthetic oligonucleotide
aacctcaccgtgccgaaagactgtggttggtgaatga

SEQ ID NO: 21630 - DNA, 35 bp, Artificial Sequence
  Synthetic oligonucleotide
ttcgcggggaataggatgcacgaattgcttgtttc

SEQ ID NO: 21631 - DNA, 36 bp, Artificial Sequence
  Synthetic oligonucleotide
ccaacagactgcatcgctctcgtcaaatgcatccta

SEQ ID NO: 21632 - DNA, 35 bp, Artificial Sequence
  Synthetic oligonucleotide
ggcaatgattctagtcgagactaaagatgtgaatg

SEQ ID NO: 21633 - DNA, 35 bp, Artificial Sequence
  Synthetic oligonucleotide
ggcaacagacatggtctaacggtgggagaatcact

SEQ ID NO: 21634 - DNA, 37 bp, Artificial Sequence
  Synthetic oligonucleotide
tgcgatccggataagctatgggtgtgcaccctcatga

SEQ ID NO: 21635 - DNA, 36 bp, Artificial Sequence
  Synthetic oligonucleotide
ccgggggagcacgcgctgagaaggtacggaacaaaa

SEQ ID NO: 21636 - DNA, 36 bp, Artificial Sequence
  Synthetic oligonucleotide
gtagctatcatagtacggtatttgatgactggtgga

SEQ ID NO: 21637 - DNA, 35 bp, Artificial Sequence
  Synthetic oligonucleotide
cacaggacgaggggtatcctcggtgctcggacgga

SEQ ID NO: 21638 - DNA, 36 bp, Artificial Sequence
  Synthetic oligonucleotide
ctgctcgtttgggctggtgagtatgccgtagaagta

SEQ ID NO: 21639 - DNA, 37 bp, Artificial Sequence
  Synthetic oligonucleotide
tggtcggttaacaccgtagctcaacagagtggagtga

SEQ ID NO: 21640 - DNA, 35 bp, Artificial Sequence
  Synthetic oligonucleotide
gcagtagagggtccaggaccccaccctaatgattt

SEQ ID NO: 21641 - DNA, 36 bp, Artificial Sequence
  Synthetic oligonucleotide
agtacagcaatagtggtccttaccgttaaacgagca

SEQ ID NO: 21642 - DNA, 35 bp, Artificial Sequence
  Synthetic oligonucleotide
tagtgtataaatggtcctgaagagaatgtctttgg

SEQ ID NO: 21643 - DNA, 35 bp, Artificial Sequence
  Synthetic oligonucleotide
tcgacatggagcggttctgaaggaactgctaatcg

SEQ ID NO: 21644 - DNA, 37 bp, Artificial Sequence
  Synthetic oligonucleotide
gtgctcaacctcagttcgcgtaaccacgcccgtgaga

SEQ ID NO: 21645 - DNA, 37 bp, Artificial Sequence
  Synthetic oligonucleotide
tgagtttcaacgtgcccccccgaaaggaaaggtatga

SEQ ID NO: 21646 - DNA, 36 bp, Artificial Sequence
  Synthetic oligonucleotide
tgtgttttatacaccgtacgtacatcattgtcgaca

SEQ ID NO: 21647 - DNA, 36 bp, Artificial Sequence
  Synthetic oligonucleotide
aattaggaagaaagctctcgttgttagcggacgtga

SEQ ID NO: 21648 - DNA, 36 bp, Artificial Sequence
  Synthetic oligonucleotide
agaccgggtgcgaggtccctacattgctcagaccga

SEQ ID NO: 21649 - DNA, 38 bp, Artificial Sequence
  Synthetic oligonucleotide
gctcccgtccgacttcgtgaatatatgccaggccgtga

SEQ ID NO: 21650 - DNA, 35 bp, Artificial Sequence
  Synthetic oligonucleotide
aattaaggagcccgtttagtgtagagggcgatgag

SEQ ID NO: 21651 - DNA, 35 bp, Artificial Sequence
  Synthetic oligonucleotide
gatcgaaagttaagcgaataacctgcgggtttgtg

SEQ ID NO: 21652 - DNA, 36 bp, Artificial Sequence
  Synthetic oligonucleotide
gcatagagtaatactaagtcatggtggtgaggctaa

SEQ ID NO: 21653 - DNA, 37 bp, Artificial Sequence
  Synthetic oligonucleotide
attgtgaagcgtgtggatgcgggttcctggaagtcga

SEQ ID NO: 21654 - DNA, 35 bp, Artificial Sequence
  Synthetic oligonucleotide
tccgcgaatactcccaccgggctagtatcgccaac

SEQ ID NO: 21655 - DNA, 36 bp, Artificial Sequence
  Synthetic oligonucleotide
tgtgacgagtcaaacgttgcgcagttgtatttagga

SEQ ID NO: 21656 - DNA, 36 bp, Artificial Sequence; identical to SEQ ID NO: 10516
  Synthetic oligonucleotide

SEQ ID NO: 21657 - DNA, 36 bp, Artificial Sequence
  Synthetic oligonucleotide
gaagtgacacgctggctctagcgcgggtcaacagaa

SEQ ID NO: 21658 - DNA, 38 bp, Artificial Sequence
  Synthetic oligonucleotide
tgaatagtgctgagtataatcatgcggaacgggactga

SEQ ID NO: 21659 - DNA, 36 bp, Artificial Sequence
  Synthetic oligonucleotide
gcatttgcccgcttaaatagggctcgcacggattca

SEQ ID NO: 21660 - DNA, 38 bp, Artificial Sequence
  Synthetic oligonucleotide
gcgccgggatgatcttaaatcgggaagttgcactatga

SEQ ID NO: 21661 - DNA, 35 bp, Artificial Sequence
  Synthetic oligonucleotide
gaagcactgcggtggccctgcctcagagatgtaag

SEQ ID NO: 21662 - DNA, 36 bp, Artificial Sequence
  Synthetic oligonucleotide
ataagtaagtatgaacaggacctgagattacggaca

SEQ ID NO: 21663 - DNA, 35 bp, Artificial Sequence
  Synthetic oligonucleotide
gtgcctgacaggaggggcgccgtataggaatagct

SEQ ID NO: 21664 - DNA, 37 bp, Artificial Sequence
  Synthetic oligonucleotide
atgggatctcgtactgcatatgcaccagtgtcattga

SEQ ID NO: 21665 - DNA, 35 bp, Artificial Sequence
  Synthetic oligonucleotide
ttaccgcgctggggggagctggtatactttaacaa

SEQ ID NO: 21666 - DNA, 35 bp, Artificial Sequence
  Synthetic oligonucleotide
tgtaacaaggcaaagtacacaacctcaatctagtg

SEQ ID NO: 21667 - DNA, 37 bp, Artificial Sequence
  Synthetic oligonucleotide
gcgtccgcgctcgtctcaacgcacagttactcacaga

SEQ ID NO: 21668 - DNA, 37 bp, Artificial Sequence
  Synthetic oligonucleotide
agccaactgcgggtactgccatctgacatagatagga

SEQ ID NO: 21669 - DNA, 36 bp, Artificial Sequence
  Synthetic oligonucleotide
gcgatctttctctatgttctaccggagagcatagca

SEQ ID NO: 21670 - DNA, 36 bp, Artificial Sequence
  Synthetic oligonucleotide
ttggcgtagatactctggtcggacccctgtggggga

SEQ ID NO: 21671 - DNA, 37 bp, Artificial Sequence
  Synthetic oligonucleotide
gcccacgagttcagaggctgcttacggtcactaccga

SEQ ID NO: 21672 - DNA, 36 bp, Artificial Sequence
  Synthetic oligonucleotide
acctagtactaggagaatggtcaccgcgggagtaca

SEQ ID NO: 21673 - DNA, 36 bp, Artificial Sequence
  Synthetic oligonucleotide
tcagggctcatgttggacgatacgcgacataccaca

SEQ ID NO: 21674 - DNA, 38 bp, Artificial Sequence
  Synthetic oligonucleotide
tagggctgcactgtaggcatgaagtgggtagtatgtga

SEQ ID NO: 21675 - DNA, 37 bp, Artificial Sequence
  Synthetic oligonucleotide
aatagttagttgtcccgacaactacctacgcactcga

SEQ ID NO: 21676 - DNA, 36 bp, Artificial Sequence
  Synthetic oligonucleotide
tccgcgttagccctaggggtaaagatatcccgcata

SEQ ID NO: 21677 - DNA, 37 bp, Artificial Sequence
  Synthetic oligonucleotide
gttacccgctttgggtgagggttctacaactggcgga

SEQ ID NO: 21678 - DNA, 38 bp, Artificial Sequence
  Synthetic oligonucleotide
ccatatggtccttgatatgggggaatgtttactcgtga

SEQ ID NO: 21679 - DNA, 35 bp, Artificial Sequence
  Synthetic oligonucleotide
agatgcgcaaactgtccttagtactgctgcatctg

SEQ ID NO: 21680 - DNA, 35 bp, Artificial Sequence
  Synthetic oligonucleotide
agccccgttcagggtattgagaacgtcgtcctctc

SEQ ID NO: 21681 - DNA, 37 bp, Artificial Sequence
  Synthetic oligonucleotide
ttcaaggcgtagagtcacgttggtgcaattatccgga

SEQ ID NO: 21682 - DNA, 35 bp, Artificial Sequence
  Synthetic oligonucleotide
tgttcaagtgcctcgggtatgtatggggttagatg

SEQ ID NO: 21683 - DNA, 35 bp, Artificial Sequence
  Synthetic oligonucleotide
aagcccacttatgggtgctggaacgactggacgga

SEQ ID NO: 21684 - DNA, 35 bp, Artificial Sequence
  Synthetic oligonucleotide
aacgcgttccgagttcggtaatggctttgccgtga

SEQ ID NO: 21685 - DNA, 35 bp, Artificial Sequence
  Synthetic oligonucleotide
acggcacttttggcacgtacgatgatcttgattcg

SEQ ID NO: 21686 - DNA, 36 bp, Artificial Sequence
  Synthetic oligonucleotide
gggcctacctgaaagcatggggccagtactgacaaa

SEQ ID NO: 21687 - DNA, 36 bp, Artificial Sequence
  Synthetic oligonucleotide
agaaagaatagagagtggtgttaagtatgctatcta

SEQ ID NO: 21688 - DNA, 37 bp, Artificial Sequence
  Synthetic oligonucleotide
tgtaccgttgtccacgcagtgtgaaatgacggagcga

SEQ ID NO: 21689 - DNA, 35 bp, Artificial Sequence
  Synthetic oligonucleotide
ccttgatgcaaccgcagtgatctgtactatagaac

SEQ ID NO: 21690 - DNA, 35 bp, Artificial Sequence
  Synthetic oligonucleotide
ggctagcatccgctgttgatttcttcgtccctgct

SEQ ID NO: 21691 - DNA, 36 bp, Artificial Sequence
  Synthetic oligonucleotide
gatgtcagggtatgaaccattcatggttctggagaa

SEQ ID NO: 21692 - DNA, 35 bp, Artificial Sequence
  Synthetic oligonucleotide
tactcgagtactgccagagacagttacaaagtata

SEQ ID NO: 21693 - DNA, 36 bp, Artificial Sequence
  Synthetic oligonucleotide
gaaccactagatcacggtaccatggggtcaggcgta

SEQ ID NO: 21694 - DNA, 35 bp, Artificial Sequence
  Synthetic oligonucleotide
gaggagctaaacgaaaagttaccacgatcaaaggc

SEQ ID NO: 21695 - DNA, 36 bp, Artificial Sequence
  Synthetic oligonucleotide
acgatgctaatcgcaggcttgatgtcaacgctggta

SEQ ID NO: 21696 - DNA, 35 bp, Artificial Sequence
  Synthetic oligonucleotide
ataattgacgtgacttgtccttgtggggcgaatat

SEQ ID NO: 21697 - DNA, 35 bp, Artificial Sequence
  Synthetic oligonucleotide
aattagagctcggtacatagtaaagacggtcagct

SEQ ID NO: 21698 - DNA, 36 bp, Artificial Sequence
  Synthetic oligonucleotide
tccggaaagacggctcggacggactgcgtgtgccaa

SEQ ID NO: 21699 - DNA, 38 bp, Artificial Sequence
  Synthetic oligonucleotide
ttcgcggttgtacgataggatctacgtgaagactatga

SEQ ID NO: 21700 - DNA, 36 bp, Artificial Sequence
  Synthetic oligonucleotide
tgtctggtaatcgtaatgagaccactctgcagtcca

SEQ ID NO: 21701 - DNA, 35 bp, Artificial Sequence
  Synthetic oligonucleotide
aaggggccggaagactcgttggtcctatctatgtg

SEQ ID NO: 21702 - DNA, 38 bp, Artificial Sequence
  Synthetic oligonucleotide
gctgcagggcaagacaggttccgtctcgggttccttga

SEQ ID NO: 21703 - DNA, 35 bp, Artificial Sequence
  Synthetic oligonucleotide
gtcgcggtacgtgcttggtacatcaaatcccgctt

SEQ ID NO: 21704 - DNA, 38 bp, Artificial Sequence
  Synthetic oligonucleotide
gtgcggggccaggttggtataatggagttgtagtttga

SEQ ID NO: 21705 - DNA, 38 bp, Artificial Sequence
  Synthetic oligonucleotide
gcgcccggccagtgctgcggaacacgtagtggacatga

SEQ ID NO: 21706 - DNA, 36 bp, Artificial Sequence
  Synthetic oligonucleotide
attagcaggtgcggtcaataggaccgtcgggtttta

SEQ ID NO: 21707 - DNA, 37 bp, Artificial Sequence
  Synthetic oligonucleotide
gagccgccacttgctaccttttgtccatacaaagaga

SEQ ID NO: 21708 - DNA, 35 bp, Artificial Sequence
  Synthetic oligonucleotide
tatccattaagagtacgctggagtggttgcacccg

SEQ ID NO: 21709 - DNA, 35 bp, Artificial Sequence
  Synthetic oligonucleotide
gactaaggagggagattgactttccatgtatcctt

SEQ ID NO: 21710 - DNA, 37 bp, Artificial Sequence
  Synthetic oligonucleotide
attctagtcccagcggattgtcgtccaaaggaaccga

SEQ ID NO: 21711 - DNA, 36 bp, Artificial Sequence
  Synthetic oligonucleotide
aatacaaacgcaggtccgtccacgctgctaataaga

SEQ ID NO: 21712 - DNA, 35 bp, Artificial Sequence
  Synthetic oligonucleotide
gcttcgtggcagaataccgctacgtggcgggtatt

SEQ ID NO: 21713 - DNA, 38 bp, Artificial Sequence
  Synthetic oligonucleotide
gcaatctcagctcagtctgcggggacggacttctttga

SEQ ID NO: 21714 - DNA, 37 bp, Artificial Sequence
  Synthetic oligonucleotide
gtgctctcttgtgtttttagatgagcgcacagtatga

SEQ ID NO: 21715 - DNA, 36 bp, Artificial Sequence
  Synthetic oligonucleotide
gctattgacagcaaagtgaataggaccgtgctggta

SEQ ID NO: 21716 - DNA, 38 bp, Artificial Sequence
  Synthetic oligonucleotide
attacgtatggcataggtctgacagcagaggggcttga

SEQ ID NO: 21717 - DNA, 36 bp, Artificial Sequence
  Synthetic oligonucleotide
acatcgcgccgaacatggattgtaatagttttaaga

SEQ ID NO: 21718 - DNA, 37 bp, Artificial Sequence
  Synthetic oligonucleotide
gcagaggtaatctggaggcatccaaaccctgtagaga

SEQ ID NO: 21719 - DNA, 35 bp, Artificial Sequence
  Synthetic oligonucleotide
ttgcatctgaggcgacatgccgtgacgcggatctg

SEQ ID NO: 21720 - DNA, 36 bp, Artificial Sequence
  Synthetic oligonucleotide
gcctgccgacagtgggccctgaagtcttcctcgtga

SEQ ID NO: 21721 - DNA, 36 bp, Artificial Sequence
  Synthetic oligonucleotide
agttgctcctgtgtccagggaactccagctgaagta

SEQ ID NO: 21722 - DNA, 36 bp, Artificial Sequence
  Synthetic oligonucleotide
aatccgcgtattaataaagagtataacacaaggaga

SEQ ID NO: 21723 - DNA, 35 bp, Artificial Sequence
  Synthetic oligonucleotide
ggtctaattgaccgcagcagtaattcagccctccc

SEQ ID NO: 21724 - DNA, 36 bp, Artificial Sequence
  Synthetic oligonucleotide
aaagccctacacttcgtggagtaggggttagaccga

SEQ ID NO: 21725 - DNA, 36 bp, Artificial Sequence
  Synthetic oligonucleotide
gctgctgagcagtagagcctctggttcgtacacaca

SEQ ID NO: 21726 - DNA, 38 bp, Artificial Sequence
  Synthetic oligonucleotide
tgtggtgacaagtcaactcgtaaactgcagatacatga

SEQ ID NO: 21727 - DNA, 38 bp, Artificial Sequence
  Synthetic oligonucleotide
gtaagtagcctaaaagccggcttttgcgcgtaacgtga

SEQ ID NO: 21728 - DNA, 35 bp, Artificial Sequence
  Synthetic oligonucleotide
tcggagtccgtaaggaggccgtaggtataagtatg

SEQ ID NO: 21729 - DNA, 36 bp, Artificial Sequence
  Synthetic oligonucleotide
gccggaactcatgcacaccgtacgtttctggtctta

SEQ ID NO: 21730 - DNA, 37 bp, Artificial Sequence
  Synthetic oligonucleotide
tgtcgtagacacgcatagagaaagttagtttaacgga

SEQ ID NO: 21731 - DNA, 37 bp, Artificial Sequence
  Synthetic oligonucleotide
tctacagtatgcgggtaggccgtcatttttagcagga

SEQ ID NO: 21732 - DNA, 38 bp, Artificial Sequence
  Synthetic oligonucleotide
gtcatcgcgctgggttaaatgtataagtctatggttga

SEQ ID NO: 21733 - DNA, 38 bp, Artificial Sequence
  Synthetic oligonucleotide
cactgagaacgtcctatcgaattgcaattactttttga

SEQ ID NO: 21734 - DNA, 35 bp, Artificial Sequence
  Synthetic oligonucleotide
gactaagttacgcctagactaggttcggacgagtg

SEQ ID NO: 21735 - DNA, 36 bp, Artificial Sequence
  Synthetic oligonucleotide
ctggaggagaggacaaaaactctcgtcgtggctgaa

SEQ ID NO: 21736 - DNA, 38 bp, Artificial Sequence
  Synthetic oligonucleotide
tggatctagtgcctattgtgtcaggccggactgcctga

SEQ ID NO: 21737 - DNA, 35 bp, Artificial Sequence
  Synthetic oligonucleotide
gggtaaagggatcccacgtagtgtatcatagtata

SEQ ID NO: 21738 - DNA, 35 bp, Artificial Sequence
  Synthetic oligonucleotide
agcagagctgcttttgatagccagaggagttacaa

SEQ ID NO: 21739 - DNA, 38 bp, Artificial Sequence
  Synthetic oligonucleotide
ggcattggccaattgacaccactcatgcccaaatctga

SEQ ID NO: 21740 - DNA, 35 bp, Artificial Sequence
  Synthetic oligonucleotide
agttgcgaccgaaatgtgcctcatagtaatgagta

SEQ ID NO: 21741 - DNA, 35 bp, Artificial Sequence
  Synthetic oligonucleotide
gttggcccgcaactggtattctccggacaggtacc

SEQ ID NO: 21742 - DNA, 36 bp, Artificial Sequence
  Synthetic oligonucleotide
gcatcagccgccgctgctatagttcgcattctacca

SEQ ID NO: 21743 - DNA, 37 bp, Artificial Sequence
  Synthetic oligonucleotide
acatcgtgttgcgtatggtacctaaacctctgagaga

SEQ ID NO: 21744 - DNA, 38 bp, Artificial Sequence
  Synthetic oligonucleotide
gtgactgtcaagagcgaagctaagatgcacgcgtgtga

SEQ ID NO: 21745 - DNA, 35 bp, Artificial Sequence
  Synthetic oligonucleotide
gagatagccctctgcctacgtcacgcggtgcgaaa

SEQ ID NO: 21746 - DNA, 37 bp, Artificial Sequence
  Synthetic oligonucleotide
tcaggctgacgttctacgcgttatggctagacgagga

SEQ ID NO: 21747 - DNA, 37 bp, Artificial Sequence
  Synthetic oligonucleotide
ggagacggatatgggctccctcagcagatcaaggaga

SEQ ID NO: 21748 - DNA, 36 bp, Artificial Sequence
  Synthetic oligonucleotide
accacgccagtgtacgagacgctacataagcagaca

SEQ ID NO: 21749 - DNA, 35 bp, Artificial Sequence
  Synthetic oligonucleotide
ggccaagcaagtgcgggctaccacgactatacggg

SEQ ID NO: 21750 - DNA, 36 bp, Artificial Sequence
  Synthetic oligonucleotide
atgcttgcccgggaagtgtgggtcgtgcttctcgca

SEQ ID NO: 21751 - DNA, 35 bp, Artificial Sequence
  Synthetic oligonucleotide
gcaatcagaatctccccggtaatggggacccacgt

SEQ ID NO: 21752 - DNA, 38 bp, Artificial Sequence
  Synthetic oligonucleotide
gacttgccagatgtcattagccgctggagacttagtga

SEQ ID NO: 21753 - DNA, 35 bp, Artificial Sequence
  Synthetic oligonucleotide
taaaggcggacgcatactcgtagggtattgtgcac

SEQ ID NO: 21754 - DNA, 37 bp, Artificial Sequence
  Synthetic oligonucleotide
gagttggttagcggatagtaaagttcacttgttgata

SEQ ID NO: 21755 - DNA, 37 bp, Artificial Sequence
  Synthetic oligonucleotide
gaatgacgatgcaaaactggatctagtttgagagcga

SEQ ID NO: 21756 - DNA, 36 bp, Artificial Sequence
  Synthetic oligonucleotide
cggttggtaaagtcattcacagtgtgtgccccccga

SEQ ID NO: 21757 - DNA, 38 bp, Artificial Sequence
  Synthetic oligonucleotide
gaccgtagaagcgggggctagtttccagtctctactga

SEQ ID NO: 21758 - DNA, 35 bp, Artificial Sequence
  Synthetic oligonucleotide
gttacgtgtggggttacgccaacgggcgcctagga

SEQ ID NO: 21759 - DNA, 36 bp, Artificial Sequence
  Synthetic oligonucleotide
gaaggtgaggagctaagtccgaattggttatggcga

SEQ ID NO: 21760 - DNA, 36 bp, Artificial Sequence
  Synthetic oligonucleotide
ggatcgactccccccgttcatgtgatcatgtaggga

SEQ ID NO: 21761 - DNA, 36 bp, Artificial Sequence
  Synthetic oligonucleotide
gttcgacaattcattggacacgtacaactcccgtta

SEQ ID NO: 21762 - DNA, 36 bp, Artificial Sequence
  Synthetic oligonucleotide
gtgtttaatcgaccgagccttggaggaacgcctcaa

SEQ ID NO: 21763 - DNA, 36 bp, Artificial Sequence
  Synthetic oligonucleotide
tgacatacaacttttatggatttcgagggattggta

SEQ ID NO: 21764 - DNA, 37 bp, Artificial Sequence
  Synthetic oligonucleotide
gccgtaggttagctgcctctcttgagggacccgccga

SEQ ID NO: 21765 - DNA, 36 bp, Artificial Sequence
  Synthetic oligonucleotide
acgcggtgtcacttcagctgtcatgacggatttcga

SEQ ID NO: 21766 - DNA, 36 bp, Artificial Sequence
  Synthetic oligonucleotide
gatactcgaattacgatgtgctgtggtcgggccgga

SEQ ID NO: 21767 - DNA, 37 bp, Artificial Sequence
  Synthetic oligonucleotide
gtataccgttgcgcgttggtctaaaatcctcagtgga

SEQ ID NO: 21768 - DNA, 35 bp, Artificial Sequence
  Synthetic oligonucleotide
gacaactggtttgccagattgacacagaccccatg

SEQ ID NO: 21769 - DNA, 37 bp, Artificial Sequence
  Synthetic oligonucleotide
ccgcccacttataaaagtctctgaggacatgcaagga

SEQ ID NO: 21770 - DNA, 36 bp, Artificial Sequence
  Synthetic oligonucleotide
gagagggcgctctcgtgctgcataggatacatgaca

SEQ ID NO: 21771 - DNA, 35 bp, Artificial Sequence
  Synthetic oligonucleotide
agtaaacgcatagtacgtataatggctgggattca

SEQ ID NO: 21772 - DNA, 36 bp, Artificial Sequence
  Synthetic oligonucleotide
tgcagtccgtgtaaccactagtgagggataaattta

SEQ ID NO: 21773 - DNA, 36 bp, Artificial Sequence
  Synthetic oligonucleotide
gactgagatagtggtcgttgtatggtaattgaggta

SEQ ID NO: 21774 - DNA, 36 bp, Artificial Sequence
  Synthetic oligonucleotide
taagtaggcccggagtgataatttccactcgcggga

SEQ ID NO: 21775 - DNA, 35 bp, Artificial Sequence; identical to SEQ ID NO: 18583
  Synthetic oligonucleotide

SEQ ID NO: 21776 - DNA, 37 bp, Artificial Sequence
  Synthetic oligonucleotide
agtaccgggttgcgatctgttgttaaggtataactga

SEQ ID NO: 21777 - DNA, 37 bp, Artificial Sequence
  Synthetic oligonucleotide
ttctcacgcagaatacgtgaatagcggacaggataga

SEQ ID NO: 21778 - DNA, 36 bp, Artificial Sequence
  Synthetic oligonucleotide
aacagggcgctagaaggttataccgataagaaggtc

SEQ ID NO: 21779 - DNA, 37 bp, Artificial Sequence
  Synthetic oligonucleotide
ggtgccctatgtatgtgcttcatgggaatcacgtaga

SEQ ID NO: 21780 - DNA, 36 bp, Artificial Sequence
  Synthetic oligonucleotide
tcatgggacgttggagtttctaattcacaatgacga

SEQ ID NO: 21781 - DNA, 37 bp, Artificial Sequence
  Synthetic oligonucleotide
tcaggtccgactcccggtgagacctaatgtgcgatga

SEQ ID NO: 21782 - DNA, 37 bp, Artificial Sequence
  Synthetic oligonucleotide
cctttcgacgtggtacgccgagaatgcccgtacttga

SEQ ID NO: 21783 - DNA, 36 bp, Artificial Sequence
  Synthetic oligonucleotide
ggtccaaacgttagcggtggcatgcaagaagcacga

SEQ ID NO: 21784 - DNA, 38 bp, Artificial Sequence
  Synthetic oligonucleotide
gtacgaaccgcagataggatccggtgttgtactggtga

SEQ ID NO: 21785 - DNA, 36 bp, Artificial Sequence
  Synthetic oligonucleotide
aacgcgtacgtaaggtttaagaataagtgattagga

SEQ ID NO: 21786 - DNA, 35 bp, Artificial Sequence
  Synthetic oligonucleotide
agtcgattggaaagcgcgcgttgatgccatacccc

SEQ ID NO: 21787 - DNA, 35 bp, Artificial Sequence
  Synthetic oligonucleotide
tacgttaaatatccttggttatgtgagtgatcgga

SEQ ID NO: 21788 - DNA, 37 bp, Artificial Sequence
  Synthetic oligonucleotide
agcacgtcaattatgataagttggatttcaccaggga

SEQ ID NO: 21789 - DNA, 36 bp, Artificial Sequence
  Synthetic oligonucleotide
atccgagtacctcgagagacgagatgtttacgtcaa

SEQ ID NO: 21790 - DNA, 36 bp, Artificial Sequence
  Synthetic oligonucleotide
gtgagcggatgtcttggcgacggaagtggacttata

SEQ ID NO: 21791 - DNA, 38 bp, Artificial Sequence
  Synthetic oligonucleotide
ggtctgggacatggcccggagtgtcttggtcatcttga

SEQ ID NO: 21792 - DNA, 35 bp, Artificial Sequence
  Synthetic oligonucleotide
gccaacctaccatccgtccttctgagcttaaccgc

SEQ ID NO: 21793 - DNA, 35 bp, Artificial Sequence
  Synthetic oligonucleotide
actctgtcagctgtataatgtcaacgggccctagc

SEQ ID NO: 21794 - DNA, 36 bp, Artificial Sequence
  Synthetic oligonucleotide
tgaggttaagacgtgtgtgaatttcactgtgtctaa

SEQ ID NO: 21795 - DNA, 35 bp, Artificial Sequence
  Synthetic oligonucleotide
tttcgcgataccggcatgtgaatttatcaacaacc

SEQ ID NO: 21796 - DNA, 37 bp, Artificial Sequence
  Synthetic oligonucleotide
aagaccggagtgtcgagcctagtcattcatagtacga

SEQ ID NO: 21797 - DNA, 37 bp, Artificial Sequence
  Synthetic oligonucleotide
aactgtggcgaaaatcaaggacaccacaaacctgaga

SEQ ID NO: 21798 - DNA, 36 bp, Artificial Sequence
  Synthetic oligonucleotide
tcgtgacctgaagtaagctcagttgtacgcaggaaa

SEQ ID NO: 21799 - DNA, 36 bp, Artificial Sequence
  Synthetic oligonucleotide
agcgcgagcatatagcgtccaggatttctcgtcgaa

SEQ ID NO: 21800 - DNA, 37 bp, Artificial Sequence
  Synthetic oligonucleotide
taagttgcctagatatagtgtgttccgcggtccttga

SEQ ID NO: 21801 - DNA, 35 bp, Artificial Sequence
  Synthetic oligonucleotide
atctccactgctgcaccttctcggggtatacggta

SEQ ID NO: 21802 - DNA, 38 bp, Artificial Sequence
  Synthetic oligonucleotide
gacggaacaatgtttaagcacagtcatagactaattga

SEQ ID NO: 21803 - DNA, 37 bp, Artificial Sequence
  Synthetic oligonucleotide
acagttgctgccgcgctggacagtcaactaggttaga

SEQ ID NO: 21804 - DNA, 37 bp, Artificial Sequence
  Synthetic oligonucleotide
cacctcaggaatttatcagtcataccgtaagtctgga

SEQ ID NO: 21805 - DNA, 35 bp, Artificial Sequence
  Synthetic oligonucleotide
tgagctctggccttagcagcatggcatgctgcgtg

SEQ ID NO: 21806 - DNA, 38 bp, Artificial Sequence
  Synthetic oligonucleotide
actacaggcatgtagtgagggtgtatgaagtgctatga

SEQ ID NO: 21807 - DNA, 36 bp, Artificial Sequence
  Synthetic oligonucleotide
tcccacctgcaacggtcacgcaagctagcttatcaa

SEQ ID NO: 21808 - DNA, 38 bp, Artificial Sequence
  Synthetic oligonucleotide
ctcgaaagcgccatataggtgtcgttcgatacttgtga

SEQ ID NO: 21809 - DNA, 38 bp, Artificial Sequence
  Synthetic oligonucleotide
tatggcactggattccggtcatagcgatccaccgatga

SEQ ID NO: 21810 - DNA, 36 bp, Artificial Sequence
  Synthetic oligonucleotide
actacaggagctgtcctccgtcgcaggaggagccta

SEQ ID NO: 21811 - DNA, 37 bp, Artificial Sequence
  Synthetic oligonucleotide
tggatcgcacgcaaaacaggggagttgcgaaacccga

SEQ ID NO: 21812 - DNA, 38 bp, Artificial Sequence
  Synthetic oligonucleotide
ttggacgatcccgggtccatatagtcatgtccacatga

SEQ ID NO: 21813 - DNA, 35 bp, Artificial Sequence
  Synthetic oligonucleotide
gggtcgtgaaacgtgtctgccgcgcgtctcccgga

SEQ ID NO: 21814 - DNA, 35 bp, Artificial Sequence
  Synthetic oligonucleotide
ttgctcggtgaacgtgtacgaaacgattacgccat

SEQ ID NO: 21815 - DNA, 36 bp, Artificial Sequence
  Synthetic oligonucleotide
gctataaaacacgctaagccatagccccgggagtta

SEQ ID NO: 21816 - DNA, 38 bp, Artificial Sequence
  Synthetic oligonucleotide
tatgcatcgatgctccgacgtttggtgtgattatctga

SEQ ID NO: 21817 - DNA, 35 bp, Artificial Sequence
  Synthetic oligonucleotide
ccccgtacgcccgggcatgcattgtcatttgagtt

SEQ ID NO: 21818 - DNA, 37 bp, Artificial Sequence
  Synthetic oligonucleotide
tgaagccccccctgcccatcgccatacgctgccaaga

SEQ ID NO: 21819 - DNA, 38 bp, Artificial Sequence
  Synthetic oligonucleotide
gcgttcatatatgtaagaattctggggatgccgcctga

SEQ ID NO: 21820 - DNA, 35 bp, Artificial Sequence
  Synthetic oligonucleotide
aaaacgaggcgttgtcgccaaggtaacctcctccc

SEQ ID NO: 21821 - DNA, 35 bp, Artificial Sequence
  Synthetic oligonucleotide
gattgcatgtgaagccgtacgaagtcgggaacagg

SEQ ID NO: 21822 - DNA, 35 bp, Artificial Sequence
  Synthetic oligonucleotide
gtatttcaccgaccgtagtggcctcaggtacgaca

SEQ ID NO: 21823 - DNA, 37 bp, Artificial Sequence
  Synthetic oligonucleotide
gcatgctcgtaacagatcctagcacatgcagtcgtga

SEQ ID NO: 21824 - DNA, 35 bp, Artificial Sequence
  Synthetic oligonucleotide
gaccggggatatgtaaaggtcggactgtcgaactg

SEQ ID NO: 21825 - DNA, 35 bp, Artificial Sequence
  Synthetic oligonucleotide
tgaatgtagacatggtgtgctttccctttgagagg

SEQ ID NO: 21826 - DNA, 36 bp, Artificial Sequence
  Synthetic oligonucleotide
aaccgacagtagatttccctgtgtagtgccgtgagg

SEQ ID NO: 21827 - DNA, 36 bp, Artificial Sequence
  Synthetic oligonucleotide
tactacgatcagcctggactggggagtgctcatata

SEQ ID NO: 21828 - DNA, 37 bp, Artificial Sequence
  Synthetic oligonucleotide
aatgttttgtgatgggcactatcaaagtcgcccacga

SEQ ID NO: 21829 - DNA, 35 bp, Artificial Sequence
  Synthetic oligonucleotide
gtggtgaagcagtgatgagggtcaggagatccggt

SEQ ID NO: 21830 - DNA, 38 bp, Artificial Sequence
  Synthetic oligonucleotide
tctcgacgtctgtaacacagccaagctggtgcttatga

SEQ ID NO: 21831 - DNA, 35 bp, Artificial Sequence
  Synthetic oligonucleotide
atgctagattacagactcacctcaggaccggcgtc

SEQ ID NO: 21832 - DNA, 35 bp, Artificial Sequence
  Synthetic oligonucleotide
tcaaggaaacgtgataggtgtatgttggaaacaag

SEQ ID NO: 21833 - DNA, 38 bp, Artificial Sequence
  Synthetic oligonucleotide
tgatggcgctgtctacaaattagcctcaattggtctga

SEQ ID NO: 21834 - DNA, 38 bp, Artificial Sequence
  Synthetic oligonucleotide
aggggcacccttatgacgtttcgatcaggctgatttga

SEQ ID NO: 21835 - DNA, 37 bp, Artificial Sequence
  Synthetic oligonucleotide
gtcacgtaaactatgcagacacttccagggtcgttga

SEQ ID NO: 21836 - DNA, 37 bp, Artificial Sequence
  Synthetic oligonucleotide
tcgagtggacacaatcattggaggagaaggtgacgga

SEQ ID NO: 21837 - DNA, 36 bp, Artificial Sequence
  Synthetic oligonucleotide
accaaaagggcgacgatgacctaagaccttggttga

SEQ ID NO: 21838 - DNA, 38 bp, Artificial Sequence
  Synthetic oligonucleotide
aactcgtgaagtaaagccaggaaggtactgtgttctga

SEQ ID NO: 21839 - DNA, 35 bp, Artificial Sequence
  Synthetic oligonucleotide
gaagctggggcaccgcggtcgctgtttgtgaatgc

SEQ ID NO: 21840 - DNA, 35 bp, Artificial Sequence
  Synthetic oligonucleotide
ggagcctttcccaggataagttacgcggatgcgct

SEQ ID NO: 21841 - DNA, 37 bp, Artificial Sequence
  Synthetic oligonucleotide
gttgggtgaaagccctgcccccagtctaacgttttga

SEQ ID NO: 21842 - DNA, 38 bp, Artificial Sequence
  Synthetic oligonucleotide
gatcaaggccataaagtacgtcacagacgcttggttga

SEQ ID NO: 21843 - DNA, 35 bp, Artificial Sequence
  Synthetic oligonucleotide
aaaagccggtgttgacgctctttgagtggttgcga

SEQ ID NO: 21844 - DNA, 37 bp, Artificial Sequence
  Synthetic oligonucleotide
ggtaatcgtacgatcgcaaatcctcgacattgagcca

SEQ ID NO: 21845 - DNA, 35 bp, Artificial Sequence
  Synthetic oligonucleotide
ccgttcaatcctatccgccgggacgtacgctcacc

SEQ ID NO: 21846 - DNA, 36 bp, Artificial Sequence
  Synthetic oligonucleotide
gcctacccgagcgctggtgatgaacccttgggttaa

SEQ ID NO: 21847 - DNA, 36 bp, Artificial Sequence
  Synthetic oligonucleotide
tacgaagggctaaacgtccaggcgctagcacgtgaa

SEQ ID NO: 21848 - DNA, 35 bp, Artificial Sequence
  Synthetic oligonucleotide
ttcgaagttggacggtaagcagtcttagtcgtaca

SEQ ID NO: 21849 - DNA, 38 bp, Artificial Sequence
  Synthetic oligonucleotide
gtaacgctttggcttccgctctggtcgtatcacagtga

SEQ ID NO: 21850 - DNA, 36 bp, Artificial Sequence
  Synthetic oligonucleotide
ttacgaccgagccacgaaacatcgggagtaggtaca

SEQ ID NO: 21851 - DNA, 35 bp, Artificial Sequence
  Synthetic oligonucleotide
tttagttcatgcgcggggaaaatttgacggatggt

SEQ ID NO: 21852 - DNA, 36 bp, Artificial Sequence
  Synthetic oligonucleotide
aagatctcgtgccgtaggtccgctgtagatgcgaga

SEQ ID NO: 21853 - DNA, 35 bp, Artificial Sequence
  Synthetic oligonucleotide
tgttagtacattcgtacgggacacatccgtatagt

SEQ ID NO: 21854 - DNA, 36 bp, Artificial Sequence
  Synthetic oligonucleotide
tgtgtctgaaagttaatgttaatgcgaggtcttcga

SEQ ID NO: 21855 - DNA, 36 bp, Artificial Sequence
  Synthetic oligonucleotide
aatcgatgaaatgcggtgccgagttcgttatgcaga

SEQ ID NO: 21856 - DNA, 36 bp, Artificial Sequence
  Synthetic oligonucleotide
tatgtgcctcatgcgccgtaatcaaatgctctctga

SEQ ID NO: 21857 - DNA, 36 bp, Artificial Sequence
  Synthetic oligonucleotide
tttgatgacgttggatggcctatgattgtatttgta

SEQ ID NO: 21858 - DNA, 35 bp, Artificial Sequence
  Synthetic oligonucleotide
gaattcgatcaccgactaatttcaggcacaccttc

SEQ ID NO: 21859 - DNA, 36 bp, Artificial Sequence
  Synthetic oligonucleotide
gcgaagtcatcgcctagctccttggtatagggcaca

SEQ ID NO: 21860 - DNA, 36 bp, Artificial Sequence
  Synthetic oligonucleotide
gttggctgtctataagcgtcgaactacgccagaaca

SEQ ID NO: 21861 - DNA, 35 bp, Artificial Sequence
  Synthetic oligonucleotide
catacatggtgatgtagtacttaggcgtagatagc

SEQ ID NO: 21862 - DNA, 35 bp, Artificial Sequence
  Synthetic oligonucleotide
cggagatcatgcttgtgctaatcaaaatccttggc

SEQ ID NO: 21863 - DNA, 38 bp, Artificial Sequence
  Synthetic oligonucleotide
gtgcacatatagacgaccgtaggccgagaacagcttga

SEQ ID NO: 21864 - DNA, 36 bp, Artificial Sequence
  Synthetic oligonucleotide
tgctcacagatgaatcgcgcgaacgcgtaaaactta

SEQ ID NO: 21865 - DNA, 36 bp, Artificial Sequence
  Synthetic oligonucleotide
aactgtgcccggtcggtgatgaatgtattaaagtca

SEQ ID NO: 21866 - DNA, 36 bp, Artificial Sequence
  Synthetic oligonucleotide
ggtcagtagtcaggctttgtggccttacgacgaata

SEQ ID NO: 21867 - DNA, 37 bp, Artificial Sequence
  Synthetic oligonucleotide
gacaataatctgaaccgtggggagagttcaagcggga

SEQ ID NO: 21868 - DNA, 36 bp, Artificial Sequence
  Synthetic oligonucleotide
aagtgagcaaagagcgtccactgtgagggaaggaaa

SEQ ID NO: 21869 - DNA, 35 bp, Artificial Sequence
  Synthetic oligonucleotide
aatagcaagttgcttccgtatggtaattgctgtgt

SEQ ID NO: 21870 - DNA, 35 bp, Artificial Sequence
  Synthetic oligonucleotide
tacacctttccaggtatctttggaagttgttgtca

SEQ ID NO: 21871 - DNA, 37 bp, Artificial Sequence
  Synthetic oligonucleotide
attcagacactagcgacaagggttagttccgaacgga

SEQ ID NO: 21872 - DNA, 36 bp, Artificial Sequence
  Synthetic oligonucleotide
gagtgactcggcatgtgtgaatcacgaaccacggta

SEQ ID NO: 21873 - DNA, 35 bp, Artificial Sequence
  Synthetic oligonucleotide
gcgtgtggtcactggaagtatagtcggggaaattg

SEQ ID NO: 21874 - DNA, 36 bp, Artificial Sequence
  Synthetic oligonucleotide
agtcatctggccgatcacttacatgtgtgccacgga

SEQ ID NO: 21875 - DNA, 37 bp, Artificial Sequence
  Synthetic oligonucleotide
gaacagcggaccagaccggtatggttttgtttagtga

SEQ ID NO: 21876 - DNA, 35 bp, Artificial Sequence
  Synthetic oligonucleotide
gtgcatcgtgtccgtcaggctggcacaaccactgg

SEQ ID NO: 21877 - DNA, 36 bp, Artificial Sequence
  Synthetic oligonucleotide
gagcagagcggtatctcgaactctcggggtgctgga

SEQ ID NO: 21878 - DNA, 37 bp, Artificial Sequence
  Synthetic oligonucleotide
gcccatcttgatttaggcttcttagaagggagacaga

SEQ ID NO: 21879 - DNA, 35 bp, Artificial Sequence
  Synthetic oligonucleotide
ttgacactattgcgggaatgttcatatgtgtagtg

SEQ ID NO: 21880 - DNA, 38 bp, Artificial Sequence
  Synthetic oligonucleotide
gtagacgctcatttgtcttgcacgagatatgtccttga

SEQ ID NO: 21881 - DNA, 37 bp, Artificial Sequence
  Synthetic oligonucleotide
ggtagttgctgacggctaatagttgagacgatccaga

SEQ ID NO: 21882 - DNA, 38 bp, Artificial Sequence
  Synthetic oligonucleotide
ggtcaggacgacatgcaacgggcatgaacttagggtga

SEQ ID NO: 21883 - DNA, 36 bp, Artificial Sequence
  Synthetic oligonucleotide
gagatatctgagatgaaccaactgaattgctccgta

SEQ ID NO: 21884 - DNA, 38 bp, Artificial Sequence
  Synthetic oligonucleotide
caacagaggatgcgctctggtgtcaatgctgacagtga

SEQ ID NO: 21885 - DNA, 35 bp, Artificial Sequence
  Synthetic oligonucleotide
gtgatacatggacggtcgtcctcaccgatactcac

SEQ ID NO: 21886 - DNA, 37 bp, Artificial Sequence
  Synthetic oligonucleotide
attgcaccgcaataaggtttttaagtaatccagagga

SEQ ID NO: 21887 - DNA, 35 bp, Artificial Sequence
  Synthetic oligonucleotide
gtagtcgtaccgcaagttgcaagtgagcaggtgcc

SEQ ID NO: 21888 - DNA, 36 bp, Artificial Sequence
  Synthetic oligonucleotide
tgtttggggaaacaatttaccgtttcggatgactaa

SEQ ID NO: 21889 - DNA, 38 bp, Artificial Sequence
  Synthetic oligonucleotide
tccagattcggaaaccatcgcaggcttagcgtgggtga

SEQ ID NO: 21890 - DNA, 37 bp, Artificial Sequence
  Synthetic oligonucleotide
aaacgctcccagccctagtgcatggagctgcgcaaga

SEQ ID NO: 21891 - DNA, 35 bp, Artificial Sequence
  Synthetic oligonucleotide
gacatagctttcagcttatgcacgaactctgatat

SEQ ID NO: 21892 - DNA, 36 bp, Artificial Sequence
  Synthetic oligonucleotide
tagtgcgcggggcactgggaccgcagaaaatcgcta

SEQ ID NO: 21893 - DNA, 36 bp, Artificial Sequence
  Synthetic oligonucleotide
agcgctaggtgcgtagccagccgtatgcgctagcca

SEQ ID NO: 21894 - DNA, 35 bp, Artificial Sequence
  Synthetic oligonucleotide
gccgttctacgccaagcttggaacaggtcaaccga

SEQ ID NO: 21895 - DNA, 38 bp, Artificial Sequence
  Synthetic oligonucleotide
tctgccagccgagtccggcatggcaaagcctcctgtga

SEQ ID NO: 21896 - DNA, 38 bp, Artificial Sequence
  Synthetic oligonucleotide
ggtccgtatgtccacgattatcacgagggaactgatga

SEQ ID NO: 21897 - DNA, 38 bp, Artificial Sequence
  Synthetic oligonucleotide
gtgcctctgtaatggcttgccaacgttgccagtcatga

SEQ ID NO: 21898 - DNA, 38 bp, Artificial Sequence
  Synthetic oligonucleotide
ggctaggcgatgggacccgtctgaggcgggacggttga

SEQ ID NO: 21899 - DNA, 37 bp, Artificial Sequence
  Synthetic oligonucleotide
aagcggttgttcgacactgagccagaagcacccctga

SEQ ID NO: 21900 - DNA, 35 bp, Artificial Sequence
  Synthetic oligonucleotide
aagggaaaggaaagctttctcccattcggtatctg

SEQ ID NO: 21901 - DNA, 35 bp, Artificial Sequence
  Synthetic oligonucleotide
atgggggggaccttaccagaccgggcatctgtacg

SEQ ID NO: 21902 - DNA, 35 bp, Artificial Sequence
  Synthetic oligonucleotide
ttcgtgttcgatgatctcaccacacctcgattgcc

SEQ ID NO: 21903 - DNA, 37 bp, Artificial Sequence
  Synthetic oligonucleotide
atgagggacggctttggggtgatctactatatagcga

SEQ ID NO: 21904 - DNA, 37 bp, Artificial Sequence
  Synthetic oligonucleotide
agccatggtgaacgatgtgctattcctatggtaccga

SEQ ID NO: 21905 - DNA, 36 bp, Artificial Sequence
  Synthetic oligonucleotide
gtagtccccttccgctgactgcttggtacgcaaaaa

SEQ ID NO: 21906 - DNA, 37 bp, Artificial Sequence
  Synthetic oligonucleotide
atcacgttcaacaagggtaataatgagtcaaccgcga

SEQ ID NO: 21907 - DNA, 35 bp, Artificial Sequence
  Synthetic oligonucleotide
agaccgacacacgtcgccccgtgggaatatcggcc

SEQ ID NO: 21908 - DNA, 35 bp, Artificial Sequence
  Synthetic oligonucleotide
gttacggttgtcaacaggatgatctttatttgacg

SEQ ID NO: 21909 - DNA, 36 bp, Artificial Sequence
  Synthetic oligonucleotide
atagggcacgattcaaaccgcgatttatctatccga

SEQ ID NO: 21910 - DNA, 36 bp, Artificial Sequence
  Synthetic oligonucleotide
gatccgcgggttattccagaaatttactaatttaga

SEQ ID NO: 21911 - DNA, 35 bp, Artificial Sequence
  Synthetic oligonucleotide
atgaccgtttgatacgctcataggttactaagtcc

SEQ ID NO: 21912 - DNA, 35 bp, Artificial Sequence
  Synthetic oligonucleotide
agacttctaggcaagttacatttcgacgggatctt

SEQ ID NO: 21913 - DNA, 35 bp, Artificial Sequence
  Synthetic oligonucleotide
gcaacagagggtgcacaacattttaccaaaaagtg

SEQ ID NO: 21914 - DNA, 35 bp, Artificial Sequence
  Synthetic oligonucleotide
acaagatgcaatccctgcttcgtaactggaagaac

SEQ ID NO: 21915 - DNA, 38 bp, Artificial Sequence
  Synthetic oligonucleotide
agtaccggtgcaggactgacgttcactcatgttgatga

SEQ ID NO: 21916 - DNA, 35 bp, Artificial Sequence
  Synthetic oligonucleotide
gtggagcacactcgagaaacaatggggctagtgtg

SEQ ID NO: 21917 - DNA, 35 bp, Artificial Sequence
  Synthetic oligonucleotide
aagtagcaacaagcaataccacagtaaagacgggt

SEQ ID NO: 21918 - DNA, 36 bp, Artificial Sequence
  Synthetic oligonucleotide
ggtaaacaggaatccgtcttatgcccccatcggcta

SEQ ID NO: 21919 - DNA, 35 bp, Artificial Sequence
  Synthetic oligonucleotide
cacgccgggtattccaagggatcgctcagaaaatg

SEQ ID NO: 21920 - DNA, 35 bp, Artificial Sequence
  Synthetic oligonucleotide
aagaagaacgactgacttccactcgattcggagtg

SEQ ID NO: 21921 - DNA, 37 bp, Artificial Sequence
  Synthetic oligonucleotide
gatcaggttcaacccgactctgagagccggattcgga

SEQ ID NO: 21922 - DNA, 36 bp, Artificial Sequence
  Synthetic oligonucleotide
tcatgacggttgatagcctgtcagtatgggttcgta

SEQ ID NO: 21923 - DNA, 37 bp, Artificial Sequence
  Synthetic oligonucleotide
tgtcagaagggaccgacctgacggtactggactgtga

SEQ ID NO: 21924 - DNA, 38 bp, Artificial Sequence
  Synthetic oligonucleotide
taatgctggtaaccgatgagatctgagtttggaggtga

SEQ ID NO: 21925 - DNA, 35 bp, Artificial Sequence
  Synthetic oligonucleotide
ctaagttggagcaaaaaaacgtacgcattggtcgc

SEQ ID NO: 21926 - DNA, 35 bp, Artificial Sequence
  Synthetic oligonucleotide
gacttgtggtcttgaaaatgaatgagtttagatga

SEQ ID NO: 21927 - DNA, 36 bp, Artificial Sequence
  Synthetic oligonucleotide
tgattctcaaagtgcgtgatattgaaattgagttca

SEQ ID NO: 21928 - DNA, 37 bp, Artificial Sequence
  Synthetic oligonucleotide
agttattcctctgatctgtataagtctgcacaataga

SEQ ID NO: 21929 - DNA, 38 bp, Artificial Sequence
  Synthetic oligonucleotide
tcacacccgagccgtacttggacggcgaaagccattga

SEQ ID NO: 21930 - DNA, 36 bp, Artificial Sequence
  Synthetic oligonucleotide
gaatttgccggcgatgtgcatgaatattgaacagaa

SEQ ID NO: 21931 - DNA, 35 bp, Artificial Sequence
  Synthetic oligonucleotide
gcttaggtgtcgtaacgatggtttatcaacgaagc

SEQ ID NO: 21932 - DNA, 37 bp, Artificial Sequence
  Synthetic oligonucleotide
ggacagtgtatgtcagggcttattgctgttatctgga

SEQ ID NO: 21933 - DNA, 38 bp, Artificial Sequence
  Synthetic oligonucleotide
tgccccgcggcggggcctcagtaattgtccgtcgctga

SEQ ID NO: 21934 - DNA, 35 bp, Artificial Sequence
  Synthetic oligonucleotide
tcattgtaagttcagtaggtgtgggatatcctggc

SEQ ID NO: 21935 - DNA, 38 bp, Artificial Sequence
  Synthetic oligonucleotide
gacgaactggccgcgcttctcgcgccgggcatcgttga

SEQ ID NO: 21936 - DNA, 37 bp, Artificial Sequence
  Synthetic oligonucleotide
ggtgcctagtgtagggagaagctatgagtcatccgga

SEQ ID NO: 21937 - DNA, 37 bp, Artificial Sequence
  Synthetic oligonucleotide
gataggttgttaatcgggaatagcacggagtacgaga

SEQ ID NO: 21938 - DNA, 35 bp, Artificial Sequence
  Synthetic oligonucleotide
tggtcgaaagcatatgcgactgtgaatgacaggga

SEQ ID NO: 21939 - DNA, 35 bp, Artificial Sequence
  Synthetic oligonucleotide
ggtgatcactgtattagagcaatcccgggctgtca

SEQ ID NO: 21940 - DNA, 37 bp, Artificial Sequence
  Synthetic oligonucleotide
acgtgacgtacggttctgcgtgcctgctacggctaga

SEQ ID NO: 21941 - DNA, 36 bp, Artificial Sequence
  Synthetic oligonucleotide
ggacaattagcctgactatgttcgcgcttgcggtga

SEQ ID NO: 21942 - DNA, 35 bp, Artificial Sequence
  Synthetic oligonucleotide
gaggcctgtgagtgtcaatgatccacttatgctgt

SEQ ID NO: 21943 - DNA, 36 bp, Artificial Sequence
  Synthetic oligonucleotide
accattgcaaggccacgacgtaaggcggttatgcca

SEQ ID NO: 21944 - DNA, 36 bp, Artificial Sequence
  Synthetic oligonucleotide
gatgtgtcaaccatagtacctccgacatgctgttga

SEQ ID NO: 21945 - DNA, 35 bp, Artificial Sequence
  Synthetic oligonucleotide
cacgtaaggttgtcgttccctggtcttacttcggc

SEQ ID NO: 21946 - DNA, 37 bp, Artificial Sequence
  Synthetic oligonucleotide
aggttccggtcgacatccgtgtgtccagagagcacga

SEQ ID NO: 21947 - DNA, 35 bp, Artificial Sequence
  Synthetic oligonucleotide
gtcgaccataacttcccggaatgggttgcttttgg

SEQ ID NO: 21948 - DNA, 36 bp, Artificial Sequence
  Synthetic oligonucleotide
tagtccatgccctggtgtattccaggccctcatgca

SEQ ID NO: 21949 - DNA, 35 bp, Artificial Sequence
  Synthetic oligonucleotide
tggattaatcacctgagtgtgccgatgcaactcct

SEQ ID NO: 21950 - DNA, 37 bp, Artificial Sequence
  Synthetic oligonucleotide
ggcgacttcgtatggtcctaacctgcgagtagatcga

SEQ ID NO: 21951 - DNA, 35 bp, Artificial Sequence
  Synthetic oligonucleotide
agagggtgtagagatcgacgttttttgacggcctg

SEQ ID NO: 21952 - DNA, 36 bp, Artificial Sequence
  Synthetic oligonucleotide
attcagactcctaagcatgcataaatggcactgaca

SEQ ID NO: 21953 - DNA, 38 bp, Artificial Sequence
  Synthetic oligonucleotide
aatgcgcgctcgcggaagacagcatctctgtgagctga

SEQ ID NO: 21954 - DNA, 36 bp, Artificial Sequence
  Synthetic oligonucleotide
ttagggtacggagcagtcctttgtgggggggtggaa

SEQ ID NO: 21955 - DNA, 36 bp, Artificial Sequence
  Synthetic oligonucleotide
atccgacggacggtatgtggggaatgaccctgcgaa

SEQ ID NO: 21956 - DNA, 35 bp, Artificial Sequence
  Synthetic oligonucleotide
gcctagttcaacccactaccttgtcgttaagggtc

SEQ ID NO: 21957 - DNA, 38 bp, Artificial Sequence
  Synthetic oligonucleotide
ttgaggggctggtatctctagtggcatctaccttatga

SEQ ID NO: 21958 - DNA, 36 bp, Artificial Sequence
  Synthetic oligonucleotide
ggtatgggtatgcgcccgagtattggagcaatggta

SEQ ID NO: 21959 - DNA, 36 bp, Artificial Sequence
  Synthetic oligonucleotide
gtcttaggttagccaggttccgtggagtccgtcata

SEQ ID NO: 21960 - DNA, 36 bp, Artificial Sequence; identical to SEQ ID NO: 16498
  Synthetic oligonucleotide

SEQ ID NO: 21961 - DNA, 37 bp, Artificial Sequence
  Synthetic oligonucleotide
agaataggtacggttgtctgttgtagaggtgtaccga

SEQ ID NO: 21962 - DNA, 37 bp, Artificial Sequence; identical to SEQ ID NO: 4775
  Synthetic oligonucleotide

SEQ ID NO: 21963 - DNA, 37 bp, Artificial Sequence
  Synthetic oligonucleotide
tcggatattggtttgttgggtcccgaaatatcggaga

SEQ ID NO: 21964 - DNA, 35 bp, Artificial Sequence
  Synthetic oligonucleotide
tgtggctcaaagagtccgattcgtaaccctagcta

SEQ ID NO: 21965 - DNA, 38 bp, Artificial Sequence
  Synthetic oligonucleotide
agtcaattcggtattgaaaagatgtaggtactccctga

SEQ ID NO: 21966 - DNA, 35 bp, Artificial Sequence
  Synthetic oligonucleotide
gcgtacgttccgtaacacgagtaaagacagatcat

SEQ ID NO: 21967 - DNA, 36 bp, Artificial Sequence
  Synthetic oligonucleotide
gatccgggtgacaacatcaattaggaaatcattgga

SEQ ID NO: 21968 - DNA, 35 bp, Artificial Sequence; identical to SEQ ID NO: 9823
  Synthetic oligonucleotide

SEQ ID NO: 21969 - DNA, 35 bp, Artificial Sequence
  Synthetic oligonucleotide
tcgtacctgcaggaaaggtgagaacatagccttcg

SEQ ID NO: 21970 - DNA, 37 bp, Artificial Sequence
  Synthetic oligonucleotide
aatctagcctgtggatatacggatgtagggggcttga

SEQ ID NO: 21971 - DNA, 38 bp, Artificial Sequence
  Synthetic oligonucleotide
tcaacgctgagcctgaacgttgcttcagttcgtcatga

SEQ ID NO: 21972 - DNA, 35 bp, Artificial Sequence
  Synthetic oligonucleotide
agatgcgctggtatacgcgctgtctttcgatatga

SEQ ID NO: 21973 - DNA, 38 bp, Artificial Sequence
  Synthetic oligonucleotide
ccaacatggcgggtatcgtcccctttatagggacatga

SEQ ID NO: 21974 - DNA, 35 bp, Artificial Sequence; identical to SEQ ID NO: 13117
  Synthetic oligonucleotide

SEQ ID NO: 21975 - DNA, 35 bp, Artificial Sequence
  Synthetic oligonucleotide
tctgggtgacagagatataacgcctaacgtgctct

SEQ ID NO: 21976 - DNA, 37 bp, Artificial Sequence
  Synthetic oligonucleotide
gacatgtcatatgctaaccgacatgttatggttctga

SEQ ID NO: 21977 - DNA, 37 bp, Artificial Sequence
  Synthetic oligonucleotide
gatagcagatgatgctaggtcacttgattataggtga

SEQ ID NO: 21978 - DNA, 36 bp, Artificial Sequence
  Synthetic oligonucleotide
tcaggggtgtctagtcactgcgtgaatggctaaaaa

SEQ ID NO: 21979 - DNA, 36 bp, Artificial Sequence
  Synthetic oligonucleotide
aactgcgggctggggtgtccttttcagtaccctaga

SEQ ID NO: 21980 - DNA, 35 bp, Artificial Sequence
  Synthetic oligonucleotide
tgtttgttcgggaaagtaacgtgtgaaaactggtc

SEQ ID NO: 21981 - DNA, 35 bp, Artificial Sequence
  Synthetic oligonucleotide
gagacggaccagctgccggtatgttgaaacttcgg

SEQ ID NO: 21982 - DNA, 38 bp, Artificial Sequence
  Synthetic oligonucleotide
accagcgccttgagctaaattacccgtagaagtcatga

SEQ ID NO: 21983 - DNA, 36 bp, Artificial Sequence
  Synthetic oligonucleotide
attcgcgactgggcgggctatctgctagccgtatga

SEQ ID NO: 21984 - DNA, 38 bp, Artificial Sequence
  Synthetic oligonucleotide
tgcaatagtgatgcggacggggacctaccgccttctga

SEQ ID NO: 21985 - DNA, 35 bp, Artificial Sequence
  Synthetic oligonucleotide
tacctaaggagattctttgcgtggtgtcggaactg

SEQ ID NO: 21986 - DNA, 35 bp, Artificial Sequence
  Synthetic oligonucleotide
taaatgcccttacagatcgtgtgtaacagatacgc

SEQ ID NO: 21987 - DNA, 37 bp, Artificial Sequence
  Synthetic oligonucleotide
gaattatgagcgcgaagtatcgatgcggactgcttga

SEQ ID NO: 21988 - DNA, 36 bp, Artificial Sequence
  Synthetic oligonucleotide
gcacaagaagtgtgcaatccacgtagcttgggggta

SEQ ID NO: 21989 - DNA, 35 bp, Artificial Sequence
  Synthetic oligonucleotide
aatcttcgcgcttccggtcttaagcgataggcgtc

SEQ ID NO: 21990 - DNA, 35 bp, Artificial Sequence
  Synthetic oligonucleotide
ttccgtaccagcatgcctcagttgtcaatctagtg

SEQ ID NO: 21991 - DNA, 38 bp, Artificial Sequence
  Synthetic oligonucleotide
atcaacccgggaaggttaacgatcagcaaggcgagtga

SEQ ID NO: 21992 - DNA, 36 bp, Artificial Sequence
  Synthetic oligonucleotide
gggatataattgcacctccctccctacagtccccta

SEQ ID NO: 21993 - DNA, 38 bp, Artificial Sequence
  Synthetic oligonucleotide
aagctccagtgtccgcggggggtgcttaactgggttga

SEQ ID NO: 21994 - DNA, 38 bp, Artificial Sequence
  Synthetic oligonucleotide
aactacttgaccatatgaactgagttatactgctttga

SEQ ID NO: 21995 - DNA, 38 bp, Artificial Sequence
  Synthetic oligonucleotide
gtgtcacgggcgccagtaaaggaatcgagatgttttga

SEQ ID NO: 21996 - DNA, 36 bp, Artificial Sequence
  Synthetic oligonucleotide
ttcacatgtatatcgccatgcaaggtgttggggcta

SEQ ID NO: 21997 - DNA, 36 bp, Artificial Sequence
  Synthetic oligonucleotide
catatagacctgtccgcctcattgcacgaccccgaa

SEQ ID NO: 21998 - DNA, 35 bp, Artificial Sequence
  Synthetic oligonucleotide
ttatccctaccatgagcttgactaccaggttcggt

SEQ ID NO: 21999 - DNA, 35 bp, Artificial Sequence
  Synthetic oligonucleotide
gaatggtacagaacggactcacacaccactttctg

SEQ ID NO: 22000 - DNA, 36 bp, Artificial Sequence
  Synthetic oligonucleotide
tagacccggccgcaattgcactcattggtatttaga

SEQ ID NO: 22001 - DNA, 35 bp, Artificial Sequence
  Synthetic oligonucleotide
actggaggagcgtgctcggacactacaaagagcgg

SEQ ID NO: 22002 - DNA, 37 bp, Artificial Sequence
  Synthetic oligonucleotide
gtgacactaagtgtgtgagccccgtgtttgtactgga

SEQ ID NO: 22003 - DNA, 37 bp, Artificial Sequence
  Synthetic oligonucleotide
gatgccgagctcacatcatggaatcgtgccagttgga

SEQ ID NO: 22004 - DNA, 36 bp, Artificial Sequence; identical to SEQ ID NO: 15046
  Synthetic oligonucleotide

SEQ ID NO: 22005 - DNA, 38 bp, Artificial Sequence
  Synthetic oligonucleotide
agtgcgcatgggtttgcggtttagttctgagtcgttga

SEQ ID NO: 22006 - DNA, 37 bp, Artificial Sequence
  Synthetic oligonucleotide
ttcacaaatttgccgttggacagacggccacatgtga

SEQ ID NO: 22007 - DNA, 35 bp, Artificial Sequence
  Synthetic oligonucleotide
actcgcgcctggatgtaaacacattacactgtgga

SEQ ID NO: 22008 - DNA, 37 bp, Artificial Sequence
  Synthetic oligonucleotide
tgcaaccgagacttgcgttttatgtagttcatgcgga

SEQ ID NO: 22009 - DNA, 35 bp, Artificial Sequence; identical to SEQ ID NO: 18951
  Synthetic oligonucleotide

SEQ ID NO: 22010 - DNA, 36 bp, Artificial Sequence
  Synthetic oligonucleotide
ggggactcatgataaatccagcgaattcccttccta

SEQ ID NO: 22011 - DNA, 38 bp, Artificial Sequence
  Synthetic oligonucleotide
gttgcaaaacgacgattagctttgccattatgtactga

SEQ ID NO: 22012 - DNA, 38 bp, Artificial Sequence
  Synthetic oligonucleotide
tatgttcccgcagggccaagagcacgggcttattttga

SEQ ID NO: 22013 - DNA, 37 bp, Artificial Sequence
  Synthetic oligonucleotide
cccaagcaaggctcccgatctgagtgacgaaaataga

SEQ ID NO: 22014 - DNA, 37 bp, Artificial Sequence
  Synthetic oligonucleotide
tgcctcggacaccgagcggatacggaggcaagataga

SEQ ID NO: 22015 - DNA, 36 bp, Artificial Sequence
  Synthetic oligonucleotide
tcgtggcgtgacacgtgcttgcgtggtgatctgcga

SEQ ID NO: 22016 - DNA, 37 bp, Artificial Sequence
  Synthetic oligonucleotide
catctttatcattcgacttgtccaattggccgaaaga

SEQ ID NO: 22017 - DNA, 37 bp, Artificial Sequence
  Synthetic oligonucleotide
ttatgcaacagtacaagttgttgagggtaatccggga

SEQ ID NO: 22018 - DNA, 37 bp, Artificial Sequence
  Synthetic oligonucleotide
cccccgtgcctcggtatcgttacaatgaaccggtcga

SEQ ID NO: 22019 - DNA, 38 bp, Artificial Sequence
  Synthetic oligonucleotide
aataggggtcactttagtttctgtgtctgctcatatga

SEQ ID NO: 22020 - DNA, 37 bp, Artificial Sequence
  Synthetic oligonucleotide
aattctaagtgcggggctctcgcatgggcccaataga

SEQ ID NO: 22021 - DNA, 35 bp, Artificial Sequence
  Synthetic oligonucleotide
ttgcaatgttggcttatgcttccgactcacgctcc

SEQ ID NO: 22022 - DNA, 35 bp, Artificial Sequence
  Synthetic oligonucleotide
gtttcatccgggacaaggtcctatgcggacacggg

SEQ ID NO: 22023 - DNA, 35 bp, Artificial Sequence
  Synthetic oligonucleotide
agcccgcaagctcgtttgttatgtttgggtgtgca

SEQ ID NO: 22024 - DNA, 35 bp, Artificial Sequence
  Synthetic oligonucleotide
tttagcgagacttagtgagcgtgtgcactactaag

SEQ ID NO: 22025 - DNA, 36 bp, Artificial Sequence
  Synthetic oligonucleotide
tcccacgagccgaggtgttcacggttattgtgccta

SEQ ID NO: 22026 - DNA, 36 bp, Artificial Sequence
  Synthetic oligonucleotide
aaatcaacgtcactatggcttcccaacatagcgata

SEQ ID NO: 22027 - DNA, 35 bp, Artificial Sequence
  Synthetic oligonucleotide
ggtgacacgaaaggtgcctcgaggggtaagcctag

SEQ ID NO: 22028 - DNA, 36 bp, Artificial Sequence
  Synthetic oligonucleotide
gttcctcaaggacctgctgttaagcataaaatctta

SEQ ID NO: 22029 - DNA, 35 bp, Artificial Sequence
  Synthetic oligonucleotide
aagacactagcactcgcagctccctatacttcctc

SEQ ID NO: 22030 - DNA, 36 bp, Artificial Sequence
  Synthetic oligonucleotide
tcacgtcgaatccatcattgcgattaaagtaaccga

SEQ ID NO: 22031 - DNA, 35 bp, Artificial Sequence
  Synthetic oligonucleotide
gactagctcgtctgacaactggcgtatcaactcca

SEQ ID NO: 22032 - DNA, 35 bp, Artificial Sequence
  Synthetic oligonucleotide
agtcgggccgccttggtcaagaatttctggggagc

SEQ ID NO: 22033 - DNA, 36 bp, Artificial Sequence
  Synthetic oligonucleotide
atcgtgaactggcatacaatggtacgttataatgga

SEQ ID NO: 22034 - DNA, 35 bp, Artificial Sequence
  Synthetic oligonucleotide
tgtcggactcggatattcatgatgtttcgttcaag

SEQ ID NO: 22035 - DNA, 36 bp, Artificial Sequence
  Synthetic oligonucleotide
tgaaatatcacactgccagagatgtatcgttagcaa

SEQ ID NO: 22036 - DNA, 36 bp, Artificial Sequence
  Synthetic oligonucleotide
aacgttacactaacggttaatgcggcttccttctca

SEQ ID NO: 22037 - DNA, 37 bp, Artificial Sequence
  Synthetic oligonucleotide
gagccaaaggtacatgtctgatgttggcgcggactga

SEQ ID NO: 22038 - DNA, 37 bp, Artificial Sequence
  Synthetic oligonucleotide
gccagagacccgcagtgatttcgccccaagtttcaga

SEQ ID NO: 22039 - DNA, 37 bp, Artificial Sequence
  Synthetic oligonucleotide
gattcgctaggttagaagcagtaatcgtgctacgaga

SEQ ID NO: 22040 - DNA, 35 bp, Artificial Sequence
  Synthetic oligonucleotide
gaatgtaacggactcgtgaatatttgggcgtacaa

SEQ ID NO: 22041 - DNA, 35 bp, Artificial Sequence
  Synthetic oligonucleotide
gcggcaatgcttccaatacgactgggcgacgctat

SEQ ID NO: 22042 - DNA, 35 bp, Artificial Sequence
  Synthetic oligonucleotide
ttcacacaaggctgtgccgagttcgcacacggcat

SEQ ID NO: 22043 - DNA, 38 bp, Artificial Sequence
  Synthetic oligonucleotide
gtcgtatgggccacctggtggggggacgcggaaaatga

SEQ ID NO: 22044 - DNA, 36 bp, Artificial Sequence
  Synthetic oligonucleotide
atgtacatggctatatgcgggtagacagtcatgcta

SEQ ID NO: 22045 - DNA, 36 bp, Artificial Sequence
  Synthetic oligonucleotide
agtggtgcttcgatgctataccttatataattcata

SEQ ID NO: 22046 - DNA, 35 bp, Artificial Sequence
  Synthetic oligonucleotide
ttgtgcaagtgatccgaatcgtagattgggacctt

SEQ ID NO: 22047 - DNA, 36 bp, Artificial Sequence
  Synthetic oligonucleotide
actttatagctggcaagccccctgtgcgcggcttga

SEQ ID NO: 22048 - DNA, 35 bp, Artificial Sequence
  Synthetic oligonucleotide
cgaatgaaattttgaatctgcgttttggtcgccac

SEQ ID NO: 22049 - DNA, 35 bp, Artificial Sequence
  Synthetic oligonucleotide
gcatcatcgctgggatggctctgggtaagtcacac

SEQ ID NO: 22050 - DNA, 36 bp, Artificial Sequence
  Synthetic oligonucleotide
tgtggaatcgctttgacgttgcgcgttaacgcgtta

SEQ ID NO: 22051 - DNA, 35 bp, Artificial Sequence
  Synthetic oligonucleotide
attctatggagtttgcccgctgtttaggcccatgg

SEQ ID NO: 22052 - DNA, 38 bp, Artificial Sequence
  Synthetic oligonucleotide
ttgttgctagatgctgttattacttgagatcggaatga

SEQ ID NO: 22053 - DNA, 35 bp, Artificial Sequence
  Synthetic oligonucleotide
ttttggtgaacgttttttgctggacttcattcggt

SEQ ID NO: 22054 - DNA, 35 bp, Artificial Sequence
  Synthetic oligonucleotide
ggacatgacaccttcagtctccatgcaagcgagcg

SEQ ID NO: 22055 - DNA, 37 bp, Artificial Sequence
  Synthetic oligonucleotide
gcatcaacgttattgtgtcacaggtcatatcccccga

SEQ ID NO: 22056 - DNA, 38 bp, Artificial Sequence
  Synthetic oligonucleotide
gcaagagttgactgcgccctcccccccgtcaaaagtga

SEQ ID NO: 22057 - DNA, 36 bp, Artificial Sequence
  Synthetic oligonucleotide
atgaattgcgccgaaaattgctagtgactgacatta

SEQ ID NO: 22058 - DNA, 37 bp, Artificial Sequence
  Synthetic oligonucleotide
agcctgagctgactgtacggtaatttcgagggacgga

SEQ ID NO: 22059 - DNA, 35 bp, Artificial Sequence
  Synthetic oligonucleotide
tctgctgtcagggagcagcatcaaactttgggctt

SEQ ID NO: 22060 - DNA, 37 bp, Artificial Sequence
  Synthetic oligonucleotide
tcatgttacgacaatccgtgcccttacgatggataga

SEQ ID NO: 22061 - DNA, 36 bp, Artificial Sequence
  Synthetic oligonucleotide
atgtggccttatgttaaatttggagatttttgcaga

SEQ ID NO: 22062 - DNA, 36 bp, Artificial Sequence
  Synthetic oligonucleotide
ttcgcatgagctggttaactcgaatgataagccata

SEQ ID NO: 22063 - DNA, 35 bp, Artificial Sequence
  Synthetic oligonucleotide
aaaccgatcttggacgatgcaacgaccgcgccccc

SEQ ID NO: 22064 - DNA, 35 bp, Artificial Sequence
  Synthetic oligonucleotide
acgcaggcccttcgctagcgcaaggtgtgcagtct

SEQ ID NO: 22065 - DNA, 35 bp, Artificial Sequence
  Synthetic oligonucleotide
aaacgtgtcgcgggtgggccgtcgacttatgcgct

SEQ ID NO: 22066 - DNA, 35 bp, Artificial Sequence
  Synthetic oligonucleotide
tgaggtcctcgcccgctcaaggcaagcagttcacg

SEQ ID NO: 22067 - DNA, 35 bp, Artificial Sequence
  Synthetic oligonucleotide
aatgcatcgcagcagtattgcgaaggctgctaacc

SEQ ID NO: 22068 - DNA, 35 bp, Artificial Sequence
  Synthetic oligonucleotide
ccgtcactgaccttgtgacactgtgcattcatggt

SEQ ID NO: 22069 - DNA, 35 bp, Artificial Sequence
  Synthetic oligonucleotide
gcgctggtttagctatagggtcaatgatcgcacga

SEQ ID NO: 22070 - DNA, 38 bp, Artificial Sequence
  Synthetic oligonucleotide
gtgcatgacactacttgaggacctacaagtacacatga

SEQ ID NO: 22071 - DNA, 38 bp, Artificial Sequence
  Synthetic oligonucleotide
gaacttggcaaactggggcatgtttggatacttcttga

SEQ ID NO: 22072 - DNA, 37 bp, Artificial Sequence
  Synthetic oligonucleotide
gtgggggagggaatggtggcctctttggagtgaatga

SEQ ID NO: 22073 - DNA, 35 bp, Artificial Sequence
  Synthetic oligonucleotide
attagaaaacactcgtcaggaacgtgccagggtgt

SEQ ID NO: 22074 - DNA, 37 bp, Artificial Sequence
  Synthetic oligonucleotide
tgccgcatgtcgcactacgccggtgcgtattgtgaga

SEQ ID NO: 22075 - DNA, 37 bp, Artificial Sequence
  Synthetic oligonucleotide
gtatctcgcccccgtgacatcgcagtccatagtgcga

SEQ ID NO: 22076 - DNA, 37 bp, Artificial Sequence
  Synthetic oligonucleotide
taccccacgaacgttgacagggacgttgtcggtgcga

SEQ ID NO: 22077 - DNA, 36 bp, Artificial Sequence
  Synthetic oligonucleotide
gctcgccgttgcgtagagcatggacgcagcacacca

SEQ ID NO: 22078 - DNA, 37 bp, Artificial Sequence
  Synthetic oligonucleotide
aaatgtgtacgataacttcatatggggtcgtctttga

SEQ ID NO: 22079 - DNA, 36 bp, Artificial Sequence
  Synthetic oligonucleotide
gatactttcagcaaaattcggtccggagccagctaa

SEQ ID NO: 22080 - DNA, 35 bp, Artificial Sequence
  Synthetic oligonucleotide
taagactgtgtagtgctggggtctttcgttaacca

SEQ ID NO: 22081 - DNA, 35 bp, Artificial Sequence
  Synthetic oligonucleotide
gtctcattacacgaaatatacgtagatcacccgtt

SEQ ID NO: 22082 - DNA, 35 bp, Artificial Sequence
  Synthetic oligonucleotide
gtaactgtggcctgtcgtcattttagactcagggc

SEQ ID NO: 22083 - DNA, 37 bp, Artificial Sequence
  Synthetic oligonucleotide
agtgctcgtgcgtctccatacccccccgtagttgtga

SEQ ID NO: 22084 - DNA, 35 bp, Artificial Sequence
  Synthetic oligonucleotide
gaaactggttgatttgtttcagggtcatactaccg

SEQ ID NO: 22085 - DNA, 35 bp, Artificial Sequence
  Synthetic oligonucleotide
ttatacagcagtctaggtttcttaagaccaaccaa

SEQ ID NO: 22086 - DNA, 35 bp, Artificial Sequence
  Synthetic oligonucleotide
tgatatgcctgcgatacaccgtccgagtgttggtg

SEQ ID NO: 22087 - DNA, 36 bp, Artificial Sequence
  Synthetic oligonucleotide
gacttgctcttagcgttacacgggaataagtgctaa

SEQ ID NO: 22088 - DNA, 35 bp, Artificial Sequence
  Synthetic oligonucleotide
gtagagggtcgccagtttttgcctctcccttgccg

SEQ ID NO: 22089 - DNA, 38 bp, Artificial Sequence
  Synthetic oligonucleotide
gttcggaatcagggggtacgctaataacgttgcattga

SEQ ID NO: 22090 - DNA, 35 bp, Artificial Sequence
  Synthetic oligonucleotide
gcataacatgtgcacttaagcttagcgtactctat

SEQ ID NO: 22091 - DNA, 37 bp, Artificial Sequence
  Synthetic oligonucleotide
gcattcttggggtgggttaatatttagcggatgacga

SEQ ID NO: 22092 - DNA, 35 bp, Artificial Sequence
  Synthetic oligonucleotide
tattcctgactacgcatattgtctatgaatctgta

SEQ ID NO: 22093 - DNA, 37 bp, Artificial Sequence
  Synthetic oligonucleotide
tactagcgaggatcaatcaccagaacgtgggggagga

SEQ ID NO: 22094 - DNA, 38 bp, Artificial Sequence
  Synthetic oligonucleotide
agcatacgactggggatgccgccgcttacggacgctga

SEQ ID NO: 22095 - DNA, 35 bp, Artificial Sequence
  Synthetic oligonucleotide
gttgcgacttattagttgtggcggagtgttgtctt

SEQ ID NO: 22096 - DNA, 37 bp, Artificial Sequence
  Synthetic oligonucleotide
agtaggtcgagagtagtcttaacatattattgggtga

SEQ ID NO: 22097 - DNA, 36 bp, Artificial Sequence; identical to SEQ ID NO: 19251
  Synthetic oligonucleotide

SEQ ID NO: 22098 - DNA, 36 bp, Artificial Sequence
  Synthetic oligonucleotide
gggtcgctatcggccgactggggcgctagtcaacaa

SEQ ID NO: 22099 - DNA, 36 bp, Artificial Sequence
  Synthetic oligonucleotide
ggagcactcatgcttaattcgtaggatccaaccgga

SEQ ID NO: 22100 - DNA, 36 bp, Artificial Sequence
  Synthetic oligonucleotide
tgacgacttgaaacgttattactgcgttggacaaga

SEQ ID NO: 22101 - DNA, 38 bp, Artificial Sequence
  Synthetic oligonucleotide
tagagggacccgctaccgggtaagtagggatgatctga

SEQ ID NO: 22102 - DNA, 37 bp, Artificial Sequence
  Synthetic oligonucleotide
tgccctcttggcttctgattataagcacacactcaga

SEQ ID NO: 22103 - DNA, 35 bp, Artificial Sequence
  Synthetic oligonucleotide
gcggtgctcctagccgcgatcgctggtccctctgt

SEQ ID NO: 22104 - DNA, 37 bp, Artificial Sequence
  Synthetic oligonucleotide
cccattgaccccgcaactctgcttatagtcgttacga

SEQ ID NO: 22105 - DNA, 38 bp, Artificial Sequence
  Synthetic oligonucleotide
agactagttctggcccgtgctctctcaggaataggtga

SEQ ID NO: 22106 - DNA, 36 bp, Artificial Sequence
  Synthetic oligonucleotide
tccttgcctggttctcgggtttctcacttatgatca

SEQ ID NO: 22107 - DNA, 37 bp, Artificial Sequence
  Synthetic oligonucleotide
ccatgcaggtggccaggactgcaagagggactaagga

SEQ ID NO: 22108 - DNA, 38 bp, Artificial Sequence
  Synthetic oligonucleotide
gaactgcacgtagacggtagttatgctcgtagagatga

SEQ ID NO: 22109 - DNA, 37 bp, Artificial Sequence
  Synthetic oligonucleotide
aacctgagtgagtctatgctttcaacgacttagtcga

SEQ ID NO: 22110 - DNA, 38 bp, Artificial Sequence
  Synthetic oligonucleotide
gaaggcatcgagggtatttctgataaacggtcaaatga

SEQ ID NO: 22111 - DNA, 38 bp, Artificial Sequence
  Synthetic oligonucleotide
gcctcctgaactctgacctccccgctcgatcgcgctga

SEQ ID NO: 22112 - DNA, 35 bp, Artificial Sequence
  Synthetic oligonucleotide
attacggaagttcttctccgccaactaaatgttgc

SEQ ID NO: 22113 - DNA, 36 bp, Artificial Sequence
  Synthetic oligonucleotide
cgggcgaagacttagatgtgctgcggtgcgcaacta

SEQ ID NO: 22114 - DNA, 38 bp, Artificial Sequence
  Synthetic oligonucleotide
gagcgtgctggttttaccgaccggttctggtaaagtga

SEQ ID NO: 22115 - DNA, 38 bp, Artificial Sequence
  Synthetic oligonucleotide
ccccacggtacggacctcttactgaagaggaccactga

SEQ ID NO: 22116 - DNA, 36 bp, Artificial Sequence
  Synthetic oligonucleotide
ttaaccactgagtgtgaccgacctcggatcgatcca

SEQ ID NO: 22117 - DNA, 37 bp, Artificial Sequence
  Synthetic oligonucleotide
agaaggctccgaaagctattgactggccttggcttga

SEQ ID NO: 22118 - DNA, 37 bp, Artificial Sequence
  Synthetic oligonucleotide
tctacgggtaggtgcgggcaagaagctctatggaaga

SEQ ID NO: 22119 - DNA, 37 bp, Artificial Sequence
  Synthetic oligonucleotide
gacaatccgattcaggagtcccggacgcccggcttga

SEQ ID NO: 22120 - DNA, 35 bp, Artificial Sequence
  Synthetic oligonucleotide
gaccgaataaggtttgtattattgacgggacagaa

SEQ ID NO: 22121 - DNA, 34 bp, Artificial Sequence
  Synthetic oligonucleotide
gtgttaatccgcactgtccagatttgcttcgagc

SEQ ID NO: 22122 - DNA, 36 bp, Artificial Sequence
  Synthetic oligonucleotide
gcagaccattcaccaggacacagtcaatttctcata

SEQ ID NO: 22123 - DNA, 38 bp, Artificial Sequence
  Synthetic oligonucleotide
gtttaaacagcgtagtacattgtttcaattagtcctga

SEQ ID NO: 22124 - DNA, 38 bp, Artificial Sequence
  Synthetic oligonucleotide
gcctgtaagactcactatatgtgagcctcgctttctga

SEQ ID NO: 22125 - DNA, 38 bp, Artificial Sequence
  Synthetic oligonucleotide
ttaggatcggtttgctagaatgcagttctggtacatga

SEQ ID NO: 22126 - DNA, 36 bp, Artificial Sequence
  Synthetic oligonucleotide
gtaagcgtctaaggcttgcagtgcatcaggagtaga

SEQ ID NO: 22127 - DNA, 38 bp, Artificial Sequence
  Synthetic oligonucleotide
gcgtggtcgatattcaaccgtttggcgattatcaatga

SEQ ID NO: 22128 - DNA, 35 bp, Artificial Sequence
  Synthetic oligonucleotide
tgagaggaaatgcatgtttttcgtttcagtaatgc

SEQ ID NO: 22129 - DNA, 35 bp, Artificial Sequence
  Synthetic oligonucleotide
tttataccggagagcataaagaatggttacttttg

SEQ ID NO: 22130 - DNA, 37 bp, Artificial Sequence
  Synthetic oligonucleotide
ttctcgtattcgggaacgttgggctatctctgttcga

SEQ ID NO: 22131 - DNA, 37 bp, Artificial Sequence
  Synthetic oligonucleotide
tatcggtcgcttcactggtcgagcgataccgtacgga

SEQ ID NO: 22132 - DNA, 38 bp, Artificial Sequence
  Synthetic oligonucleotide
acagtggttgagtaaatggggacatcatcatacattga

SEQ ID NO: 22133 - DNA, 35 bp, Artificial Sequence
  Synthetic oligonucleotide
aactcagaggaatcaatgattagtatgcaaacgag

SEQ ID NO: 22134 - DNA, 36 bp, Artificial Sequence
  Synthetic oligonucleotide
atgactcgcggccgagacgggggcgagttcacttta

SEQ ID NO: 22135 - DNA, 37 bp, Artificial Sequence
  Synthetic oligonucleotide
aggcgcccccccgctttgaacgtgttgctttggacga

SEQ ID NO: 22136 - DNA, 35 bp, Artificial Sequence
  Synthetic oligonucleotide
ggtgctaagcagtaaccccaatggtgacggagaat

SEQ ID NO: 22137 - DNA, 36 bp, Artificial Sequence
  Synthetic oligonucleotide
ggcgttatgggtgaagtctagctctactttggacga

SEQ ID NO: 22138 - DNA, 35 bp, Artificial Sequence
  Synthetic oligonucleotide
actacaagaactgagagattgcagggtatcggctt

SEQ ID NO: 22139 - DNA, 35 bp, Artificial Sequence
  Synthetic oligonucleotide
ctgaaataaactgttgcgagaattgctagctacca

SEQ ID NO: 22140 - DNA, 35 bp, Artificial Sequence
  Synthetic oligonucleotide
gagtaacggacagatgactgagctaatgcgccagt

SEQ ID NO: 22141 - DNA, 35 bp, Artificial Sequence
  Synthetic oligonucleotide
ctcggtttaagacttccgtcgggaaggagacgtgt

SEQ ID NO: 22142 - DNA, 36 bp, Artificial Sequence
  Synthetic oligonucleotide
gtaaatgatgtagtcccagggtcgtgaatgtagcaa

SEQ ID NO: 22143 - DNA, 38 bp, Artificial Sequence
  Synthetic oligonucleotide
ggggggaaggtacgttctacaatttcaccacgtgctga

SEQ ID NO: 22144 - DNA, 35 bp, Artificial Sequence
  Synthetic oligonucleotide
agtgggaggtcttgtagtaggaatatatcaacacc

SEQ ID NO: 22145 - DNA, 36 bp, Artificial Sequence
  Synthetic oligonucleotide
cagtctcgtgaatgctaccttagccacttcctccta

SEQ ID NO: 22146 - DNA, 37 bp, Artificial Sequence
  Synthetic oligonucleotide
gaatagggcagtccgtagttcctatcaccgatctgga

SEQ ID NO: 22147 - DNA, 36 bp, Artificial Sequence
  Synthetic oligonucleotide
atccctatcgcgggaactcggttagacttgagccaa

SEQ ID NO: 22148 - DNA, 36 bp, Artificial Sequence
  Synthetic oligonucleotide
tcaacagagtaaccggaaggtgttgcgcgttacgga

SEQ ID NO: 22149 - DNA, 37 bp, Artificial Sequence
  Synthetic oligonucleotide
actccacgtggctcagggcttgttaattggtactaga

SEQ ID NO: 22150 - DNA, 35 bp, Artificial Sequence
  Synthetic oligonucleotide
gggagccatgcgtgggaagccgcgtagtggggcgc

SEQ ID NO: 22151 - DNA, 35 bp, Artificial Sequence
  Synthetic oligonucleotide
tggcattcttgtagtgacttttgcaacatgggatt

SEQ ID NO: 22152 - DNA, 35 bp, Artificial Sequence
  Synthetic oligonucleotide
taggtcactatatagtgagttggatggcttgtcac

SEQ ID NO: 22153 - DNA, 35 bp, Artificial Sequence
  Synthetic oligonucleotide
tcactagacgcaacaacgggtcgctcatgtacagg

SEQ ID NO: 22154 - DNA, 38 bp, Artificial Sequence
  Synthetic oligonucleotide
taaggacgcaacactatagtaatgtgttaacatgctga

SEQ ID NO: 22155 - DNA, 38 bp, Artificial Sequence
  Synthetic oligonucleotide
tggactcgagcatgacagaggtcgagtgcaggtattga

SEQ ID NO: 22156 - DNA, 35 bp, Artificial Sequence
  Synthetic oligonucleotide
gatatcccaacgtttgcgaacataacatgaggtgg

SEQ ID NO: 22157 - DNA, 36 bp, Artificial Sequence
  Synthetic oligonucleotide
gaaacataggtgaagagggagaatttgatcctccca

SEQ ID NO: 22158 - DNA, 35 bp, Artificial Sequence
  Synthetic oligonucleotide
ggattcgaaagagtagttctacacaggcgcaaggc

SEQ ID NO: 22159 - DNA, 36 bp, Artificial Sequence
  Synthetic oligonucleotide
ttgcccagtgcggatcttagactccctcaagtggta

SEQ ID NO: 22160 - DNA, 35 bp, Artificial Sequence
  Synthetic oligonucleotide
ggtggagaaagtatattgtccgcaactgttacctt

SEQ ID NO: 22161 - DNA, 36 bp, Artificial Sequence
  Synthetic oligonucleotide
agagtatgaaggtgcctcaagagggttagtgggcaa

SEQ ID NO: 22162 - DNA, 35 bp, Artificial Sequence
  Synthetic oligonucleotide
gaatcacgtctatagatctgtttatgagttatgtt

SEQ ID NO: 22163 - DNA, 38 bp, Artificial Sequence
  Synthetic oligonucleotide
gactataggaccgtgtgtactgaggtgtccatgggtga

SEQ ID NO: 22164 - DNA, 36 bp, Artificial Sequence
  Synthetic oligonucleotide
cgcgagggcgttcttctgtcgatgaagcgacgtcca

SEQ ID NO: 22165 - DNA, 35 bp, Artificial Sequence
  Synthetic oligonucleotide
tgatagcatcaagccagtctagagactaataagag

SEQ ID NO: 22166 - DNA, 36 bp, Artificial Sequence
  Synthetic oligonucleotide
gagtcgcgaaagattgcgcgaattcgtgggcaataa

SEQ ID NO: 22167 - DNA, 38 bp, Artificial Sequence
  Synthetic oligonucleotide
gtttaggcacatgtaggcttacgatccaggcatcttga

SEQ ID NO: 22168 - DNA, 36 bp, Artificial Sequence
  Synthetic oligonucleotide
agacgaattacaattgcggccctgcagggccaatga

SEQ ID NO: 22169 - DNA, 35 bp, Artificial Sequence
  Synthetic oligonucleotide
gagacctgatccaaatgggtgtggcttctgggttc

SEQ ID NO: 22170 - DNA, 35 bp, Artificial Sequence
  Synthetic oligonucleotide
gctgggaactggagtgtactaatgcaaacggccta

SEQ ID NO: 22171 - DNA, 35 bp, Artificial Sequence
  Synthetic oligonucleotide
taattgcagtcccgttcaaattcagagttgtttcg

SEQ ID NO: 22172 - DNA, 35 bp, Artificial Sequence
  Synthetic oligonucleotide
attacagccgagtcgttgtaagatacatactcgat

SEQ ID NO: 22173 - DNA, 38 bp, Artificial Sequence
  Synthetic oligonucleotide
atctcggacctcgcctgcgcggggagtgataggtgtga

SEQ ID NO: 22174 - DNA, 36 bp, Artificial Sequence
  Synthetic oligonucleotide
agtaggtcacctactcgtgagtgcagggtacagcaa

SEQ ID NO: 22175 - DNA, 36 bp, Artificial Sequence
  Synthetic oligonucleotide
gatgtctttcgcgagccgcgtctaaaattggaagta

SEQ ID NO: 22176 - DNA, 38 bp, Artificial Sequence
  Synthetic oligonucleotide
gggtggttgtgccagagatttgtttgaaatatagctga

SEQ ID NO: 22177 - DNA, 36 bp, Artificial Sequence
  Synthetic oligonucleotide
tcccagtgcgtgctgcagtaggtttctctaagtgga

SEQ ID NO: 22178 - DNA, 37 bp, Artificial Sequence
  Synthetic oligonucleotide
gatactgattgcactcatgcaattgcggtacacttga

SEQ ID NO: 22179 - DNA, 37 bp, Artificial Sequence
  Synthetic oligonucleotide
agcgctcgaagcgctcgattggtatcgctttcgggga

SEQ ID NO: 22180 - DNA, 38 bp, Artificial Sequence
  Synthetic oligonucleotide
acgcacatgagcaaacaagaaggaggtggtctttctga

SEQ ID NO: 22181 - DNA, 35 bp, Artificial Sequence
  Synthetic oligonucleotide
ctgagttcagccgaagaacaacgatggcatggggg

SEQ ID NO: 22182 - DNA, 36 bp, Artificial Sequence
  Synthetic oligonucleotide
ttggttacaaacgtcgcagtgagttgatggggtata

SEQ ID NO: 22183 - DNA, 36 bp, Artificial Sequence
  Synthetic oligonucleotide
taagtcgctgagggcacatgctaaaccgacgggtta

SEQ ID NO: 22184 - DNA, 36 bp, Artificial Sequence
  Synthetic oligonucleotide
acggtccttcagattaggctgttttagtgcaggtaa

SEQ ID NO: 22185 - DNA, 35 bp, Artificial Sequence
  Synthetic oligonucleotide
tttgccgacggcgattgtccagggtcgtataacca

SEQ ID NO: 22186 - DNA, 35 bp, Artificial Sequence
  Synthetic oligonucleotide
gccgccattctaattggcggtgggatgaaaccagg

SEQ ID NO: 22187 - DNA, 35 bp, Artificial Sequence
  Synthetic oligonucleotide
atacattgcctaaggcgtcgtgtggactaggagtc

SEQ ID NO: 22188 - DNA, 35 bp, Artificial Sequence
  Synthetic oligonucleotide
taccgtgatgtatggttccagcatgtggcatttgg

SEQ ID NO: 22189 - DNA, 35 bp, Artificial Sequence
  Synthetic oligonucleotide
gatagggagcctaagcggttcaagcatgccttcca

SEQ ID NO: 22190 - DNA, 34 bp, Artificial Sequence
  Synthetic oligonucleotide
gggcgttaatatcaacacgtcaccgggttgtata

SEQ ID NO: 22191 - DNA, 36 bp, Artificial Sequence
  Synthetic oligonucleotide
tagcaagatccggctctggtcttagcccgtacccaa

SEQ ID NO: 22192 - DNA, 38 bp, Artificial Sequence
  Synthetic oligonucleotide
ggtgtcatggttctagggagccgctatcttcgagttga

SEQ ID NO: 22193 - DNA, 38 bp, Artificial Sequence
  Synthetic oligonucleotide
cttcggacacgttacactcagtcgttcgactgctttga

SEQ ID NO: 22194 - DNA, 37 bp, Artificial Sequence
  Synthetic oligonucleotide
gtggtccggggaacactgcggccctgttccattccga

SEQ ID NO: 22195 - DNA, 36 bp, Artificial Sequence
  Synthetic oligonucleotide
gagacttatctgtaacctgatgtgtttacggctcta

SEQ ID NO: 22196 - DNA, 35 bp, Artificial Sequence
  Synthetic oligonucleotide
atgttcaaagacatgggacgtagattgataagggt

SEQ ID NO: 22197 - DNA, 38 bp, Artificial Sequence
  Synthetic oligonucleotide
ataactccatcctgatctcacactcgcagtcgcattga

SEQ ID NO: 22198 - DNA, 36 bp, Artificial Sequence
  Synthetic oligonucleotide
gcctaaccgtcgatccacagcatcgccggaaggcaa

SEQ ID NO: 22199 - DNA, 36 bp, Artificial Sequence
  Synthetic oligonucleotide
attggagtcagttctttaacaaatccgcctgtctca

SEQ ID NO: 22200 - DNA, 36 bp, Artificial Sequence
  Synthetic oligonucleotide
acggatgggattacgcggtagttacaattcgattta

SEQ ID NO: 22201 - DNA, 37 bp, Artificial Sequence
  Synthetic oligonucleotide
gtagtttgctactcggcgcattgcgcgacatcctgga

SEQ ID NO: 22202 - DNA, 35 bp, Artificial Sequence
  Synthetic oligonucleotide
gcatgtgcggtcatagaatgagtatcctcgttgtg

SEQ ID NO: 22203 - DNA, 38 bp, Artificial Sequence
  Synthetic oligonucleotide
aaggaccgcaattagcgtggggtggttggagtagttga

SEQ ID NO: 22204 - DNA, 36 bp, Artificial Sequence
  Synthetic oligonucleotide
atcgtcactctcgcccctccaaaattgtgctgcgca

SEQ ID NO: 22205 - DNA, 35 bp, Artificial Sequence
  Synthetic oligonucleotide
agtccgcgtatatcgacggggataacgaccgtaag

SEQ ID NO: 22206 - DNA, 35 bp, Artificial Sequence
  Synthetic oligonucleotide
gatagtcgtactggcatccatgagcttagtatgaa

SEQ ID NO: 22207 - DNA, 37 bp, Artificial Sequence
  Synthetic oligonucleotide
gctgtcagcacgcaacactttaatacgatgtgacgga

SEQ ID NO: 22208 - DNA, 37 bp, Artificial Sequence
  Synthetic oligonucleotide
gtagtactctgggtcgattaaggtgccttctcccaga

SEQ ID NO: 22209 - DNA, 38 bp, Artificial Sequence
  Synthetic oligonucleotide
agcatgcatggctaacgctctctaaagtctgagactga

SEQ ID NO: 22210 - DNA, 37 bp, Artificial Sequence
  Synthetic oligonucleotide
acagtcatgtaccgaggattccatccagcacgagcga

SEQ ID NO: 22211 - DNA, 37 bp, Artificial Sequence
  Synthetic oligonucleotide
actcgggagtcccggaatctacgtcggtcatccctga

SEQ ID NO: 22212 - DNA, 36 bp, Artificial Sequence
  Synthetic oligonucleotide
ttggggggtggaccagctggacgtcatgcacctaga

SEQ ID NO: 22213 - DNA, 36 bp, Artificial Sequence
  Synthetic oligonucleotide
gtacgtgcacttgatgcagtgcactctagacataga

SEQ ID NO: 22214 - DNA, 35 bp, Artificial Sequence
  Synthetic oligonucleotide
gtccttacgtgtcaacgaaaggagaatgctatata

SEQ ID NO: 22215 - DNA, 36 bp, Artificial Sequence
  Synthetic oligonucleotide
ggttgttacaggactatgtaggggttttacgtgata

SEQ ID NO: 22216 - DNA, 36 bp, Artificial Sequence
  Synthetic oligonucleotide
tcgttagctatttgacgggcgtacgttcagctcaca

SEQ ID NO: 22217 - DNA, 36 bp, Artificial Sequence
  Synthetic oligonucleotide
agaggtatgtaatccatccctctgtcgtattcagca

SEQ ID NO: 22218 - DNA, 36 bp, Artificial Sequence
  Synthetic oligonucleotide
gtttggttatacggtcagtccctaagtttcctgata

SEQ ID NO: 22219 - DNA, 37 bp, Artificial Sequence
  Synthetic oligonucleotide
gaatcctgggtcattacagccgatgattgcggattga

SEQ ID NO: 22220 - DNA, 36 bp, Artificial Sequence
  Synthetic oligonucleotide
gacggctgtttagtcggtctttccgtcacgctctaa

SEQ ID NO: 22221 - DNA, 38 bp, Artificial Sequence
  Synthetic oligonucleotide
agtggctgaccggcataaacgaaatgcagactgtttga

SEQ ID NO: 22222 - DNA, 37 bp, Artificial Sequence
  Synthetic oligonucleotide
gtccgcaagaactgcctgaatgaacatgtaatgctga

SEQ ID NO: 22223 - DNA, 35 bp, Artificial Sequence
  Synthetic oligonucleotide
gcagcatgcggctatactgtcgaattcggacctgg

SEQ ID NO: 22224 - DNA, 35 bp, Artificial Sequence
  Synthetic oligonucleotide
accgtgtaaacaagatgcgtccagctaggaaaaca

SEQ ID NO: 22225 - DNA, 37 bp, Artificial Sequence
  Synthetic oligonucleotide
taccgtaactgcaggtgggacatttatggggtcgtga

SEQ ID NO: 22226 - DNA, 35 bp, Artificial Sequence
  Synthetic oligonucleotide
tctcgaccccccaatcgtcgtggaaatgtgcactt

SEQ ID NO: 22227 - DNA, 35 bp, Artificial Sequence
  Synthetic oligonucleotide
agatcctcagggcatctgatcggcaaatttataat

SEQ ID NO: 22228 - DNA, 35 bp, Artificial Sequence
  Synthetic oligonucleotide
taggctgtccccgctctttcgcaaattaagcacgc

SEQ ID NO: 22229 - DNA, 35 bp, Artificial Sequence
  Synthetic oligonucleotide
tgctcttgcatgcaccttatttcagaccacccccc

SEQ ID NO: 22230 - DNA, 38 bp, Artificial Sequence
  Synthetic oligonucleotide
ctagccgctagtggtcgatccttgggacaagcagttga

SEQ ID NO: 22231 - DNA, 38 bp, Artificial Sequence
  Synthetic oligonucleotide
aaactcggtagaaatgtgattaggcgaagtccgggtga

SEQ ID NO: 22232 - DNA, 37 bp, Artificial Sequence
  Synthetic oligonucleotide
tacgcgctacggtggagggggggacgtatggagacga

SEQ ID NO: 22233 - DNA, 36 bp, Artificial Sequence
  Synthetic oligonucleotide
gtccaacagttagggatcgacatggctccaggcaca

SEQ ID NO: 22234 - DNA, 36 bp, Artificial Sequence
  Synthetic oligonucleotide
acagcgcggcttcaagcgctgtaggtctatgatata

SEQ ID NO: 22235 - DNA, 37 bp, Artificial Sequence
  Synthetic oligonucleotide
agtttctctagctgaagttgcactccagtggcttaga

SEQ ID NO: 22236 - DNA, 38 bp, Artificial Sequence
  Synthetic oligonucleotide
ggtgtctctactcaggagcgtttcggcgatactagtga

SEQ ID NO: 22237 - DNA, 38 bp, Artificial Sequence
  Synthetic oligonucleotide
gtgctgtcagtcaccttggtgccggtcatgctgcatga

SEQ ID NO: 22238 - DNA, 37 bp, Artificial Sequence
  Synthetic oligonucleotide
gtccaagacaagaggtgctcaatcaagtctattacga

SEQ ID NO: 22239 - DNA, 35 bp, Artificial Sequence
  Synthetic oligonucleotide
gaacgtaagctggccatctggtttcttccaaagaa

SEQ ID NO: 22240 - DNA, 36 bp, Artificial Sequence
  Synthetic oligonucleotide
agcggaattacagttatctatttgattgtcgagcga

SEQ ID NO: 22241 - DNA, 37 bp, Artificial Sequence
  Synthetic oligonucleotide
gctgcagaggttacttcgcttagaactgtcgaccgga

SEQ ID NO: 22242 - DNA, 36 bp, Artificial Sequence
  Synthetic oligonucleotide
ttttgcggtcgggaacatgacaaagagggaggcaaa

SEQ ID NO: 22243 - DNA, 36 bp, Artificial Sequence
  Synthetic oligonucleotide
gttgggagcctaagtatggttacctcacgcagtata

SEQ ID NO: 22244 - DNA, 37 bp, Artificial Sequence
  Synthetic oligonucleotide
gcgctttgggcaagccctaactgtgactgaacccgga

SEQ ID NO: 22245 - DNA, 36 bp, Artificial Sequence
  Synthetic oligonucleotide
gctcagggtgaagccacgaaccgggataccagagaa

SEQ ID NO: 22246 - DNA, 36 bp, Artificial Sequence
  Synthetic oligonucleotide
aaccactacgattgtgttatcttggcattctgttga

SEQ ID NO: 22247 - DNA, 36 bp, Artificial Sequence
  Synthetic oligonucleotide
acgctagccatcacatttgatgaagaatttcgcaaa

SEQ ID NO: 22248 - DNA, 35 bp, Artificial Sequence
  Synthetic oligonucleotide
tcctgagttcgcttagccaggatgggccgaggccc

SEQ ID NO: 22249 - DNA, 36 bp, Artificial Sequence
  Synthetic oligonucleotide
tcgttagcttcctgaggtaggacgtaataaagcata

SEQ ID NO: 22250 - DNA, 37 bp, Artificial Sequence
  Synthetic oligonucleotide
tgcatgtaatttataaagagcgctacttccacaccga

SEQ ID NO: 22251 - DNA, 37 bp, Artificial Sequence
  Synthetic oligonucleotide
gggaagacttgatgcggtctctgtcctgtcgtaacga

SEQ ID NO: 22252 - DNA, 36 bp, Artificial Sequence
  Synthetic oligonucleotide
tcatacgtaacagtgtggcctttgaagaggtaccga

SEQ ID NO: 22253 - DNA, 36 bp, Artificial Sequence
  Synthetic oligonucleotide
aatgaacccactctacattttgcacactgttcaaga

SEQ ID NO: 22254 - DNA, 35 bp, Artificial Sequence
  Synthetic oligonucleotide
taactcgtgcaaggtaggacgctgagcgtaacgcc

SEQ ID NO: 22255 - DNA, 35 bp, Artificial Sequence
  Synthetic oligonucleotide
gtacatacacggtatcaatcggtcgttaatgataa

SEQ ID NO: 22256 - DNA, 38 bp, Artificial Sequence
  Synthetic oligonucleotide
gtaccaacgacgaatcctggggattatataacgcatga

SEQ ID NO: 22257 - DNA, 35 bp, Artificial Sequence
  Synthetic oligonucleotide
ggttattctacgatgcttggttagtagggccctag

SEQ ID NO: 22258 - DNA, 36 bp, Artificial Sequence; identical to SEQ ID NO: 12641
  Synthetic oligonucleotide

SEQ ID NO: 22259 - DNA, 38 bp, Artificial Sequence
  Synthetic oligonucleotide
ttgaattctgccaaagcagtctccttcacttgttttga

SEQ ID NO: 22260 - DNA, 35 bp, Artificial Sequence
  Synthetic oligonucleotide
gcaaggagcgatgaggtgaaattagtcccttctcc

SEQ ID NO: 22261 - DNA, 38 bp, Artificial Sequence
  Synthetic oligonucleotide
ctaggaccacgtactaacatggttcctgatagacgtga

SEQ ID NO: 22262 - DNA, 38 bp, Artificial Sequence
  Synthetic oligonucleotide
atagcctatacttgcgctagtctagggggatgagctga

SEQ ID NO: 22263 - DNA, 36 bp, Artificial Sequence
  Synthetic oligonucleotide
gaggatggctaatgctatgtgatcatacatacgtta

SEQ ID NO: 22264 - DNA, 36 bp, Artificial Sequence
  Synthetic oligonucleotide
caccgagcccgagcacccgaatgttagtaatgctta

SEQ ID NO: 22265 - DNA, 37 bp, Artificial Sequence
  Synthetic oligonucleotide
tctatgtgggacgagtctgagtgctaactaaaaccga

SEQ ID NO: 22266 - DNA, 35 bp, Artificial Sequence
  Synthetic oligonucleotide
aaacccgttgccgaaggggtgacttggtagctacc

SEQ ID NO: 22267 - DNA, 35 bp, Artificial Sequence
  Synthetic oligonucleotide
cgggcctcaaaggtgatcgagaacggggtacagga

SEQ ID NO: 22268 - DNA, 35 bp, Artificial Sequence
  Synthetic oligonucleotide
agtgagtacgaaggttgctaaatgatcaggctagc

SEQ ID NO: 22269 - DNA, 38 bp, Artificial Sequence
  Synthetic oligonucleotide
ttcaggtatccggtcgaccgagggacataggatcgtga

SEQ ID NO: 22270 - DNA, 36 bp, Artificial Sequence
  Synthetic oligonucleotide
aaacgtgtagacacgtagaaggggcctgtcgttgta

SEQ ID NO: 22271 - DNA, 36 bp, Artificial Sequence
  Synthetic oligonucleotide
gcagaagtgcgaaacattgctattaagtgcgacaga

SEQ ID NO: 22272 - DNA, 35 bp, Artificial Sequence
  Synthetic oligonucleotide
agaagatatagggttttcgtttagcagagcaatgc

SEQ ID NO: 22273 - DNA, 37 bp, Artificial Sequence
  Synthetic oligonucleotide
ttcaaaaaagcccaccgtgctcacgtccgcgacggga

SEQ ID NO: 22274 - DNA, 37 bp, Artificial Sequence
  Synthetic oligonucleotide
ttcttactggttcccgagtatacgtaagcaagtccga

SEQ ID NO: 22275 - DNA, 35 bp, Artificial Sequence
  Synthetic oligonucleotide
tgcatccgactggctggtacgggtggtcataaaac

SEQ ID NO: 22276 - DNA, 36 bp, Artificial Sequence
  Synthetic oligonucleotide
gatgggcgatcatagaaagtcggtgactgtttggta

SEQ ID NO: 22277 - DNA, 38 bp, Artificial Sequence
  Synthetic oligonucleotide
ctgacagtacgagcggtttagtagggttcctttggtga

SEQ ID NO: 22278 - DNA, 38 bp, Artificial Sequence
  Synthetic oligonucleotide
aacgggtccaatccggttgactagccgaagacatgtga

SEQ ID NO: 22279 - DNA, 35 bp, Artificial Sequence
  Synthetic oligonucleotide
atccacgggcataaggggtcgggacatcagtaacc

SEQ ID NO: 22280 - DNA, 37 bp, Artificial Sequence
  Synthetic oligonucleotide
tctatctggccgatcgtgccattttggatggagtaga

SEQ ID NO: 22281 - DNA, 36 bp, Artificial Sequence
  Synthetic oligonucleotide
taagcactgggtcctggttatccttggtatggttta

SEQ ID NO: 22282 - DNA, 35 bp, Artificial Sequence
  Synthetic oligonucleotide
accatcctctcttcgggaatgtagtttgcagttag

SEQ ID NO: 22283 - DNA, 38 bp, Artificial Sequence; identical to SEQ ID NO: 13045
  Synthetic oligonucleotide

SEQ ID NO: 22284 - DNA, 37 bp, Artificial Sequence
  Synthetic oligonucleotide
gaattgcaactgtgggggccactgggtctagcatgga

SEQ ID NO: 22285 - DNA, 38 bp, Artificial Sequence
  Synthetic oligonucleotide
actagagaacggtgatgtcttgcgggcgcactctctga

SEQ ID NO: 22286 - DNA, 38 bp, Artificial Sequence
  Synthetic oligonucleotide
atctcatatctgtacggggcaacggtcctaacaagtga

SEQ ID NO: 22287 - DNA, 35 bp, Artificial Sequence
  Synthetic oligonucleotide
tctaacgcgacaggcactccgtgaagccctcgttt

SEQ ID NO: 22288 - DNA, 37 bp, Artificial Sequence
  Synthetic oligonucleotide
gagtcttggcgtaatgcctaaatctaccgtcgcgcga

SEQ ID NO: 22289 - DNA, 36 bp, Artificial Sequence
  Synthetic oligonucleotide
caactgtgcggtatgcgctttctgactccgtgttca

SEQ ID NO: 22290 - DNA, 35 bp, Artificial Sequence
  Synthetic oligonucleotide
ttaacaggggctgcttttctggtaggacggaagta

SEQ ID NO: 22291 - DNA, 36 bp, Artificial Sequence
  Synthetic oligonucleotide
cactgttctgagtcaacacgtgtactgcctgcgcaa

SEQ ID NO: 22292 - DNA, 35 bp, Artificial Sequence
  Synthetic oligonucleotide
tagacgggaagtgccgagtcgaaactacgcggttg

SEQ ID NO: 22293 - DNA, 35 bp, Artificial Sequence
  Synthetic oligonucleotide
tacggtggggactctccaaccgccttagcagtccg

SEQ ID NO: 22294 - DNA, 36 bp, Artificial Sequence
  Synthetic oligonucleotide
gctatcggcgtcaatatgaaccagaggcaacgtata

SEQ ID NO: 22295 - DNA, 37 bp, Artificial Sequence
  Synthetic oligonucleotide
ggtaggcatggagagcgttaatggtactgaaaggtga

SEQ ID NO: 22296 - DNA, 35 bp, Artificial Sequence
  Synthetic oligonucleotide
ggttcaaaatgatggtctcgcgttcctgtatggtg

SEQ ID NO: 22297 - DNA, 38 bp, Artificial Sequence
  Synthetic oligonucleotide
ttagaagcgcgatcttttgttcacgattacgtgcttga

SEQ ID NO: 22298 - DNA, 36 bp, Artificial Sequence
  Synthetic oligonucleotide
aacaatgagctggtataactgcggggggacgacaca

SEQ ID NO: 22299 - DNA, 35 bp, Artificial Sequence
  Synthetic oligonucleotide
agctgagggggtgctcagggactcgaatggtacaa

SEQ ID NO: 22300 - DNA, 36 bp, Artificial Sequence
  Synthetic oligonucleotide
actggtcaagctgctggtaggccgctgtccaaggga

SEQ ID NO: 22301 - DNA, 36 bp, Artificial Sequence
  Synthetic oligonucleotide
ttgcttaattcctccaacagtactgtagtccacgta

SEQ ID NO: 22302 - DNA, 36 bp, Artificial Sequence
  Synthetic oligonucleotide
tgcgttcataagggtgccaaattcagcatcgcgtta

SEQ ID NO: 22303 - DNA, 35 bp, Artificial Sequence
  Synthetic oligonucleotide
aagacacccaactcagaaacatttggtggcttcgc

SEQ ID NO: 22304 - DNA, 37 bp, Artificial Sequence
  Synthetic oligonucleotide
atgcgacgcgaattgttcgccatgtgctaagtcccga

SEQ ID NO: 22305 - DNA, 35 bp, Artificial Sequence
  Synthetic oligonucleotide
taaaataaacaggcactcttgaagtattttgacaa

SEQ ID NO: 22306 - DNA, 36 bp, Artificial Sequence
  Synthetic oligonucleotide
agcctcaaaagtccttggccccacatgcttgggaga

SEQ ID NO: 22307 - DNA, 35 bp, Artificial Sequence
  Synthetic oligonucleotide
ccactttaggccagttagatgcataaccttgccat

SEQ ID NO: 22308 - DNA, 38 bp, Artificial Sequence
  Synthetic oligonucleotide
gcaacgccgcataggagtatttgatgtaaacgagctga

SEQ ID NO: 22309 - DNA, 35 bp, Artificial Sequence
  Synthetic oligonucleotide
tatgacattatagcgtaagctgttgatagctggat

SEQ ID NO: 22310 - DNA, 35 bp, Artificial Sequence
  Synthetic oligonucleotide
tactcggatatgaatgggtcaaggaacgtgtcctt

SEQ ID NO: 22311 - DNA, 35 bp, Artificial Sequence
  Synthetic oligonucleotide
tagtagtctgtggcaaactagcctacctcattcaa

SEQ ID NO: 22312 - DNA, 36 bp, Artificial Sequence
  Synthetic oligonucleotide
aagcctcccccgttgtcccttaatgactgcacagga

SEQ ID NO: 22313 - DNA, 35 bp, Artificial Sequence
  Synthetic oligonucleotide
gatcagagggaaatcgcggaagtgaaatcctttgt

SEQ ID NO: 22314 - DNA, 35 bp, Artificial Sequence
  Synthetic oligonucleotide
gttctggtcgtctgttcaagttagggataatgtgt

SEQ ID NO: 22315 - DNA, 35 bp, Artificial Sequence
  Synthetic oligonucleotide
tacacttgtcacggccctgtttgtcacaacgcctt

SEQ ID NO: 22316 - DNA, 35 bp, Artificial Sequence
  Synthetic oligonucleotide
atgctcgctgtgtaacccccaacgaatccccccat

SEQ ID NO: 22317 - DNA, 36 bp, Artificial Sequence
  Synthetic oligonucleotide
ggccaggtatggtagtacttgggctacgttgccaga

SEQ ID NO: 22318 - DNA, 37 bp, Artificial Sequence
  Synthetic oligonucleotide
gtgtaggccacttgtaatccaacatttctaaagttga

SEQ ID NO: 22319 - DNA, 38 bp, Artificial Sequence
  Synthetic oligonucleotide
aagctgatcgaaccagccggtttacgaaatagtattga

SEQ ID NO: 22320 - DNA, 35 bp, Artificial Sequence
  Synthetic oligonucleotide
agttccatggtgggttagtaggggctggttaattg

SEQ ID NO: 22321 - DNA, 35 bp, Artificial Sequence
  Synthetic oligonucleotide
tagctgggcttcttatgtcctccactccagtcgcc

SEQ ID NO: 22322 - DNA, 38 bp, Artificial Sequence
  Synthetic oligonucleotide
tatgccctgctcaaatcaaagtctgcgcgatggcctga

SEQ ID NO: 22323 - DNA, 35 bp, Artificial Sequence
  Synthetic oligonucleotide
aaacactgacttgcgtttgacatcgcttgcaccca

SEQ ID NO: 22324 - DNA, 36 bp, Artificial Sequence
  Synthetic oligonucleotide
ggaagctctcttgctcccgggagtaaaagagcttaa

SEQ ID NO: 22325 - DNA, 32 bp, Artificial Sequence
  Synthetic oligonucleotide
cctgccaatgctccccaaccagataccgttca

SEQ ID NO: 22326 - DNA, 35 bp, Artificial Sequence
  Synthetic oligonucleotide
aatgcctgggccaggtagttaggacattctaactg

SEQ ID NO: 22327 - DNA, 37 bp, Artificial Sequence
  Synthetic oligonucleotide
gctgtgggcgcattgcctgtaacgcaaccagtgggga

SEQ ID NO: 22328 - DNA, 37 bp, Artificial Sequence
  Synthetic oligonucleotide
gccgcattcgactcattacagtttgccgggggctgga

SEQ ID NO: 22329 - DNA, 37 bp, Artificial Sequence; identical to SEQ ID NO: 10621
  Synthetic oligonucleotide

SEQ ID NO: 22330 - DNA, 36 bp, Artificial Sequence
  Synthetic oligonucleotide
tgcgctcttgtatggtcattttgccctcccgattga

SEQ ID NO: 22331 - DNA, 37 bp, Artificial Sequence
  Synthetic oligonucleotide
tagtaatcaactgtcatagtatcctcggtagaagtga

SEQ ID NO: 22332 - DNA, 35 bp, Artificial Sequence
  Synthetic oligonucleotide
tcggtcacgagaagacaggtgccgaactggacaag

SEQ ID NO: 22333 - DNA, 37 bp, Artificial Sequence
  Synthetic oligonucleotide
aagccaacgctagtcgggcttctctatgataaaagga

SEQ ID NO: 22334 - DNA, 35 bp, Artificial Sequence
  Synthetic oligonucleotide
tgcttgtacgcgtaaggctggagccaaggaatgca

SEQ ID NO: 22335 - DNA, 35 bp, Artificial Sequence
  Synthetic oligonucleotide
taggtggcttcaagcagtattacgttgccccagtc

SEQ ID NO: 22336 - DNA, 37 bp, Artificial Sequence
  Synthetic oligonucleotide
gtgctcccacgatcgaggtaggatgatcttaattaga

SEQ ID NO: 22337 - DNA, 36 bp, Artificial Sequence
  Synthetic oligonucleotide
gacaaactggggcgcggtccgcgtccactcgtacga

SEQ ID NO: 22338 - DNA, 36 bp, Artificial Sequence
  Synthetic oligonucleotide
tgaataggcccagtatacacgaagggcgttcgtggt

SEQ ID NO: 22339 - DNA, 36 bp, Artificial Sequence
  Synthetic oligonucleotide
gtcagagtgacgctctggtccggttagacttgccga

SEQ ID NO: 22340 - DNA, 36 bp, Artificial Sequence
  Synthetic oligonucleotide
agaacgatagtcgtcgttgtcagtctgatctttata

SEQ ID NO: 22341 - DNA, 35 bp, Artificial Sequence
  Synthetic oligonucleotide
agaccggacgctgttgcgcatttgaggaaacgggt

SEQ ID NO: 22342 - DNA, 37 bp, Artificial Sequence
  Synthetic oligonucleotide
gagtcggtctttatagcccttgtaaaaatactgaaga

SEQ ID NO: 22343 - DNA, 38 bp, Artificial Sequence
  Synthetic oligonucleotide
tgtcccgtgctacgtactcagccctcataccccgttga

SEQ ID NO: 22344 - DNA, 36 bp, Artificial Sequence
  Synthetic oligonucleotide
cccgtctacgccagttcctccgagtccttcacggta

SEQ ID NO: 22345 - DNA, 35 bp, Artificial Sequence
  Synthetic oligonucleotide
cagtgagaagctgctcctaatcgtccccccagaag

SEQ ID NO: 22346 - DNA, 37 bp, Artificial Sequence
  Synthetic oligonucleotide
cgatagacgtccaacaagcttttcgtatggcctatga

SEQ ID NO: 22347 - DNA, 35 bp, Artificial Sequence
  Synthetic oligonucleotide
ttgtagcctgtactggatatcccccttctaagtgg

SEQ ID NO: 22348 - DNA, 35 bp, Artificial Sequence
  Synthetic oligonucleotide
gctagtacgtctgtgacggggtccaagagctgttt

SEQ ID NO: 22349 - DNA, 38 bp, Artificial Sequence
  Synthetic oligonucleotide
gcactcgtgtctctttagtgtatggggtgttaccatga

SEQ ID NO: 22350 - DNA, 38 bp, Artificial Sequence
  Synthetic oligonucleotide
attggccgcgatttggtcaggatgcctgtgttccctga

SEQ ID NO: 22351 - DNA, 36 bp, Artificial Sequence
  Synthetic oligonucleotide
actagaaaagcggattgctagaatagcgaatgtcta

SEQ ID NO: 22352 - DNA, 35 bp, Artificial Sequence
  Synthetic oligonucleotide
atctacgactcgcatcggtatttggtttacttgtg

SEQ ID NO: 22353 - DNA, 37 bp, Artificial Sequence
  Synthetic oligonucleotide
acatcggagagccggataagtacaagggccacgcgga

SEQ ID NO: 22354 - DNA, 36 bp, Artificial Sequence
  Synthetic oligonucleotide
tctgtctcagccttacaacgacgcagaactggtgca

SEQ ID NO: 22355 - DNA, 35 bp, Artificial Sequence
  Synthetic oligonucleotide
tggtcagacattattgtgtaccaacctgtaggggg

SEQ ID NO: 22356 - DNA, 36 bp, Artificial Sequence
  Synthetic oligonucleotide
ttgacatctcggaacgctatggcgaatgccgcgcga

SEQ ID NO: 22357 - DNA, 35 bp, Artificial Sequence
  Synthetic oligonucleotide
tgacgtcttgcaattttattatgctggtagacttc

SEQ ID NO: 22358 - DNA, 36 bp, Artificial Sequence; identical to SEQ ID NO: 3034
  Synthetic oligonucleotide

SEQ ID NO: 22359 - DNA, 35 bp, Artificial Sequence
  Synthetic oligonucleotide
tacgtatcggggacggaagtcagagatgctcggaa

SEQ ID NO: 22360 - DNA, 37 bp, Artificial Sequence
  Synthetic oligonucleotide
cgacctatgctgttaggctcggtgcggggaatgtaga

SEQ ID NO: 22361 - DNA, 35 bp, Artificial Sequence
  Synthetic oligonucleotide
ttccctctccactatggtgtcattgaggagaccta

SEQ ID NO: 22362 - DNA, 36 bp, Artificial Sequence
  Synthetic oligonucleotide
gaagctaggctgagtgcgtaatgattcgttctcgct

SEQ ID NO: 22363 - DNA, 36 bp, Artificial Sequence
  Synthetic oligonucleotide
tgcaagagcttggtgagcgatgcaaggggactatga

SEQ ID NO: 22364 - DNA, 37 bp, Artificial Sequence
  Synthetic oligonucleotide
catgccactaaattggtggttgagtccacagtcttga

SEQ ID NO: 22365 - DNA, 35 bp, Artificial Sequence
  Synthetic oligonucleotide
gcgatcgggactaaattcctgggactctatcgcgc

SEQ ID NO: 22366 - DNA, 36 bp, Artificial Sequence
  Synthetic oligonucleotide
tgccttacacgcgtgaaaaacgtcgggttcgccata

SEQ ID NO: 22367 - DNA, 37 bp, Artificial Sequence
  Synthetic oligonucleotide
tgtgagggtctatttcatcgagccggctttggttaga

SEQ ID NO: 22368 - DNA, 35 bp, Artificial Sequence
  Synthetic oligonucleotide
tcgactatacatactgagacagcgaaccgcacccg

SEQ ID NO: 22369 - DNA, 37 bp, Artificial Sequence
  Synthetic oligonucleotide
gactatgctcagcaggaagataatagtacgtgagtga

SEQ ID NO: 22370 - DNA, 36 bp, Artificial Sequence
  Synthetic oligonucleotide
ttggtgggggtgtggacacgacgagattggctccta

SEQ ID NO: 22371 - DNA, 36 bp, Artificial Sequence
  Synthetic oligonucleotide
gtccccagaggggagatggcccccctatcgcaggaa

SEQ ID NO: 22372 - DNA, 36 bp, Artificial Sequence
  Synthetic oligonucleotide
gtgagacgcttttaattgtatatttacgtattccga

SEQ ID NO: 22373 - DNA, 37 bp, Artificial Sequence
  Synthetic oligonucleotide
gagaaagcgcacgtgtagtgctccgctcctcagtgga

SEQ ID NO: 22374 - DNA, 35 bp, Artificial Sequence
  Synthetic oligonucleotide
cgtagttaatgctactagttcatatgttatacgca

SEQ ID NO: 22375 - DNA, 36 bp, Artificial Sequence
  Synthetic oligonucleotide
tatattgagacctctttgtgtttgatgctaggccgg

SEQ ID NO: 22376 - DNA, 36 bp, Artificial Sequence
  Synthetic oligonucleotide
ttgctcagactaatttttgtggataactctgacata

SEQ ID NO: 22377 - DNA, 35 bp, Artificial Sequence
  Synthetic oligonucleotide
cggtctgatcatgcgccccagttactgtccttatg

SEQ ID NO: 22378 - DNA, 35 bp, Artificial Sequence
  Synthetic oligonucleotide
ggtcgttactgaaacgaaagacacagagtctttcc

SEQ ID NO: 22379 - DNA, 35 bp, Artificial Sequence
  Synthetic oligonucleotide
gggattagggaccacatgtcacgaacttcggttgt

SEQ ID NO: 22380 - DNA, 35 bp, Artificial Sequence
  Synthetic oligonucleotide
gttcggaccctgatgttacgagtttaacgtattgg

SEQ ID NO: 22381 - DNA, 35 bp, Artificial Sequence
  Synthetic oligonucleotide
ggaactcgacacagcgtcttgctgggcgctaccca

SEQ ID NO: 22382 - DNA, 35 bp, Artificial Sequence
  Synthetic oligonucleotide
cactgccatacgcaaggagcagggcctagcgtaca

SEQ ID NO: 22383 - DNA, 38 bp, Artificial Sequence
  Synthetic oligonucleotide
ggattcgtcataccactgaaaggacgtcacttcaatga

SEQ ID NO: 22384 - DNA, 36 bp, Artificial Sequence
  Synthetic oligonucleotide
tctgcggtcacgggggtttaacattgacaaggcgtg

SEQ ID NO: 22385 - DNA, 37 bp, Artificial Sequence
  Synthetic oligonucleotide
caacacctgagtagcgtgtatcgacaattggtgttga

SEQ ID NO: 22386 - DNA, 36 bp, Artificial Sequence
  Synthetic oligonucleotide
tgcccgatgttgatagttctatagaagtggagtaca

SEQ ID NO: 22387 - DNA, 35 bp, Artificial Sequence
  Synthetic oligonucleotide
gccaggtcaaaacgccgccgtgtattcccacgcga

SEQ ID NO: 22388 - DNA, 35 bp, Artificial Sequence; identical to SEQ ID NO: 3070
  Synthetic oligonucleotide

SEQ ID NO: 22389 - DNA, 36 bp, Artificial Sequence
  Synthetic oligonucleotide
gtgcatattgtggctgtactcagctgtcatgcttga

SEQ ID NO: 22390 - DNA, 36 bp, Artificial Sequence
  Synthetic oligonucleotide
aactgtgggtcccagaatgagcacaaaggtgtctga

SEQ ID NO: 22391 - DNA, 35 bp, Artificial Sequence
  Synthetic oligonucleotide
gtttcactgttaaggagcctagattccccccgccg

SEQ ID NO: 22392 - DNA, 36 bp, Artificial Sequence
  Synthetic oligonucleotide
tatttgccattacgctgatccagggacacgtgtaaa

SEQ ID NO: 22393 - DNA, 35 bp, Artificial Sequence
  Synthetic oligonucleotide
gtattcacgtcgcgcatccggcattgcgcctcatg

SEQ ID NO: 22394 - DNA, 38 bp, Artificial Sequence
  Synthetic oligonucleotide
gcgcacgcgcgctagctgacgttcacctggagtactga

SEQ ID NO: 22395 - DNA, 35 bp, Artificial Sequence
  Synthetic oligonucleotide
caccagctggtgtagtccgttatccgacactaatt

SEQ ID NO: 22396 - DNA, 35 bp, Artificial Sequence
  Synthetic oligonucleotide
atccctaaagagaggatgcgttcacggatactgtg

SEQ ID NO: 22397 - DNA, 35 bp, Artificial Sequence
  Synthetic oligonucleotide
ggactaattgttgatgtgcaaccagggaggttggg

SEQ ID NO: 22398 - DNA, 38 bp, Artificial Sequence
  Synthetic oligonucleotide
cctagtcactggaaggtctgagagttacaactgcatga

SEQ ID NO: 22399 - DNA, 36 bp, Artificial Sequence; identical to SEQ ID NO: 6943
  Synthetic oligonucleotide

SEQ ID NO: 22400 - DNA, 35 bp, Artificial Sequence
  Synthetic oligonucleotide
gaaaagaccgcgttcggaccacaagtcgcccgatc

SEQ ID NO: 22401 - DNA, 37 bp, Artificial Sequence
  Synthetic oligonucleotide
tgaggtcgactatggtagtcatttgctgtgaggctga

SEQ ID NO: 22402 - DNA, 35 bp, Artificial Sequence
  Synthetic oligonucleotide
gcatctttgttactccgacagcttcgtatatggtg

SEQ ID NO: 22403 - DNA, 36 bp, Artificial Sequence
  Synthetic oligonucleotide
tgcgttctacggcatcaggttccattgtcactagca

SEQ ID NO: 22404 - DNA, 35 bp, Artificial Sequence
  Synthetic oligonucleotide
tagggtgatatcgatctccactattaattcccccg

SEQ ID NO: 22405 - DNA, 37 bp, Artificial Sequence
  Synthetic oligonucleotide
acagatcagcttgacaggccgttactgctacccagga

SEQ ID NO: 22406 - DNA, 35 bp, Artificial Sequence
  Synthetic oligonucleotide
gattcagtgccatcgattgggggactggttctgag

SEQ ID NO: 22407 - DNA, 38 bp, Artificial Sequence
  Synthetic oligonucleotide
agtaagcgttaatagctggcttgcagattgatttatga

SEQ ID NO: 22408 - DNA, 36 bp, Artificial Sequence
  Synthetic oligonucleotide
gtacccttgagacgaggtatgcgagacactttacga

SEQ ID NO: 22409 - DNA, 38 bp, Artificial Sequence
  Synthetic oligonucleotide
atagtgccagtacccaccatctaggatcgcggcattga

SEQ ID NO: 22410 - DNA, 36 bp, Artificial Sequence
  Synthetic oligonucleotide
tcattcgcctgaataacccccggaatgaagagttct

SEQ ID NO: 22411 - DNA, 38 bp, Artificial Sequence
  Synthetic oligonucleotide
gcggtagacattccgggcgcatcatcatcctagcctga

SEQ ID NO: 22412 - DNA, 38 bp, Artificial Sequence
  Synthetic oligonucleotide
tctactaaaatgtcgtatgccccactccgcataagtga

SEQ ID NO: 22413 - DNA, 35 bp, Artificial Sequence
  Synthetic oligonucleotide
tttagggacctagaaggactgccggcccaggtctc

SEQ ID NO: 22414 - DNA, 36 bp, Artificial Sequence
  Synthetic oligonucleotide
aacgtggcatttacgggcgataagcgactataaacg

SEQ ID NO: 22415 - DNA, 36 bp, Artificial Sequence
  Synthetic oligonucleotide
agctgataatcatagtacggggtgaaacactttcga

SEQ ID NO: 22416 - DNA, 35 bp, Artificial Sequence
  Synthetic oligonucleotide
gctcgtatgaattaagtgctggtgtatcgaggtgc

SEQ ID NO: 22417 - DNA, 35 bp, Artificial Sequence
  Synthetic oligonucleotide
ggaaccactcggtcgagtaatacactggagggtaa

SEQ ID NO: 22418 - DNA, 35 bp, Artificial Sequence
  Synthetic oligonucleotide
gggcgttcgaacgattgctgagggagtccgtagtg

SEQ ID NO: 22419 - DNA, 35 bp, Artificial Sequence
  Synthetic oligonucleotide
ttcgtttggtactgcgaacagtgcttggggtttca

SEQ ID NO: 22420 - DNA, 37 bp, Artificial Sequence
  Synthetic oligonucleotide
gcaacgaatgaaaggacaatgacaaagagtgatgaga

SEQ ID NO: 22421 - DNA, 34 bp, Artificial Sequence
  Synthetic oligonucleotide
ttactcagctagctaccttcatttggtaggagat

SEQ ID NO: 22422 - DNA, 37 bp, Artificial Sequence
  Synthetic oligonucleotide
aaagctgaccatagtccgctatctagtgtagtcatga

SEQ ID NO: 22423 - DNA, 36 bp, Artificial Sequence
  Synthetic oligonucleotide
aggaaattgcaagtcgtgggttttatccgttgaaaa

SEQ ID NO: 22424 - DNA, 36 bp, Artificial Sequence
  Synthetic oligonucleotide
tatactgagagtgtggtacggcgggtacgcgtagca

SEQ ID NO: 22425 - DNA, 38 bp, Artificial Sequence
  Synthetic oligonucleotide
acagggattgtcgctgtcgcggaagtgaggtggtctga

SEQ ID NO: 22426 - DNA, 35 bp, Artificial Sequence
  Synthetic oligonucleotide
gtatagggaatccgatgacgcgccatactacaggc

SEQ ID NO: 22427 - DNA, 36 bp, Artificial Sequence
  Synthetic oligonucleotide
ttcctgatcgaggactagtgtacagtcacggtgtaa

SEQ ID NO: 22428 - DNA, 37 bp, Artificial Sequence
  Synthetic oligonucleotide
atcccatcagcggacgtttatttgccgaaaggaggga

SEQ ID NO: 22429 - DNA, 38 bp, Artificial Sequence
  Synthetic oligonucleotide
acaatcttacgaggaaggggctatagtgggcacgctga

SEQ ID NO: 22430 - DNA, 37 bp, Artificial Sequence
  Synthetic oligonucleotide
ttacttggtcagttcacgtctcttgggaacgtactga

SEQ ID NO: 22431 - DNA, 36 bp, Artificial Sequence
  Synthetic oligonucleotide
tcacagggacgaaatgcgggtgacggttctaatgta

SEQ ID NO: 22432 - DNA, 36 bp, Artificial Sequence
  Synthetic oligonucleotide
atccgtgtgtagctgctcccgttagggaaaggctca

SEQ ID NO: 22433 - DNA, 35 bp, Artificial Sequence
  Synthetic oligonucleotide
agaagactacggaattgatcctctggtggtttccg

SEQ ID NO: 22434 - DNA, 35 bp, Artificial Sequence
  Synthetic oligonucleotide
aggtacatggactagctaatcctcacgaacgcggg

SEQ ID NO: 22435 - DNA, 37 bp, Artificial Sequence
  Synthetic oligonucleotide
gtgtgatcagtacgtaagaattcccatactagctcga

SEQ ID NO: 22436 - DNA, 35 bp, Artificial Sequence
  Synthetic oligonucleotide
ctactggtacatagctagcacatacccgattcgta

SEQ ID NO: 22437 - DNA, 35 bp, Artificial Sequence
  Synthetic oligonucleotide
ttgactgctgcatcgagcacctaagcgttccgcat

SEQ ID NO: 22438 - DNA, 36 bp, Artificial Sequence
  Synthetic oligonucleotide
agttcatggtcatagatgtgttcgcgcatctcaaca

SEQ ID NO: 22439 - DNA, 38 bp, Artificial Sequence
  Synthetic oligonucleotide
ttcgccaacctgcgtgccttcgagatgagaccgtttga

SEQ ID NO: 22440 - DNA, 37 bp, Artificial Sequence
  Synthetic oligonucleotide
atccacaatggtcataagcctaaaagggacaagtgga

SEQ ID NO: 22441 - DNA, 36 bp, Artificial Sequence
  Synthetic oligonucleotide
ctagagttctgcgaactaatcgctttaccaaccgta

SEQ ID NO: 22442 - DNA, 35 bp, Artificial Sequence; identical to SEQ ID NO: 14145
  Synthetic oligonucleotide

SEQ ID NO: 22443 - DNA, 35 bp, Artificial Sequence
  Synthetic oligonucleotide
gtcggggattatgatctatggtgttctagaggcac

SEQ ID NO: 22444 - DNA, 36 bp, Artificial Sequence; identical to SEQ ID NO: 16178
  Synthetic oligonucleotide

SEQ ID NO: 22445 - DNA, 36 bp, Artificial Sequence
  Synthetic oligonucleotide
tgaaagggccgatatatcgcttggtaccgcttttaa

SEQ ID NO: 22446 - DNA, 37 bp, Artificial Sequence
  Synthetic oligonucleotide
agtcacttaactatcgtcctagatcagggaaccgcga

SEQ ID NO: 22447 - DNA, 35 bp, Artificial Sequence
  Synthetic oligonucleotide
tgacggtatgcattatgggagatgcgacactccgc

SEQ ID NO: 22448 - DNA, 36 bp, Artificial Sequence
  Synthetic oligonucleotide
aactttggtgccattggggattgattgttatcgcta

SEQ ID NO: 22449 - DNA, 38 bp, Artificial Sequence
  Synthetic oligonucleotide
agctgcggataacgacaagtgtttttgtgcaggtgtga

SEQ ID NO: 22450 - DNA, 38 bp, Artificial Sequence
  Synthetic oligonucleotide
ggaaaacaagcggcgtgtgggtataaaacatcgattga

SEQ ID NO: 22451 - DNA, 34 bp, Artificial Sequence
  Synthetic oligonucleotide
gaccgcgagctatcgatgactttttggcgtacgc

SEQ ID NO: 22452 - DNA, 38 bp, Artificial Sequence
  Synthetic oligonucleotide
tcgctagatgtacttgacgcgggcatgacactagttga

SEQ ID NO: 22453 - DNA, 35 bp, Artificial Sequence
  Synthetic oligonucleotide
gaccagtagtatagggcgagatcttggggggggtt

SEQ ID NO: 22454 - DNA, 37 bp, Artificial Sequence
  Synthetic oligonucleotide
tctatctgacaacgtattgcatggtgttatactccga

SEQ ID NO: 22455 - DNA, 36 bp, Artificial Sequence; identical to SEQ ID NO: 11083
  Synthetic oligonucleotide

SEQ ID NO: 22456 - DNA, 36 bp, Artificial Sequence
  Synthetic oligonucleotide
gttgaggcgttagggcgccagtcaaagaatgattta

SEQ ID NO: 22457 - DNA, 37 bp, Artificial Sequence
  Synthetic oligonucleotide
tactcggaatgcttggggaagaggctggtcaagtaga

SEQ ID NO: 22458 - DNA, 35 bp, Artificial Sequence
  Synthetic oligonucleotide
tacatcacccagtaaccgtatccccttgcctaagg

SEQ ID NO: 22459 - DNA, 35 bp, Artificial Sequence
  Synthetic oligonucleotide
tattaaaagcagtgctagtgataagaaaccgcaca

SEQ ID NO: 22460 - DNA, 35 bp, Artificial Sequence
  Synthetic oligonucleotide
aagaactcagagttgtgtgtctcgcttacatactg

SEQ ID NO: 22461 - DNA, 35 bp, Artificial Sequence
  Synthetic oligonucleotide
gtaaggatcatccacagggctacatgctcattatg

SEQ ID NO: 22462 - DNA, 38 bp, Artificial Sequence
  Synthetic oligonucleotide
cagactttactaagatcgtatatgttctaagacggtga

SEQ ID NO: 22463 - DNA, 36 bp, Artificial Sequence; identical to SEQ ID NO: 12419
  Synthetic oligonucleotide

SEQ ID NO: 22464 - DNA, 36 bp, Artificial Sequence
  Synthetic oligonucleotide
cgtagtcatgcggaaatccagagcgtgtacatggaa

SEQ ID NO: 22465 - DNA, 37 bp, Artificial Sequence; identical to SEQ ID NO: 14263
  Synthetic oligonucleotide

SEQ ID NO: 22466 - DNA, 35 bp, Artificial Sequence
  Synthetic oligonucleotide
atactgcagttgtccgcgtcgcgtgactacttcac

SEQ ID NO: 22467 - DNA, 36 bp, Artificial Sequence
  Synthetic oligonucleotide
gcagacaggcccgccgtttgttctgacggattttaa

SEQ ID NO: 22468 - DNA, 38 bp, Artificial Sequence
  Synthetic oligonucleotide
taagatacaccagcaaacagatggtggtactttgatga

SEQ ID NO: 22469 - DNA, 35 bp, Artificial Sequence
  Synthetic oligonucleotide
tcaaacgcgataggttcagcggacgcgtgagtaac

SEQ ID NO: 22470 - DNA, 38 bp, Artificial Sequence
  Synthetic oligonucleotide
tgtcttggcttgaagttctgttcaagggctcaaggtga

SEQ ID NO: 22471 - DNA, 37 bp, Artificial Sequence
  Synthetic oligonucleotide
acagtctcgatggtagatacgttacgccgttgatcga

SEQ ID NO: 22472 - DNA, 36 bp, Artificial Sequence
  Synthetic oligonucleotide
tgcggactgtattggaattatatgtcgagatgtaga

SEQ ID NO: 22473 - DNA, 36 bp, Artificial Sequence
  Synthetic oligonucleotide
aatgttgacgatccgttgttactaatacgtaagaca

SEQ ID NO: 22474 - DNA, 35 bp, Artificial Sequence
  Synthetic oligonucleotide
aaatactggtccctcgggtccgcttggggctagta

SEQ ID NO: 22475 - DNA, 35 bp, Artificial Sequence
  Synthetic oligonucleotide
tagtgccggtctagcatttgtaggatttaatggac

SEQ ID NO: 22476 - DNA, 38 bp, Artificial Sequence
  Synthetic oligonucleotide
gcactgacagctgtgtgcaacgcggctggcacgggtta

SEQ ID NO: 22477 - DNA, 35 bp, Artificial Sequence
  Synthetic oligonucleotide
ggccaacgtcgtacgcattcattcgctcattgccc

SEQ ID NO: 22478 - DNA, 35 bp, Artificial Sequence
  Synthetic oligonucleotide
tcaccgcaagattcattcccagggttcgcattgtc

SEQ ID NO: 22479 - DNA, 37 bp, Artificial Sequence
  Synthetic oligonucleotide
cttgaatagttaactgacgtacagaggacaggtatga

SEQ ID NO: 22480 - DNA, 37 bp, Artificial Sequence
  Synthetic oligonucleotide
tagttctgaacggacgagtatcgagtggcgggggtga

SEQ ID NO: 22481 - DNA, 38 bp, Artificial Sequence
  Synthetic oligonucleotide
tatgtcgacgtgagttatgttaatctacgctcccctga

SEQ ID NO: 22482 - DNA, 38 bp, Artificial Sequence
  Synthetic oligonucleotide
tactcaagtagtcgagctaggatagagtaggcttctga

SEQ ID NO: 22483 - DNA, 37 bp, Artificial Sequence
  Synthetic oligonucleotide
gacaggggaccgctcgacaaagagactgaatcagtta

SEQ ID NO: 22484 - DNA, 37 bp, Artificial Sequence
  Synthetic oligonucleotide
gttgtactgcgattctgaagattcggagaatacttga

SEQ ID NO: 22485 - DNA, 36 bp, Artificial Sequence; identical to SEQ ID NO: 13706
  Synthetic oligonucleotide

SEQ ID NO: 22486 - DNA, 37 bp, Artificial Sequence
  Synthetic oligonucleotide
ttaatcgacgagccacgaaaggtggattctgtagtga

SEQ ID NO: 22487 - DNA, 38 bp, Artificial Sequence; identical to SEQ ID NO: 8601
  Synthetic oligonucleotide

SEQ ID NO: 22488 - DNA, 35 bp, Artificial Sequence
  Synthetic oligonucleotide
ttccgataaaagccaagacccgtccccatcggtgt

SEQ ID NO: 22489 - DNA, 35 bp, Artificial Sequence
  Synthetic oligonucleotide
atgcgcaacaatgccataggtgctcaccactttaa

SEQ ID NO: 22490 - DNA, 35 bp, Artificial Sequence
  Synthetic oligonucleotide
gccctttggtctggccgtacagtagggcaggtgcc

SEQ ID NO: 22491 - DNA, 37 bp, Artificial Sequence
  Synthetic oligonucleotide
attacaacggactgaacggcttcagattgccttatga

SEQ ID NO: 22492 - DNA, 37 bp, Artificial Sequence
  Synthetic oligonucleotide
agtgcatcgacactgggccgcacattccgtacgctga

SEQ ID NO: 22493 - DNA, 35 bp, Artificial Sequence; identical to SEQ ID NO: 16609
  Synthetic oligonucleotide

SEQ ID NO: 22494 - DNA, 35 bp, Artificial Sequence
  Synthetic oligonucleotide
gtgacacgtacgttggatatgttagaattttcacc

SEQ ID NO: 22495 - DNA, 38 bp, Artificial Sequence
  Synthetic oligonucleotide
aaacggaaatgattcgcggggctctgcagtcatggtga

SEQ ID NO: 22496 - DNA, 35 bp, Artificial Sequence
  Synthetic oligonucleotide
attgagagaaggaactctactttttaggacatagg

SEQ ID NO: 22497 - DNA, 35 bp, Artificial Sequence
  Synthetic oligonucleotide
gccggcccccgctcaagaagtgataccggatgggc

SEQ ID NO: 22498 - DNA, 36 bp, Artificial Sequence
  Synthetic oligonucleotide
tattgcgctagccctgggtggttattccccaaataa

SEQ ID NO: 22499 - DNA, 37 bp, Artificial Sequence
  Synthetic oligonucleotide
ggaatgggcacgatggggggttcgtttgctaatatga

SEQ ID NO: 22500 - DNA, 38 bp, Artificial Sequence
  Synthetic oligonucleotide
aagatagccagctgatggggatcttagaagccatgtga

SEQ ID NO: 22501 - DNA, 36 bp, Artificial Sequence
  Synthetic oligonucleotide
aacactggggtgaacgcattcggtatgtcgttcaga

SEQ ID NO: 22502 - DNA, 35 bp, Artificial Sequence
  Synthetic oligonucleotide
aaactgggaagctacaactgacgataggtcagtaa

SEQ ID NO: 22503 - DNA, 38 bp, Artificial Sequence
  Synthetic oligonucleotide
tgccgtctaagcatacgaatcaatgtgtacgtgtctga

SEQ ID NO: 22504 - DNA, 35 bp, Artificial Sequence
  Synthetic oligonucleotide
ggtggaggcgcttcgttgtcgttggaggctgtaac

SEQ ID NO: 22505 - DNA, 30 bp, Artificial Sequence
  Synthetic oligonucleotide
atgacatgcctgtgtgggattttactggta

SEQ ID NO: 22506 - DNA, 36 bp, Artificial Sequence
  Synthetic oligonucleotide
gtcgcaccaggcacataaggtctgtcacatcacaga

SEQ ID NO: 22507 - DNA, 36 bp, Artificial Sequence
  Synthetic oligonucleotide
gccacacatagacacttcgcacaactgtggtgggga

SEQ ID NO: 22508 - DNA, 36 bp, Artificial Sequence
  Synthetic oligonucleotide
aggattcaacttacttacccacctagccattgattg

SEQ ID NO: 22509 - DNA, 38 bp, Artificial Sequence
  Synthetic oligonucleotide
gcattagagattggaatctgccatcactacctgcctga

SEQ ID NO: 22510 - DNA, 37 bp, Artificial Sequence
  Synthetic oligonucleotide
ggtccggggcggacgttactctcatgactagatcaga

SEQ ID NO: 22511 - DNA, 36 bp, Artificial Sequence
  Synthetic oligonucleotide
gtttcgccgtgttgatctttcaacgccgaaaatcaa

SEQ ID NO: 22512 - DNA, 38 bp, Artificial Sequence
  Synthetic oligonucleotide
aacaacgggggaatgcggagctatgacctattcactga

SEQ ID NO: 22513 - DNA, 38 bp, Artificial Sequence
  Synthetic oligonucleotide
gcgcgattcgctagccgatttcgatagggcactattga

SEQ ID NO: 22514 - DNA, 37 bp, Artificial Sequence
  Synthetic oligonucleotide
atggacgacggacgcgggatcgtaggattgtgcagga

SEQ ID NO: 22515 - DNA, 35 bp, Artificial Sequence; identical to SEQ ID NO: 10746
  Synthetic oligonucleotide

SEQ ID NO: 22516 - DNA, 35 bp, Artificial Sequence
  Synthetic oligonucleotide
gacgggtcatagctttctagggtcgtatcacagga

SEQ ID NO: 22517 - DNA, 35 bp, Artificial Sequence
  Synthetic oligonucleotide
ggggttggctggactgtctagaatccgtacccggg

SEQ ID NO: 22518 - DNA, 35 bp, Artificial Sequence
  Synthetic oligonucleotide
cttggaaagttcgcttgaaacttgctaaacacctg

SEQ ID NO: 22519 - DNA, 35 bp, Artificial Sequence
  Synthetic oligonucleotide
cccccctgtcttggtaggttcaatcatcgttgagg

SEQ ID NO: 22520 - DNA, 35 bp, Artificial Sequence
  Synthetic oligonucleotide
tagttcctgcaggttaggcctctagtccttaaata

SEQ ID NO: 22521 - DNA, 36 bp, Artificial Sequence
  Synthetic oligonucleotide
cctcaggtttgaacggcaagtatgtgagccggggta

SEQ ID NO: 22522 - DNA, 36 bp, Artificial Sequence
  Synthetic oligonucleotide
acgaggccgtaaggtagagaaatggctagtttcgga

SEQ ID NO: 22523 - DNA, 35 bp, Artificial Sequence
  Synthetic oligonucleotide
gacggagttcgtctgaaccattccgttcagggagt

SEQ ID NO: 22524 - DNA, 36 bp, Artificial Sequence
  Synthetic oligonucleotide
cttctcatgaggggttcctcaaggacgtgctcagta

SEQ ID NO: 22525 - DNA, 37 bp, Artificial Sequence
  Synthetic oligonucleotide
acccaggagagtagttagcctgcaatggttgttggga

SEQ ID NO: 22526 - DNA, 36 bp, Artificial Sequence
  Synthetic oligonucleotide
ggattgaacatatagatctactacctgggggctgaa

SEQ ID NO: 22527 - DNA, 36 bp, Artificial Sequence
  Synthetic oligonucleotide
tgaaggctttggcggataactgtctgagttcgaaca

SEQ ID NO: 22528 - DNA, 37 bp, Artificial Sequence
  Synthetic oligonucleotide
ggagaagtccactgtgatgtagtttcctcaagctcga

SEQ ID NO: 22529 - DNA, 35 bp, Artificial Sequence
  Synthetic oligonucleotide
ataagggccaacccatattccccgtgcccgcagac

SEQ ID NO: 22530 - DNA, 36 bp, Artificial Sequence
  Synthetic oligonucleotide
atgtggggccatgcacgtggataagtattcgtctta

SEQ ID NO: 22531 - DNA, 38 bp, Artificial Sequence
  Synthetic oligonucleotide
atcaagttcagtccgatccactaggtttgactgtttga

SEQ ID NO: 22532 - DNA, 35 bp, Artificial Sequence
  Synthetic oligonucleotide
gtggtccgctgtatttcactctcctgacacaacta

SEQ ID NO: 22533 - DNA, 38 bp, Artificial Sequence
  Synthetic oligonucleotide
aaagctagctcagtacacggaaatcgttgaggcgatga

SEQ ID NO: 22534 - DNA, 35 bp, Artificial Sequence
  Synthetic oligonucleotide
gactctcccgccggggagcttttagactggtattg

SEQ ID NO: 22535 - DNA, 35 bp, Artificial Sequence
  Synthetic oligonucleotide
ttaagcaacggggcgaagaagcttgctaaatgtgt

SEQ ID NO: 22536 - DNA, 35 bp, Artificial Sequence
  Synthetic oligonucleotide
acaccttgcgctctgccaactattcccccgcgact

SEQ ID NO: 22537 - DNA, 38 bp, Artificial Sequence
  Synthetic oligonucleotide
cctagccattatcggaagtcggaatacgatatctgtga

SEQ ID NO: 22538 - DNA, 37 bp, Artificial Sequence; identical to SEQ ID NO: 11770
  Synthetic oligonucleotide

SEQ ID NO: 22539 - DNA, 35 bp, Artificial Sequence
  Synthetic oligonucleotide
atagaagcgtccgaggaggtcgccgtttcactgtc

SEQ ID NO: 22540 - DNA, 37 bp, Artificial Sequence
  Synthetic oligonucleotide
gtcagtgttgtgtagcgaacctcaattcgtacatgga

SEQ ID NO: 22541 - DNA, 38 bp, Artificial Sequence
  Synthetic oligonucleotide
atacaccgctatgcatactgcgtagtccacctgactga

SEQ ID NO: 22542 - DNA, 35 bp, Artificial Sequence
  Synthetic oligonucleotide
ggtagtaaatacttccttaaaagtaccgcttcgtc

SEQ ID NO: 22543 - DNA, 38 bp, Artificial Sequence
  Synthetic oligonucleotide
gagagactcatgaagttaatgctaattgccgccagtga

SEQ ID NO: 22544 - DNA, 38 bp, Artificial Sequence
  Synthetic oligonucleotide
ttgggacgacattcttggggaaccatcgtccagtatga

SEQ ID NO: 22545 - DNA, 37 bp, Artificial Sequence
  Synthetic oligonucleotide
tctcccagtttggcttattactgcagtaagcacctga

SEQ ID NO: 22546 - DNA, 38 bp, Artificial Sequence
  Synthetic oligonucleotide
aggtggggatgcccaccaatggattagggacggtggga

SEQ ID NO: 22547 - DNA, 35 bp, Artificial Sequence
  Synthetic oligonucleotide
ggaaaatattttcgcggacggaacaataaaacttg

SEQ ID NO: 22548 - DNA, 38 bp, Artificial Sequence
  Synthetic oligonucleotide
gaaacaacatcggttgtcactggggatagtctagttga

SEQ ID NO: 22549 - DNA, 36 bp, Artificial Sequence
  Synthetic oligonucleotide
atttgtgaactctgattccctcgtggagcaacgtga

SEQ ID NO: 22550 - DNA, 35 bp, Artificial Sequence
  Synthetic oligonucleotide
aagtatacaccattgcgtcagtggtttttcgggct

SEQ ID NO: 22551 - DNA, 37 bp, Artificial Sequence
  Synthetic oligonucleotide
tcttgtggctacatatcagtggtctggaacttcggga

SEQ ID NO: 22552 - DNA, 35 bp, Artificial Sequence
  Synthetic oligonucleotide
atactaggctcgattagtgcttgcggttatggcac

SEQ ID NO: 22553 - DNA, 36 bp, Artificial Sequence
  Synthetic oligonucleotide
ggacaacggagtgtaaatgacttccgcccaaagcga

SEQ ID NO: 22554 - DNA, 35 bp, Artificial Sequence
  Synthetic oligonucleotide
aatgatgttcgaagtgtgcatatatcaatacatca

SEQ ID NO: 22555 - DNA, 35 bp, Artificial Sequence
  Synthetic oligonucleotide
tcccaggaggtcactactaaaacgtatctgtgggc

SEQ ID NO: 22556 - DNA, 36 bp, Artificial Sequence
  Synthetic oligonucleotide
gccaacagagggataatgatcaatcgatccaataga

SEQ ID NO: 22557 - DNA, 36 bp, Artificial Sequence
  Synthetic oligonucleotide
aatcgctacgctttaacagcgtgtgtagttaatcga

SEQ ID NO: 22558 - DNA, 38 bp, Artificial Sequence
  Synthetic oligonucleotide
agcctagattgtcaaacttgattgtacgtaaaagatga

SEQ ID NO: 22559 - DNA, 36 bp, Artificial Sequence
  Synthetic oligonucleotide
gggcttgttgaccctgcaacgatttccaacgcatta

SEQ ID NO: 22560 - DNA, 36 bp, Artificial Sequence
  Synthetic oligonucleotide
atgttgacgacgcgtccgctttggttgttggtaaga

SEQ ID NO: 22561 - DNA, 35 bp, Artificial Sequence
  Synthetic oligonucleotide
atcgtcagttgtctaattagtgtcgaaaacccgta

SEQ ID NO: 22562 - DNA, 35 bp, Artificial Sequence
  Synthetic oligonucleotide
tttaccgaaagcctcagttcaacgaacggaccagt

SEQ ID NO: 22563 - DNA, 37 bp, Artificial Sequence
  Synthetic oligonucleotide
gaagggaaatatcactcctcctgatcctggagccgga

SEQ ID NO: 22564 - DNA, 38 bp, Artificial Sequence
  Synthetic oligonucleotide
tcacgcatcttcaacgggcgccgggctatagggagtga

SEQ ID NO: 22565 - DNA, 37 bp, Artificial Sequence
  Synthetic oligonucleotide
gtaacgagcggtctaactacgaacctgcgattgtcga

SEQ ID NO: 22566 - DNA, 37 bp, Artificial Sequence
  Synthetic oligonucleotide
tgattctcggctgtagctatattgatagcttgcttga

SEQ ID NO: 22567 - DNA, 35 bp, Artificial Sequence
  Synthetic oligonucleotide
ttaactgaaccggaccgtggagggctgaatacacg

SEQ ID NO: 22568 - DNA, 36 bp, Artificial Sequence
  Synthetic oligonucleotide
tccgatgaaatgattcattgcatgaggatttcggaa

SEQ ID NO: 22569 - DNA, 36 bp, Artificial Sequence
  Synthetic oligonucleotide
tatggactgtgcacgcctttgaagttttaggcacaa

SEQ ID NO: 22570 - DNA, 38 bp, Artificial Sequence
  Synthetic oligonucleotide
gagtttcagcggagggaaacgcacgtcatcaggcatga

SEQ ID NO: 22571 - DNA, 35 bp, Artificial Sequence
  Synthetic oligonucleotide
gatcccttaaatcgctgcccaggtgggggtagcct

SEQ ID NO: 22572 - DNA, 36 bp, Artificial Sequence
  Synthetic oligonucleotide
cgtccttgcatgaacgtgacatgtccttgcggtaca

SEQ ID NO: 22573 - DNA, 36 bp, Artificial Sequence
  Synthetic oligonucleotide
caagagacaaaagtgatccatgaacaggtatagtaa

SEQ ID NO: 22574 - DNA, 36 bp, Artificial Sequence
  Synthetic oligonucleotide
ttaatcgtgggtcgctggttcggacgggtccaccga

SEQ ID NO: 22575 - DNA, 36 bp, Artificial Sequence
  Synthetic oligonucleotide
gtacactcccctatgtgacggttcggtttatacgga

SEQ ID NO: 22576 - DNA, 36 bp, Artificial Sequence
  Synthetic oligonucleotide
gacttagagcacagtatagaccggacggtcgaataa

SEQ ID NO: 22577 - DNA, 35 bp, Artificial Sequence
  Synthetic oligonucleotide
agagggatagtgcatagcggatcaaccccccggag

SEQ ID NO: 22578 - DNA, 38 bp, Artificial Sequence
  Synthetic oligonucleotide
ttggacatccgtagtctaaccaacaaagtcaaggttga

SEQ ID NO: 22579 - DNA, 37 bp, Artificial Sequence
  Synthetic oligonucleotide
tcggccctaggaccgatactatacagtgaacgagcga

SEQ ID NO: 22580 - DNA, 36 bp, Artificial Sequence
  Synthetic oligonucleotide
aacgcggctcgggtttatacggccgtttccgataca

SEQ ID NO: 22581 - DNA, 36 bp, Artificial Sequence
  Synthetic oligonucleotide
agaggacttccgcatcatggaaattatgtctcatga

SEQ ID NO: 22582 - DNA, 35 bp, Artificial Sequence
  Synthetic oligonucleotide
agggatattggactcactcagagctgttagtgcca

SEQ ID NO: 22583 - DNA, 37 bp, Artificial Sequence
  Synthetic oligonucleotide
atggttctatggaagcttatacgctatggcatgccga

SEQ ID NO: 22584 - DNA, 37 bp, Artificial Sequence; identical to SEQ ID NO: 16800
  Synthetic oligonucleotide

SEQ ID NO: 22585 - DNA, 38 bp, Artificial Sequence
  Synthetic oligonucleotide
gtctgtcaggcatgccggtaaatggggccatgccgtga

SEQ ID NO: 22586 - DNA, 35 bp, Artificial Sequence
  Synthetic oligonucleotide
tgagaacatgcgaatcgacacctccgtgtgagctg

SEQ ID NO: 22587 - DNA, 35 bp, Artificial Sequence
  Synthetic oligonucleotide
catgcgctggaaaatattgagattcagttagtggt

SEQ ID NO: 22588 - DNA, 38 bp, Artificial Sequence
  Synthetic oligonucleotide
gttacccccgccaagtacgccgatagaggtaaggctga

SEQ ID NO: 22589 - DNA, 35 bp, Artificial Sequence
  Synthetic oligonucleotide
gcgccctgatgaatattacagtgatcgactacccc

SEQ ID NO: 22590 - DNA, 37 bp, Artificial Sequence
  Synthetic oligonucleotide
actgtaatctgtattaggcctatagttacacatagga

SEQ ID NO: 22591 - DNA, 35 bp, Artificial Sequence
  Synthetic oligonucleotide
aatgtgacagctagtcgttgtcattgagtggggga

SEQ ID NO: 22592 - DNA, 35 bp, Artificial Sequence
  Synthetic oligonucleotide
atccgaagtgtcgagttactgctctcaggaaaaga

SEQ ID NO: 22593 - DNA, 35 bp, Artificial Sequence
  Synthetic oligonucleotide
atggaccggttggtggctaacttaaattgggttac

SEQ ID NO: 22594 - DNA, 35 bp, Artificial Sequence
  Synthetic oligonucleotide
gtgcgttcctccccttaggtctgcgatatcactac

SEQ ID NO: 22595 - DNA, 35 bp, Artificial Sequence
  Synthetic oligonucleotide
gaaagagagccgttcagacattcgtctaatgctcg

SEQ ID NO: 22596 - DNA, 35 bp, Artificial Sequence
  Synthetic oligonucleotide
tttgcgctcaatcgtagagtgcttttacgctgatg

SEQ ID NO: 22597 - DNA, 37 bp, Artificial Sequence
  Synthetic oligonucleotide
gggtgttgagacggctatacactttcccccgtccata

SEQ ID NO: 22598 - DNA, 37 bp, Artificial Sequence
  Synthetic oligonucleotide
gcgatcgaccagagaacgggcgtggttcctgactgga

SEQ ID NO: 22599 - DNA, 35 bp, Artificial Sequence
  Synthetic oligonucleotide
gataccttcgaaaggggagtgctaggtaccttttt

SEQ ID NO: 22600 - DNA, 35 bp, Artificial Sequence
  Synthetic oligonucleotide
gtttggccaaactctacgtggggaagctagagcca

SEQ ID NO: 22601 - DNA, 38 bp, Artificial Sequence
  Synthetic oligonucleotide
agtctggttgagatcgtgggaaccttcggattgattga

SEQ ID NO: 22602 - DNA, 35 bp, Artificial Sequence
  Synthetic oligonucleotide
tgatctaccgggcgtccggagaggctcggtcctga

SEQ ID NO: 22603 - DNA, 35 bp, Artificial Sequence
  Synthetic oligonucleotide
cctttagtgacaggtgcgggggctagtgtgagata

SEQ ID NO: 22604 - DNA, 36 bp, Artificial Sequence
  Synthetic oligonucleotide
gggaaggcctacgggctagcgcgctactgcaaagca

SEQ ID NO: 22605 - DNA, 35 bp, Artificial Sequence
  Synthetic oligonucleotide
ccctacgacacatgcatcgtaagggacaagaactg

SEQ ID NO: 22606 - DNA, 35 bp, Artificial Sequence
  Synthetic oligonucleotide
gtattcaatctcggtgcccttacacgtggtggctg

SEQ ID NO: 22607 - DNA, 35 bp, Artificial Sequence
  Synthetic oligonucleotide
tactcatcgaacaatatcgttcggtagaaaaggag

SEQ ID NO: 22608 - DNA, 35 bp, Artificial Sequence
  Synthetic oligonucleotide
acgactagaacgtaaatacactataagaaccgacc

SEQ ID NO: 22609 - DNA, 37 bp, Artificial Sequence
  Synthetic oligonucleotide
tcgataaataacgtctccatgtggaatgaagacaaga

SEQ ID NO: 22610 - DNA, 38 bp, Artificial Sequence
  Synthetic oligonucleotide
gtagtcacgtgtatgggtaggccgacgacactacctga

SEQ ID NO: 22611 - DNA, 38 bp, Artificial Sequence
  Synthetic oligonucleotide
taggactaacgtctcttagtttagcagtatggctttga

SEQ ID NO: 22612 - DNA, 37 bp, Artificial Sequence
  Synthetic oligonucleotide
gtttcaactttaaagtcagctataaggggctacacga

SEQ ID NO: 22613 - DNA, 37 bp, Artificial Sequence
  Synthetic oligonucleotide
gtgaggccctctgtctacgccagagctgagctcgaga

SEQ ID NO: 22614 - DNA, 35 bp, Artificial Sequence
  Synthetic oligonucleotide
cggtcggaagtaccgttccgcgaagaaccattctc

SEQ ID NO: 22615 - DNA, 35 bp, Artificial Sequence
  Synthetic oligonucleotide
taacacggggaaggcatgccgcccacattctgtct

SEQ ID NO: 22616 - DNA, 38 bp, Artificial Sequence
  Synthetic oligonucleotide
atactccgggacgtgacaattttgatcaatcttaatga

SEQ ID NO: 22617 - DNA, 35 bp, Artificial Sequence
  Synthetic oligonucleotide
acgcgcccgtaatcgcgaactgaccgcagtgtgtt

SEQ ID NO: 22618 - DNA, 36 bp, Artificial Sequence
  Synthetic oligonucleotide
tcatcgaaggtggagccctttcaccgaaaggtggta

SEQ ID NO: 22619 - DNA, 36 bp, Artificial Sequence
  Synthetic oligonucleotide
tctgtaggtggaaacgttagtgtttgagtaatataa

SEQ ID NO: 22620 - DNA, 36 bp, Artificial Sequence
  Synthetic oligonucleotide
aacgtcgcacgattgccagtttaagaaccggtacga

SEQ ID NO: 22621 - DNA, 37 bp, Artificial Sequence
  Synthetic oligonucleotide
tgcggacgaacacgaataatgctatagagagtctgga

SEQ ID NO: 22622 - DNA, 35 bp, Artificial Sequence
  Synthetic oligonucleotide
cctcctacagggttatcccttagagtctgttcggg

SEQ ID NO: 22623 - DNA, 35 bp, Artificial Sequence
  Synthetic oligonucleotide
cctgacgagaagcccatcatgtgtccacgtgggtc

SEQ ID NO: 22624 - DNA, 36 bp, Artificial Sequence
  Synthetic oligonucleotide
agtaggcgtttattggtggattgatgaaaacctaaa

SEQ ID NO: 22625 - DNA, 36 bp, Artificial Sequence
  Synthetic oligonucleotide
atctgagagacgcaagataacgagcacggggtgcga

SEQ ID NO: 22626 - DNA, 35 bp, Artificial Sequence; identical to SEQ ID NO: 6463
  Synthetic oligonucleotide

SEQ ID NO: 22627 - DNA, 37 bp, Artificial Sequence
  Synthetic oligonucleotide
actgcggttgcaagcggatcttattacgcgtttggga

SEQ ID NO: 22628 - DNA, 36 bp, Artificial Sequence
  Synthetic oligonucleotide
gacagtctggtacacgtgggataaaagcgtaaatta

SEQ ID NO: 22629 - DNA, 34 bp, Artificial Sequence
  Synthetic oligonucleotide
tcagagtcatagcgtttgacgcgatgaagccacg

SEQ ID NO: 22630 - DNA, 37 bp, Artificial Sequence
  Synthetic oligonucleotide
gctgtagtagtgagtagtgtggctcggggccaggcga

SEQ ID NO: 22631 - DNA, 36 bp, Artificial Sequence
  Synthetic oligonucleotide
ctacaattgccggatcttaacggtaatggtagggaa

SEQ ID NO: 22632 - DNA, 36 bp, Artificial Sequence
  Synthetic oligonucleotide
ccttcgcggagagttcgcccatgtcgatatgggata

SEQ ID NO: 22633 - DNA, 37 bp, Artificial Sequence
  Synthetic oligonucleotide
aacgttgcgggactatgttcagtataaacgtcggaga

SEQ ID NO: 22634 - DNA, 36 bp, Artificial Sequence
  Synthetic oligonucleotide
gatcgggacacgccacacgtaaacatatccgggtta

SEQ ID NO: 22635 - DNA, 36 bp, Artificial Sequence
  Synthetic oligonucleotide
aaaggctggtcttataaaaatttacgcccctccgca

SEQ ID NO: 22636 - DNA, 36 bp, Artificial Sequence
  Synthetic oligonucleotide
tctgtgccccattaatagcatgaactgtcgcgtgaa

SEQ ID NO: 22637 - DNA, 35 bp, Artificial Sequence
  Synthetic oligonucleotide
gtccggtaaaggctgtgacaatggcctggtgctaa

SEQ ID NO: 22638 - DNA, 35 bp, Artificial Sequence
  Synthetic oligonucleotide
tcatgatcctgttattgatgggtggtacgaatcac

SEQ ID NO: 22639 - DNA, 38 bp, Artificial Sequence
  Synthetic oligonucleotide
acagagtaagcctgaattctatgggtctgccagtctga

SEQ ID NO: 22640 - DNA, 38 bp, Artificial Sequence
  Synthetic oligonucleotide
gttcctggacagtagcagttatggtagacagtatgtga

SEQ ID NO: 22641 - DNA, 35 bp, Artificial Sequence
  Synthetic oligonucleotide
gtcccaaaatgactcgtcacacgtgcctctttcga

SEQ ID NO: 22642 - DNA, 35 bp, Artificial Sequence
  Synthetic oligonucleotide
gtgaggggccaccctgagcttctaaaagactacag

SEQ ID NO: 22643 - DNA, 32 bp, Artificial Sequence
  Synthetic oligonucleotide
tacacgtcatacttcctgacgtgttaggctga

SEQ ID NO: 22644 - DNA, 37 bp, Artificial Sequence
  Synthetic oligonucleotide
agacggataaattgtttgggcccccgcaccggcggga

SEQ ID NO: 22645 - DNA, 37 bp, Artificial Sequence
  Synthetic oligonucleotide
aaagagatgtaggggacgacgccgtctgccatttgga

SEQ ID NO: 22646 - DNA, 37 bp, Artificial Sequence
  Synthetic oligonucleotide
gcacggaataatcagactcagttcatactttatgtga

SEQ ID NO: 22647 - DNA, 35 bp, Artificial Sequence
  Synthetic oligonucleotide
gtgtggcactaatctcactccagattgcatacata

SEQ ID NO: 22648 - DNA, 38 bp, Artificial Sequence
  Synthetic oligonucleotide
cccgtaaatccaatcaacgggttggctgtgggacatga

SEQ ID NO: 22649 - DNA, 38 bp, Artificial Sequence
  Synthetic oligonucleotide
atcggtttttagcagagttctttaccacgtcgtggtga

SEQ ID NO: 22650 - DNA, 35 bp, Artificial Sequence
  Synthetic oligonucleotide
ggcgagaggtaataacagttggatatcactctgct

SEQ ID NO: 22651 - DNA, 37 bp, Artificial Sequence
  Synthetic oligonucleotide
aagtacaaagctcacagctgcacttcaggtacaacga

SEQ ID NO: 22652 - DNA, 35 bp, Artificial Sequence
  Synthetic oligonucleotide
atgtgtgccttcgtgtggactacaataattatccg

SEQ ID NO: 22653 - DNA, 38 bp, Artificial Sequence
  Synthetic oligonucleotide
tgccttcggaagttccatctacccgggcccagagttga

SEQ ID NO: 22654 - DNA, 35 bp, Artificial Sequence
  Synthetic oligonucleotide
cactctccagctaccttcttagccccctgatctgg

SEQ ID NO: 22655 - DNA, 37 bp, Artificial Sequence
  Synthetic oligonucleotide
tacggcggtccgaaactttgagttaactgacgttgga

SEQ ID NO: 22656 - DNA, 36 bp, Artificial Sequence
  Synthetic oligonucleotide
gtctcagtgcccatttatgctgtagggatatcataa

SEQ ID NO: 22657 - DNA, 36 bp, Artificial Sequence
  Synthetic oligonucleotide
gaaccgctcgagttgatataaacttcttcagtctga

SEQ ID NO: 22658 - DNA, 37 bp, Artificial Sequence
  Synthetic oligonucleotide
gaggtcgagagagttgtgttggccagataattaaaga

SEQ ID NO: 22659 - DNA, 38 bp, Artificial Sequence
  Synthetic oligonucleotide
ggttaatcgcatcaggccggataggagtaaaattttga

SEQ ID NO: 22660 - DNA, 35 bp, Artificial Sequence
  Synthetic oligonucleotide
gccactgagattcccttccgattgcggactaaggg

SEQ ID NO: 22661 - DNA, 35 bp, Artificial Sequence
  Synthetic oligonucleotide
tttccgagctggaaagagctcagatagtatctgcg

SEQ ID NO: 22662 - DNA, 36 bp, Artificial Sequence
  Synthetic oligonucleotide
atacgccaatgcagtggtgttagatatatggcccca

SEQ ID NO: 22663 - DNA, 35 bp, Artificial Sequence
  Synthetic oligonucleotide
tcgttaacagtacgattcgagcactccccctcacg

SEQ ID NO: 22664 - DNA, 37 bp, Artificial Sequence
  Synthetic oligonucleotide
gaatcttcacagacaacaagtcgaccgcggtgaccga

SEQ ID NO: 22665 - DNA, 36 bp, Artificial Sequence
  Synthetic oligonucleotide
tacggacctagctgcgctggcctggagtctcataga

SEQ ID NO: 22666 - DNA, 36 bp, Artificial Sequence
  Synthetic oligonucleotide
gagcgactgaatttccatgttgaagccgtagtggga

SEQ ID NO: 22667 - DNA, 38 bp, Artificial Sequence
  Synthetic oligonucleotide
cagtgacacgttatatgggagtcaagctatagacttga

SEQ ID NO: 22668 - DNA, 36 bp, Artificial Sequence
  Synthetic oligonucleotide
gctggcgacttaggacgcattcctttccagctgtta

SEQ ID NO: 22669 - DNA, 36 bp, Artificial Sequence
  Synthetic oligonucleotide
gacattaggtcatggcaccgcgtaaatgatagagat

SEQ ID NO: 22670 - DNA, 36 bp, Artificial Sequence
  Synthetic oligonucleotide
ggtgcaccgctcctgcaggacccgggattgagagaa

SEQ ID NO: 22671 - DNA, 36 bp, Artificial Sequence
  Synthetic oligonucleotide
tgccgtgccggcacaattacatcgggttacgcctaa

SEQ ID NO: 22672 - DNA, 36 bp, Artificial Sequence
  Synthetic oligonucleotide
ggagtttgcgggtccttctgccgttaggataaaaca

SEQ ID NO: 22673 - DNA, 35 bp, Artificial Sequence
  Synthetic oligonucleotide
ttctcagtgagcagttagtattacggcgcacagag

SEQ ID NO: 22674 - DNA, 35 bp, Artificial Sequence
  Synthetic oligonucleotide
cgtctggccacttgagtactgggtgttgacccctg

SEQ ID NO: 22675 - DNA, 35 bp, Artificial Sequence
  Synthetic oligonucleotide
gtcgtgcgaatagaaagcctaaattctaggggttt

SEQ ID NO: 22676 - DNA, 35 bp, Artificial Sequence
  Synthetic oligonucleotide
gttccaacgtatggaggtgcaggtgggttcactgg

SEQ ID NO: 22677 - DNA, 37 bp, Artificial Sequence
  Synthetic oligonucleotide
aatcacgtcggatcgccgagcaaagggtcctcccgga

SEQ ID NO: 22678 - DNA, 35 bp, Artificial Sequence
  Synthetic oligonucleotide
ggtcatggcctccataaagagtggcgtatactttc

SEQ ID NO: 22679 - DNA, 36 bp, Artificial Sequence
  Synthetic oligonucleotide
gtataaggctgagagtgagtattcaaattctttcga

SEQ ID NO: 22680 - DNA, 35 bp, Artificial Sequence
  Synthetic oligonucleotide
tacaagctgacctaaaggtagtactcaataaagag

SEQ ID NO: 22681 - DNA, 38 bp, Artificial Sequence
  Synthetic oligonucleotide
tttcggcctgtaagtcggacgaacggtaatggacttga

SEQ ID NO: 22682 - DNA, 37 bp, Artificial Sequence
  Synthetic oligonucleotide
gatctcgtatatgccgcacggcctcgggaatctacga

SEQ ID NO: 22683 - DNA, 36 bp, Artificial Sequence
  Synthetic oligonucleotide
atcaagagggagtggatccaactgcgattgagtgta

SEQ ID NO: 22684 - DNA, 35 bp, Artificial Sequence
  Synthetic oligonucleotide
ggtctcgtactacagaacgggtatgcaggcgacaa

SEQ ID NO: 22685 - DNA, 37 bp, Artificial Sequence
  Synthetic oligonucleotide
ggacagttatccgaacggtgagtaaatgtagcatgga

SEQ ID NO: 22686 - DNA, 35 bp, Artificial Sequence
  Synthetic oligonucleotide
tctggcaaacaatgcgggaagtgatgaccgtgccg

SEQ ID NO: 22687 - DNA, 35 bp, Artificial Sequence
  Synthetic oligonucleotide
taggggaggccatggctcagaccgactaacgactc

SEQ ID NO: 22688 - DNA, 35 bp, Artificial Sequence
  Synthetic oligonucleotide
gagctaccccccgcctgtactgccgtttggggaaa

SEQ ID NO: 22689 - DNA, 36 bp, Artificial Sequence
  Synthetic oligonucleotide
tccgtaacgcatggcggatatgtaagccgttggtta

SEQ ID NO: 22690 - DNA, 36 bp, Artificial Sequence
  Synthetic oligonucleotide
aggacgctacagagcctgaataaggttggtatatga

SEQ ID NO: 22691 - DNA, 35 bp, Artificial Sequence
  Synthetic oligonucleotide
taacttagttcgtttaagggtgttcagttttcgtg

SEQ ID NO: 22692 - DNA, 36 bp, Artificial Sequence
  Synthetic oligonucleotide
agcgacgtgagtgctcgtctgaatgttcgaactgga

SEQ ID NO: 22693 - DNA, 35 bp, Artificial Sequence
  Synthetic oligonucleotide
atagaccagggagccggcgccgaagctgttccgta

SEQ ID NO: 22694 - DNA, 35 bp, Artificial Sequence
  Synthetic oligonucleotide
gccagatctggcgatcgggttgttctggtgcatac

SEQ ID NO: 22695 - DNA, 38 bp, Artificial Sequence; identical to SEQ ID NO: 6632
  Synthetic oligonucleotide

SEQ ID NO: 22696 - DNA, 36 bp, Artificial Sequence
  Synthetic oligonucleotide
atgttacccatgacagagacagtggggtagctttta

SEQ ID NO: 22697 - DNA, 36 bp, Artificial Sequence
  Synthetic oligonucleotide
tccggtgttatatcacggtatggtactgcctatcaa

SEQ ID NO: 22698 - DNA, 35 bp, Artificial Sequence
  Synthetic oligonucleotide
tccaagtacgaacctcagaattcgaggacgttgat

SEQ ID NO: 22699 - DNA, 35 bp, Artificial Sequence
  Synthetic oligonucleotide
agcctaggctgaaatgcagtgatctggccttctcc

SEQ ID NO: 22700 - DNA, 35 bp, Artificial Sequence
  Synthetic oligonucleotide
ttggataggtactagataaggacacctgaatcacg

SEQ ID NO: 22701 - DNA, 37 bp, Artificial Sequence
  Synthetic oligonucleotide
gtaagccctgaatccccgaacggggtctgtttgatga

SEQ ID NO: 22702 - DNA, 38 bp, Artificial Sequence
  Synthetic oligonucleotide
gccgcgagtaacgggttctgttattagggccgacttga

SEQ ID NO: 22703 - DNA, 35 bp, Artificial Sequence
  Synthetic oligonucleotide
atgaagagcttttggcccggttgctaccattagac

SEQ ID NO: 22704 - DNA, 36 bp, Artificial Sequence
  Synthetic oligonucleotide
gctacgtggtgtgtgagggctggtacgggagtaatg

SEQ ID NO: 22705 - DNA, 37 bp, Artificial Sequence
  Synthetic oligonucleotide
atcgattgtaaaggctccaggccagagtatctgttga

SEQ ID NO: 22706 - DNA, 36 bp, Artificial Sequence
  Synthetic oligonucleotide
ccttgcgtacgcgcgtcgataacgtaaatagcatta

SEQ ID NO: 22707 - DNA, 35 bp, Artificial Sequence
  Synthetic oligonucleotide
gaagccaattacatcgagactggttagctctgcta

SEQ ID NO: 22708 - DNA, 35 bp, Artificial Sequence
  Synthetic oligonucleotide
ttttctattgcgcagctgagtgaggaccgtgcatc

SEQ ID NO: 22709 - DNA, 36 bp, Artificial Sequence
  Synthetic oligonucleotide
cgatcgctaaaaggtttctgccgtggttgcaaacca

SEQ ID NO: 22710 - DNA, 38 bp, Artificial Sequence
  Synthetic oligonucleotide
gacagcttattgcgcgtcaacccgccccttcctcctga

SEQ ID NO: 22711 - DNA, 35 bp, Artificial Sequence
  Synthetic oligonucleotide
actgtgaaaaggtcattaagagggggtctgataac

SEQ ID NO: 22712 - DNA, 36 bp, Artificial Sequence
  Synthetic oligonucleotide
gattgtgcactagcgcaatactgcgtagtcgacata

SEQ ID NO: 22713 - DNA, 36 bp, Artificial Sequence
  Synthetic oligonucleotide
gcccgtacgaccaatcaggcgcaattcgaacactga

SEQ ID NO: 22714 - DNA, 35 bp, Artificial Sequence
  Synthetic oligonucleotide
ttgacaccgagcgagaactaactgcgcagtagcac

SEQ ID NO: 22715 - DNA, 37 bp, Artificial Sequence
  Synthetic oligonucleotide
aaacattagcgactcatttcgggtaagtaagtaacga

SEQ ID NO: 22716 - DNA, 36 bp, Artificial Sequence
  Synthetic oligonucleotide
ggtctgcatcttatgttgattccccctggccacgta

SEQ ID NO: 22717 - DNA, 35 bp, Artificial Sequence
  Synthetic oligonucleotide
gtccgttggatgcatagctcggtggccgccaacag

SEQ ID NO: 22718 - DNA, 36 bp, Artificial Sequence
  Synthetic oligonucleotide
agaatgagctgccatacgtggtcaatacagaaagca

SEQ ID NO: 22719 - DNA, 35 bp, Artificial Sequence
  Synthetic oligonucleotide
gatatctatcactcgcagtcgattcgtagtcaatc

SEQ ID NO: 22720 - DNA, 35 bp, Artificial Sequence
  Synthetic oligonucleotide
gcgatagttctttcgtctgtagtttgcgacttcct

SEQ ID NO: 22721 - DNA, 38 bp, Artificial Sequence
  Synthetic oligonucleotide
tgtgaaaccctcgtgggaattgaaattgtaatgtctga

SEQ ID NO: 22722 - DNA, 36 bp, Artificial Sequence
  Synthetic oligonucleotide
attgtatgcccgccagtcctgaattgttaaatacga

SEQ ID NO: 22723 - DNA, 36 bp, Artificial Sequence
  Synthetic oligonucleotide
tgttattggtcggccgctggccatatcatttcaaga

SEQ ID NO: 22724 - DNA, 34 bp, Artificial Sequence; identical to SEQ ID NO: 10797
  Synthetic oligonucleotide

SEQ ID NO: 22725 - DNA, 35 bp, Artificial Sequence
  Synthetic oligonucleotide
cgaactgttatcgggtaagtacattttaggggctg

SEQ ID NO: 22726 - DNA, 36 bp, Artificial Sequence
  Synthetic oligonucleotide
gcacacgtgttatcaccaacgattggtatacagaca

SEQ ID NO: 22727 - DNA, 35 bp, Artificial Sequence
  Synthetic oligonucleotide
attatacgggtcataggatcccacaacttgagctt

SEQ ID NO: 22728 - DNA, 37 bp, Artificial Sequence
  Synthetic oligonucleotide
gtcgctgcttagaactgtgccgtcgtttggatacgga

SEQ ID NO: 22729 - DNA, 37 bp, Artificial Sequence
  Synthetic oligonucleotide
ttgaaagagtttacggtacactaggtcgatattagga

SEQ ID NO: 22730 - DNA, 35 bp, Artificial Sequence
  Synthetic oligonucleotide
gctttacgcggggagatactctaatgtggttgtac

SEQ ID NO: 22731 - DNA, 37 bp, Artificial Sequence
  Synthetic oligonucleotide
gtgagcatggctggaagtatccctgaagcttagcgga

SEQ ID NO: 22732 - DNA, 35 bp, Artificial Sequence
  Synthetic oligonucleotide
gacatgcttaagccagtcaacatagctttggatgg

SEQ ID NO: 22733 - DNA, 37 bp, Artificial Sequence
  Synthetic oligonucleotide
aggacggttaccaatgcctgagtgtgtgcaggctaga

SEQ ID NO: 22734 - DNA, 36 bp, Artificial Sequence
  Synthetic oligonucleotide
tgcgatgggacactatgactgtcgaaacgcggacta

SEQ ID NO: 22735 - DNA, 38 bp, Artificial Sequence
  Synthetic oligonucleotide
tcgacatatacgacaggacatagtgtcgcaacgtgcga

SEQ ID NO: 22736 - DNA, 36 bp, Artificial Sequence
  Synthetic oligonucleotide
ggagcaggtcctcgcctgctctgtgtcgctgactga

SEQ ID NO: 22737 - DNA, 35 bp, Artificial Sequence
  Synthetic oligonucleotide
tcgaactaggtaagatggtatgcgtacgtgctaac

SEQ ID NO: 22738 - DNA, 37 bp, Artificial Sequence
  Synthetic oligonucleotide
gatctgtcagtctctatgagccattagtacttaatga

SEQ ID NO: 22739 - DNA, 37 bp, Artificial Sequence
  Synthetic oligonucleotide
ctaagtctacggaggttcacgatgggctgtatgtaga

SEQ ID NO: 22740 - DNA, 35 bp, Artificial Sequence
  Synthetic oligonucleotide
acacgggctcaacggtagatcgatcctttcacagc

SEQ ID NO: 22741 - DNA, 37 bp, Artificial Sequence
  Synthetic oligonucleotide
aagcttcgatgacgcggctaatggttttccacttaga

SEQ ID NO: 22742 - DNA, 35 bp, Artificial Sequence
  Synthetic oligonucleotide
agcaaaagtctgaaagagggcatgcattgcgccgt

SEQ ID NO: 22743 - DNA, 38 bp, Artificial Sequence
  Synthetic oligonucleotide
tgtctgataaaagctctgtggtacatcgcccggcgtga

SEQ ID NO: 22744 - DNA, 35 bp, Artificial Sequence
  Synthetic oligonucleotide
tcaacgatactatggacgcgcgattttgtcgtata

SEQ ID NO: 22745 - DNA, 37 bp, Artificial Sequence
  Synthetic oligonucleotide
atgtatctggcgtagtgtgggccaaggtggacaagga

SEQ ID NO: 22746 - DNA, 38 bp, Artificial Sequence
  Synthetic oligonucleotide
attgtttgccggggtttgtaaggggttaaggtccctga

SEQ ID NO: 22747 - DNA, 35 bp, Artificial Sequence
  Synthetic oligonucleotide
ttgtctcgatacaaattattagcgggtcatttgaa

SEQ ID NO: 22748 - DNA, 36 bp, Artificial Sequence
  Synthetic oligonucleotide
acagacggggtaatctacgccaaacgttgtttttca

SEQ ID NO: 22749 - DNA, 35 bp, Artificial Sequence
  Synthetic oligonucleotide
tgaacttgggttaaacgttgtaatggtgtgcactt

SEQ ID NO: 22750 - DNA, 36 bp, Artificial Sequence
  Synthetic oligonucleotide
gtagtgcgtggttcgaaaacccaggtcaactcataa

SEQ ID NO: 22751 - DNA, 37 bp, Artificial Sequence
  Synthetic oligonucleotide
atgtcctagcaacgaggtacgcagtgcgtgtactcga

SEQ ID NO: 22752 - DNA, 37 bp, Artificial Sequence
  Synthetic oligonucleotide
tgaacctcttggcaatacagtctgaactaggacgtga

SEQ ID NO: 22753 - DNA, 35 bp, Artificial Sequence
  Synthetic oligonucleotide
atccgagggggtaatgttcaaagcgatgttgggca

SEQ ID NO: 22754 - DNA, 38 bp, Artificial Sequence
  Synthetic oligonucleotide
tatcctctccccggtggatcgctatacaggccatatga

SEQ ID NO: 22755 - DNA, 35 bp, Artificial Sequence
  Synthetic oligonucleotide
ttagtctctgctgacggatgcaggtctctgaggtc

SEQ ID NO: 22756 - DNA, 36 bp, Artificial Sequence
  Synthetic oligonucleotide
ggttaagcccttcagtgaaaggttgtcatgttagga

SEQ ID NO: 22757 - DNA, 36 bp, Artificial Sequence
  Synthetic oligonucleotide
agatggagactgggtagatactgtatacaacaataa

SEQ ID NO: 22758 - DNA, 37 bp, Artificial Sequence
  Synthetic oligonucleotide
ggacgaaccgttcgagctcgatatagcaggtatagga

SEQ ID NO: 22759 - DNA, 38 bp, Artificial Sequence
  Synthetic oligonucleotide
aacttacgtatgaaagcccggggtttatcctgggctga

SEQ ID NO: 22760 - DNA, 36 bp, Artificial Sequence
  Synthetic oligonucleotide
gtttgctatacgtgtcttacttcgcagtcatcttaa

SEQ ID NO: 22761 - DNA, 36 bp, Artificial Sequence
  Synthetic oligonucleotide
agtatgcaggagtagaagcaacgtctgaaacgggta

SEQ ID NO: 22762 - DNA, 35 bp, Artificial Sequence
  Synthetic oligonucleotide
gctctgttcattgcacaccacaccaggaagggtga

SEQ ID NO: 22763 - DNA, 38 bp, Artificial Sequence
  Synthetic oligonucleotide
aacagggattgattgcgttctagggttataggtcttga

SEQ ID NO: 22764 - DNA, 35 bp, Artificial Sequence
  Synthetic oligonucleotide
tgatttctgacgtgcatgttcttgtatggataagt

SEQ ID NO: 22765 - DNA, 37 bp, Artificial Sequence
  Synthetic oligonucleotide
taagcccgccggatggtatacccgggctctgtacaga

SEQ ID NO: 22766 - DNA, 36 bp, Artificial Sequence
  Synthetic oligonucleotide
gccgaagtcttcggctgctgtactggagacaagaga

SEQ ID NO: 22767 - DNA, 36 bp, Artificial Sequence
  Synthetic oligonucleotide
ccaaggatgaaagtcagaccgcatatacgtagcata

SEQ ID NO: 22768 - DNA, 35 bp, Artificial Sequence; identical to SEQ ID NO: 16136
  Synthetic oligonucleotide

SEQ ID NO: 22769 - DNA, 38 bp, Artificial Sequence
  Synthetic oligonucleotide
agctgtcacgctttacaagcgataacgcaattgcatga

SEQ ID NO: 22770 - DNA, 37 bp, Artificial Sequence
  Synthetic oligonucleotide
cttacgtaatacactctttgttaggttgcaatcccga

SEQ ID NO: 22771 - DNA, 36 bp, Artificial Sequence
  Synthetic oligonucleotide
ttgaggatcggcaccttaggccgttgaagtaggtaa

SEQ ID NO: 22772 - DNA, 35 bp, Artificial Sequence
  Synthetic oligonucleotide
aacaagcgaagcttccagagtgggccgttgtacat

SEQ ID NO: 22773 - DNA, 35 bp, Artificial Sequence
  Synthetic oligonucleotide
gaacttatatgggttgctcgcggaaggatagctcg

SEQ ID NO: 22774 - DNA, 36 bp, Artificial Sequence
  Synthetic oligonucleotide
cctaagcgaaacgtcgtgtttatgaaggtggactaa

SEQ ID NO: 22775 - DNA, 37 bp, Artificial Sequence
  Synthetic oligonucleotide
gcttggtacttttgcgggtcggggttatccgaactga

SEQ ID NO: 22776 - DNA, 35 bp, Artificial Sequence
  Synthetic oligonucleotide
gccgtgaaacccactcgtatgggcgcccaccccgg

SEQ ID NO: 22777 - DNA, 35 bp, Artificial Sequence
  Synthetic oligonucleotide
aaggaatcaatgacgacatcatacgcggttgtaac

SEQ ID NO: 22778 - DNA, 38 bp, Artificial Sequence
  Synthetic oligonucleotide
ggtgagctacccggtcctatacactcacgtcgtaatga

SEQ ID NO: 22779 - DNA, 35 bp, Artificial Sequence
  Synthetic oligonucleotide
ttgacgtctgtggcattcgaaggatattcggattt

SEQ ID NO: 22780 - DNA, 38 bp, Artificial Sequence
  Synthetic oligonucleotide
gctgcacaaataacggtgtacccgttggaaacttctga

SEQ ID NO: 22781 - DNA, 35 bp, Artificial Sequence; identical to SEQ ID NO: 8464
  Synthetic oligonucleotide

SEQ ID NO: 22782 - DNA, 38 bp, Artificial Sequence
  Synthetic oligonucleotide
tgtgaagtgcacgccagcgtggtgcgtcatggggttga

SEQ ID NO: 22783 - DNA, 35 bp, Artificial Sequence
  Synthetic oligonucleotide
gcgggactggggtgcagtaggataatgaaatgttt

SEQ ID NO: 22784 - DNA, 36 bp, Artificial Sequence
  Synthetic oligonucleotide
tagaaggaggctcacgggtgcggtcagaaaacacaa

SEQ ID NO: 22785 - DNA, 37 bp, Artificial Sequence
  Synthetic oligonucleotide
gaagggaatccctggctgtacttgttatggtttccga

SEQ ID NO: 22786 - DNA, 36 bp, Artificial Sequence
  Synthetic oligonucleotide
gaaatgacgagagtgtgttaaaattgtcatgttgga

SEQ ID NO: 22787 - DNA, 35 bp, Artificial Sequence
  Synthetic oligonucleotide
taacgtagtgactatgagcatggggtcttgaggtc

SEQ ID NO: 22788 - DNA, 35 bp, Artificial Sequence
  Synthetic oligonucleotide
aagtcgggatgttctgctttctaatccttctgtct

SEQ ID NO: 22789 - DNA, 35 bp, Artificial Sequence
  Synthetic oligonucleotide
tgacccatgaaggcggtgtagcattgcagtgatgg

SEQ ID NO: 22790 - DNA, 37 bp, Artificial Sequence
  Synthetic oligonucleotide
tggacctttatgtggggtatggtctacctgtacacga

SEQ ID NO: 22791 - DNA, 35 bp, Artificial Sequence
  Synthetic oligonucleotide
tctagccgagcataaacgtattttgtaggctcgac

SEQ ID NO: 22792 - DNA, 34 bp, Artificial Sequence
  Synthetic oligonucleotide
ggtgttcggctagtggtttaacgctgatcggcta

SEQ ID NO: 22793 - DNA, 35 bp, Artificial Sequence
  Synthetic oligonucleotide
gtagggcaaagggatcaatgtgggttcatattcta

SEQ ID NO: 22794 - DNA, 37 bp, Artificial Sequence
  Synthetic oligonucleotide
tctctgaaatacagcagttaatactcccgctcagaga

SEQ ID NO: 22795 - DNA, 38 bp, Artificial Sequence
  Synthetic oligonucleotide
accctacgccacgttggtctaggaccgaacagatctga

SEQ ID NO: 22796 - DNA, 36 bp, Artificial Sequence
  Synthetic oligonucleotide
tggacaaactccagatggagttgcaacggttaataa

SEQ ID NO: 22797 - DNA, 37 bp, Artificial Sequence
  Synthetic oligonucleotide
ccatgcgtccggtgggactcgtcaccaggcattagga

SEQ ID NO: 22798 - DNA, 36 bp, Artificial Sequence
  Synthetic oligonucleotide
aagggtccgattagaaatcatggacaactacttcaa

SEQ ID NO: 22799 - DNA, 35 bp, Artificial Sequence
  Synthetic oligonucleotide
gaggggccggttagtccgggaacttgatcatggcc

SEQ ID NO: 22800 - DNA, 35 bp, Artificial Sequence
  Synthetic oligonucleotide
gtgtcgcggatgctcaactttaaaggtactaaggt

SEQ ID NO: 22801 - DNA, 36 bp, Artificial Sequence
  Synthetic oligonucleotide
ggttaacgcacggtatcaaagctattgccgcccaaa

SEQ ID NO: 22802 - DNA, 37 bp, Artificial Sequence
  Synthetic oligonucleotide
gaagtccatatccggactaaagcgggggctcattcga

SEQ ID NO: 22803 - DNA, 35 bp, Artificial Sequence
  Synthetic oligonucleotide
aaaagggctcagacctgattgccttgctagcctgc

SEQ ID NO: 22804 - DNA, 35 bp, Artificial Sequence
  Synthetic oligonucleotide
taccgagcgtggcagtactctggtggatccattcg

SEQ ID NO: 22805 - DNA, 37 bp, Artificial Sequence
  Synthetic oligonucleotide
tcgctcgaacctcacatatgtacggtcggacgccaga

SEQ ID NO: 22806 - DNA, 35 bp, Artificial Sequence
  Synthetic oligonucleotide
agccgccctcagacgggtacgtatgccacaatcag

SEQ ID NO: 22807 - DNA, 36 bp, Artificial Sequence
  Synthetic oligonucleotide
tttgcaccatagttgaagtatggatcttcccgtgga

SEQ ID NO: 22808 - DNA, 38 bp, Artificial Sequence
  Synthetic oligonucleotide
cgaaatgctgccaaagttagcgttacaagttctgttga

SEQ ID NO: 22809 - DNA, 38 bp, Artificial Sequence
  Synthetic oligonucleotide
gcctgggctgcgagtgacgcttttactcgttgaattga

SEQ ID NO: 22810 - DNA, 37 bp, Artificial Sequence
  Synthetic oligonucleotide
ttcaacaaacggtaaactattggggctctattgccga

SEQ ID NO: 22811 - DNA, 35 bp, Artificial Sequence
  Synthetic oligonucleotide
tgtcatgcgagacttgacccgggttgtctgcttag

SEQ ID NO: 22812 - DNA, 37 bp, Artificial Sequence
  Synthetic oligonucleotide
gcccgcaccagagtcaaaaaatagtgcggacacgaga

SEQ ID NO: 22813 - DNA, 37 bp, Artificial Sequence
  Synthetic oligonucleotide
ctcaaggggattataacggccgagtcctcgacagaga

SEQ ID NO: 22814 - DNA, 35 bp, Artificial Sequence
  Synthetic oligonucleotide
gtcgatagtagtcattcatttcagcatactggggc

SEQ ID NO: 22815 - DNA, 35 bp, Artificial Sequence; identical to SEQ ID NO: 13620
  Synthetic oligonucleotide

SEQ ID NO: 22816 - DNA, 36 bp, Artificial Sequence
  Synthetic oligonucleotide
cccgacgtgacggatccggactagcagatcgttgta

SEQ ID NO: 22817 - DNA, 35 bp, Artificial Sequence
  Synthetic oligonucleotide
atacttcccaccttagcgttcggtcaagctggtgc

SEQ ID NO: 22818 - DNA, 36 bp, Artificial Sequence
  Synthetic oligonucleotide
catggaggtatcgtttctccccaagagcgcatatga

SEQ ID NO: 22819 - DNA, 35 bp, Artificial Sequence
  Synthetic oligonucleotide
aatcgggagtggctacgggaaaggtagctttgcat

SEQ ID NO: 22820 - DNA, 38 bp, Artificial Sequence
  Synthetic oligonucleotide
aaatggcgcctttgaccgggatccacacctatgcttga

SEQ ID NO: 22821 - DNA, 35 bp, Artificial Sequence
  Synthetic oligonucleotide
caaatcgagtgaatttggatcgtccaggaatgccg

SEQ ID NO: 22822 - DNA, 37 bp, Artificial Sequence
  Synthetic oligonucleotide
accaatggactggtcaatgccaaaggcgctcattaga

SEQ ID NO: 22823 - DNA, 35 bp, Artificial Sequence
  Synthetic oligonucleotide
gcacctagttacgaggttccgttgtacttcatggt

SEQ ID NO: 22824 - DNA, 36 bp, Artificial Sequence
  Synthetic oligonucleotide
gtcgacatcgaagccctacgggcgtgtataccccta

SEQ ID NO: 22825 - DNA, 38 bp, Artificial Sequence
  Synthetic oligonucleotide
aagtacatagcgcaccttttagtgtaacagttatgtga

SEQ ID NO: 22826 - DNA, 35 bp, Artificial Sequence
  Synthetic oligonucleotide
gaaggtcagatggcattataaagtcaatcggtgag

SEQ ID NO: 22827 - DNA, 38 bp, Artificial Sequence
  Synthetic oligonucleotide
aatatatctgcaacaacgttcgggagatgtactactga

SEQ ID NO: 22828 - DNA, 37 bp, Artificial Sequence
  Synthetic oligonucleotide
taacgggtgtatcatggattcagatgtggtggtatga

SEQ ID NO: 22829 - DNA, 37 bp, Artificial Sequence
  Synthetic oligonucleotide
agtcgagcggttgcgtttcaaatatggttgagctcga

SEQ ID NO: 22830 - DNA, 35 bp, Artificial Sequence
  Synthetic oligonucleotide
gacaggtttagtgcatgggcatagctgctcgtatg

SEQ ID NO: 22831 - DNA, 37 bp, Artificial Sequence
  Synthetic oligonucleotide
agttatagggcagaacaagagggaacgttagacgaga

SEQ ID NO: 22832 - DNA, 88 bp, Artificial Sequence
  Synthetic oligonucleotide
ctagcatgactgcagtacgtctcaaaatctccttaacttcctcttcacccgacgactgtctcttatacacatctgacgctgccgacga

SEQ ID NO: 22833 - DNA, 88 bp, Artificial Sequence
  Synthetic oligonucleotide
tcgtcggcagcgtcagatgtgtataagagacagtcgtcgggtgaagaggaagttaaggagattttgagacgtactgcagtcatgctag

SEQ ID NO: 22834 - DNA, 88 bp, Artificial Sequence
  Synthetic oligonucleotide
ctagcatgactgcagtacgtttcggatacctggacgagcttataccccccctgtcctgtctcttatacacatctgacgctgccgacga

SEQ ID NO: 22835 - DNA, 88 bp, Artificial Sequence
  Synthetic oligonucleotide
tcgtcggcagcgtcagatgtgtataagagacaggacagggggggtataagctcgtccaggtatccgaaacgtactgcagtcatgctag

SEQ ID NO: 22836 - DNA, 89 bp, Artificial Sequence
  Synthetic oligonucleotide
ctagcatgactgcagtacgtgaaaacaagcataggatcgtacggaagtgtacctaactgtctcttatacacatctgacgctgccgacga

SEQ ID NO: 22837 - DNA, 89 bp, Artificial Sequence
  Synthetic oligonucleotide
tcgtcggcagcgtcagatgtgtataagagacagttaggtacacttccgtacgatcctatgcttgttttcacgtactgcagtcatgctag

SEQ ID NO: 22838 - DNA, 88 bp, Artificial Sequence
  Synthetic oligonucleotide
ctagcatgactgcagtacgtattgaggtggttttgaggtgggctatctgagggatctgtctcttatacacatctgacgctgccgacga

SEQ ID NO: 22839 - DNA, 88 bp, Artificial Sequence
  Synthetic oligonucleotide
tcgtcggcagcgtcagatgtgtataagagacagatccctcagatagcccacctcaaaaccacctcaatacgtactgcagtcatgctag

SEQ ID NO: 22840 - DNA, 91 bp, Artificial Sequence
  Synthetic oligonucleotide
ctagcatgactgcagtacgtatatggggtttatggggatggtgttatgggtggaatgtctgtctcttatacacatctgacgctgccgacga

SEQ ID NO: 22841 - DNA, 91 bp, Artificial Sequence
  Synthetic oligonucleotide
tcgtcggcagcgtcagatgtgtataagagacagacattccacccataacaccatccccataaaccccatatacgtactgcagtcatgctag

SEQ ID NO: 22842 - DNA, 91 bp, Artificial Sequence
  Synthetic oligonucleotide
ctagcatgactgcagtacgtagtgggtggtgggttcggtttgcttggttccctgttgactgtctcttatacacatctgacgctgccgacga

SEQ ID NO: 22843 - DNA, 91 bp, Artificial Sequence
  Synthetic oligonucleotide
tcgtcggcagcgtcagatgtgtataagagacagtcaacagggaaccaagcaaaccgaacccaccacccactacgtactgcagtcatgctag

SEQ ID NO: 22844 - DNA, 38 bp, Artificial Sequence; identical to SEQ ID NO: 1243
  Synthetic oligonucleotide

SEQ ID NO: 22845 - DNA, 38 bp, Artificial Sequence
  Synthetic oligonucleotide
actatagaacaatccaccgctttaaatcaactatctga

SEQ ID NO: 22846 - DNA, 38 bp, Artificial Sequence
  Synthetic oligonucleotide
actatagaacaatccaccgctttaaatcaactatctca

SEQ ID NO: 22847 - DNA, 38 bp, Artificial Sequence
  Synthetic oligonucleotide
actatagaacaatccaccgctttaaatcaactatctaa

SEQ ID NO: 22848 - DNA, 38 bp, Artificial Sequence
  Synthetic oligonucleotide
actatagaacaatccaccgctttaaataaactatctga

SEQ ID NO: 22849 - DNA, 38 bp, Artificial Sequence
  Synthetic oligonucleotide
actatagaacaatccacctctttaaatcaactatctga

SEQ ID NO: 22850 - DNA, 38 bp, Artificial Sequence
  Synthetic oligonucleotide
actatagaacaatccaccgctttaaatcaactatccga

SEQ ID NO: 22851 - DNA, 38 bp, Artificial Sequence
  Synthetic oligonucleotide
aatatagaacaatccaccgctttaaatcaactatctga

SEQ ID NO: 22852 - DNA, 38 bp, Artificial Sequence
  Synthetic oligonucleotide
actatagaacaatccaccgctttaaatcaactatccta

SEQ ID NO: 22853 - DNA, 38 bp, Artificial Sequence
  Synthetic oligonucleotide
actatagaacaatccacctctttaaatcaactatctta

SEQ ID NO: 22854 - DNA, 38 bp, Artificial Sequence
  Synthetic oligonucleotide
actatagaacaatcccccgctttaaatcaactatctga

SEQ ID NO: 22855 - DNA, 38 bp, Artificial Sequence
  Synthetic oligonucleotide
actatagaacaatccgccgctttaaatcaactatctga

SEQ ID NO: 22856 - DNA, 38 bp, Artificial Sequence
  Synthetic oligonucleotide
actatagaacaatcctccgctttaaatcaactatctga

SEQ ID NO: 22857 - DNA, 38 bp, Artificial Sequence
  Synthetic oligonucleotide
actatataacaatccaccgctttaaatcaactatctga

SEQ ID NO: 22858 - DNA, 38 bp, Artificial Sequence; identical to SEQ ID NO: 1246
  Synthetic oligonucleotide

SEQ ID NO: 22859 - DNA, 38 bp, Artificial Sequence; identical to SEQ ID NO: 1256
  Synthetic oligonucleotide

SEQ ID NO: 22860 - DNA, 38 bp, Artificial Sequence
  Synthetic oligonucleotide
tacccctgacaatcctcgcgccgaggcctccatcctaa

SEQ ID NO: 22861 - DNA, 38 bp, Artificial Sequence; identical to SEQ ID NO: 22860
  Synthetic oligonucleotide

SEQ ID NO: 22862 - DNA, 36 bp, Artificial Sequence; identical to SEQ ID NO: 1248
  Synthetic oligonucleotide

SEQ ID NO: 22863 - DNA, 36 bp, Artificial Sequence
  Synthetic oligonucleotide
gattttaaaacccttgcacctgattgtgccaatcaa

SEQ ID NO: 22864 - DNA, 36 bp, Artificial Sequence
  Synthetic oligonucleotide
gattttaaaacccttgcacctgattgtgccaatcga

SEQ ID NO: 22865 - DNA, 36 bp, Artificial Sequence
  Synthetic oligonucleotide
gattttaaaacccttgcacctgattgtgccaatcta

SEQ ID NO: 22866 - DNA, 36 bp, Artificial Sequence; identical to SEQ ID NO: 1253
  Synthetic oligonucleotide

SEQ ID NO: 22867 - DNA, 36 bp, Artificial Sequence
  Synthetic oligonucleotide
aacccaattcacatacactctcaccctcactaaaca

SEQ ID NO: 22868 - DNA, 36 bp, Artificial Sequence
  Synthetic oligonucleotide
aacccaattcacatacactctcaccctcactaaaaa

SEQ ID NO: 22869 - DNA, 36 bp, Artificial Sequence
  Synthetic oligonucleotide
aacccaattcacatacactctcaccctcactaaaga

SEQ ID NO: 22870 - DNA, 36 bp, Artificial Sequence
  Synthetic oligonucleotide
aacccaattcacatacactctcaccctcactaaata

SEQ ID NO: 22871 - DNA, 36 bp, Artificial Sequence
  Synthetic oligonucleotide
aacccaattcacatacactctcaccctcactaacca

SEQ ID NO: 22872 - DNA, 36 bp, Artificial Sequence
  Synthetic oligonucleotide
aacccaattcacatacactctcaccctcactaacaa

SEQ ID NO: 22873 - DNA, 36 bp, Artificial Sequence
  Synthetic oligonucleotide
aacccaattcacatacactctctccctcactaaaca

SEQ ID NO: 22874 - DNA, 36 bp, Artificial Sequence
  Synthetic oligonucleotide
aacccaattcacatacactctccccctcactaaaca

SEQ ID NO: 22875 - DNA, 36 bp, Artificial Sequence
  Synthetic oligonucleotide
aacccaattcacatacactctcgccctcactaaaca

SEQ ID NO: 22876 - DNA, 36 bp, Artificial Sequence; identical to SEQ ID NO: 1827
  Synthetic oligonucleotide

SEQ ID NO: 22877 - DNA, 36 bp, Artificial Sequence
  Synthetic oligonucleotide
aacccaattcacataaactctcaccctcactaaaca

SEQ ID NO: 22878 - DNA, 36 bp, Artificial Sequence
  Synthetic oligonucleotide
aacccaatccacatacactctcaccctcactaaaca

SEQ ID NO: 22879 - DNA, 36 bp, Artificial Sequence
  Synthetic oligonucleotide
aacccaattcacatacactctcaccctcactaaacc

SEQ ID NO: 22880 - DNA, 36 bp, Artificial Sequence
  Synthetic oligonucleotide
aacccaattcacatacgctctcaccctcactaaaca

SEQ ID NO: 22881 - DNA, 36 bp, Artificial Sequence
  Synthetic oligonucleotide
aacccaattcacatacactctctccctcactaaaaa

SEQ ID NO: 22882 - DNA, 36 bp, Artificial Sequence
  Synthetic oligonucleotide
aacccaattcacataccctctcaccctcactaaaca

SEQ ID NO: 22883 - DNA, 36 bp, Artificial Sequence
  Synthetic oligonucleotide
aacccaattcacatacactctcgccctcactaaaaa

SEQ ID NO: 22884 - DNA, 36 bp, Artificial Sequence
  Synthetic oligonucleotide
aacccaattcacatacactcttaccctcactaaaca

SEQ ID NO: 22885 - DNA, 36 bp, Artificial Sequence
  Synthetic oligonucleotide
aacccaatacacatacactctcaccctcactaaaca

SEQ ID NO: 22886 - DNA, 36 bp, Artificial Sequence
  Synthetic oligonucleotide
aacccaattcacatacactctcaccctctctaaaca

SEQ ID NO: 22887 - DNA, 36 bp, Artificial Sequence
  Synthetic oligonucleotide
aacccaattcacatacactctccccctcactaaaaa

SEQ ID NO: 22888 - DNA, 36 bp, Artificial Sequence
  Synthetic oligonucleotide
aacccaattcacataccctctcaccctcactaaaaa

SEQ ID NO: 22889 - DNA, 36 bp, Artificial Sequence
  Synthetic oligonucleotide
aacccaattcacatacactctcaccctcactaaact

SEQ ID NO: 22890 - DNA, 36 bp, Artificial Sequence
  Synthetic oligonucleotide
aacccaattcacatacaccctcaccctcactaaaca

SEQ ID NO: 22891 - DNA, 36 bp, Artificial Sequence
  Synthetic oligonucleotide
aacccaattcacatactctctcaccctcactaaaaa

SEQ ID NO: 22892 - DNA, 36 bp, Artificial Sequence
  Synthetic oligonucleotide
aacccaatgcacatacactctcaccctcactaaaca

SEQ ID NO: 22893 - DNA, 36 bp, Artificial Sequence
  Synthetic oligonucleotide
agcccaattcacatacactctcaccctcactaaaca

SEQ ID NO: 22894 - DNA, 36 bp, Artificial Sequence
  Synthetic oligonucleotide
aacccaattcacatacactctaaccctcactaaaca

SEQ ID NO: 22895 - DNA, 36 bp, Artificial Sequence
  Synthetic oligonucleotide
aacccaaatcacatacactctcaccctcactaaaca

SEQ ID NO: 22896 - DNA, 36 bp, Artificial Sequence
  Synthetic oligonucleotide
aacccaattcacatacactctcaccctcactaaaat

SEQ ID NO: 22897 - DNA, 36 bp, Artificial Sequence
  Synthetic oligonucleotide
aacccaattcacatacactctctccctcactaaaga

SEQ ID NO: 22898 - DNA, 36 bp, Artificial Sequence
  Synthetic oligonucleotide
aacccaattctcatacactctcaccctcactaaaca

SEQ ID NO: 22899 - DNA, 36 bp, Artificial Sequence; identical to SEQ ID NO: 1655
  Synthetic oligonucleotide

SEQ ID NO: 22900 - DNA, 36 bp, Artificial Sequence
  Synthetic oligonucleotide
aacccaactcacatacactctcaccctcactaaaca

SEQ ID NO: 22901 - DNA, 36 bp, Artificial Sequence
  Synthetic oligonucleotide
aacccaattcacatacactctcaccctcactaaaac

SEQ ID NO: 22902 - DNA, 36 bp, Artificial Sequence
  Synthetic oligonucleotide
aacccaattcacatacactctcaccctcactaacta

SEQ ID NO: 22903 - DNA, 36 bp, Artificial Sequence
  Synthetic oligonucleotide
aacccaattcacatacactctcgccctcactaaaga

SEQ ID NO: 22904 - DNA, 36 bp, Artificial Sequence
  Synthetic oligonucleotide
aacccaattcacattcactctcaccctcactaaaca

SEQ ID NO: 22905 - DNA, 36 bp, Artificial Sequence
  Synthetic oligonucleotide
aaccaaattcacatacactctcaccctcactaaaca

SEQ ID NO: 22906 - DNA, 36 bp, Artificial Sequence
  Synthetic oligonucleotide
aacccaattcacataaactctcaccctcactaaaaa

SEQ ID NO: 22907 - DNA, 36 bp, Artificial Sequence
  Synthetic oligonucleotide
aacccaattcacatacacgctcaccctcactaaaca

SEQ ID NO: 22908 - DNA, 36 bp, Artificial Sequence
  Synthetic oligonucleotide
aacccaattcacatacactctcacactcactaaaca

SEQ ID NO: 22909 - DNA, 36 bp, Artificial Sequence
  Synthetic oligonucleotide
aacccaattcacatacactctcaccatcactaaaca

SEQ ID NO: 22910 - DNA, 36 bp, Artificial Sequence
  Synthetic oligonucleotide
aacccaattcacatacactctcaccctcactaacga

SEQ ID NO: 22911 - DNA, 36 bp, Artificial Sequence
  Synthetic oligonucleotide
aacccaattcacatacactctcaccctcgctaaaca

SEQ ID NO: 22912 - DNA, 36 bp, Artificial Sequence
  Synthetic oligonucleotide
aacccaattcacatacactctccccctcactaaaga

SEQ ID NO: 22913 - DNA, 36 bp, Artificial Sequence
  Synthetic oligonucleotide
aacccaattcgcatacactctcaccctcactaaaca

SEQ ID NO: 22914 - DNA, 36 bp, Artificial Sequence
  Synthetic oligonucleotide
aacccaattcacatacactcacaccctcactaaaca

SEQ ID NO: 22915 - DNA, 36 bp, Artificial Sequence
  Synthetic oligonucleotide
aacccaattcacatacactcccaccctcactaaaca

SEQ ID NO: 22916 - DNA, 36 bp, Artificial Sequence
  Synthetic oligonucleotide
aacccaattcacatacactctcaccctcactaaacg

SEQ ID NO: 22917 - DNA, 36 bp, Artificial Sequence
  Synthetic oligonucleotide
aacccaattcacatactctctcaccctcactaaaga

SEQ ID NO: 22918 - DNA, 36 bp, Artificial Sequence
  Synthetic oligonucleotide
aacccaattcacatactctctcaccctcactaaata

SEQ ID NO: 22919 - DNA, 36 bp, Artificial Sequence; identical to SEQ ID NO: 3008
  Synthetic oligonucleotide

SEQ ID NO: 22920 - DNA, 36 bp, Artificial Sequence
  Synthetic oligonucleotide
aaaccaattcacatacactctcaccctcactaaaca

SEQ ID NO: 22921 - DNA, 36 bp, Artificial Sequence
  Synthetic oligonucleotide
aacacaattcacatacactctcaccctcactaaaca

SEQ ID NO: 22922 - DNA, 36 bp, Artificial Sequence
  Synthetic oligonucleotide
aacccaactcacatacactctcaccctcactaaaaa

SEQ ID NO: 22923 - DNA, 36 bp, Artificial Sequence
  Synthetic oligonucleotide
aacccaagtcacatacactctcaccctcactaaaca

SEQ ID NO: 22924 - DNA, 36 bp, Artificial Sequence
  Synthetic oligonucleotide
aacccaatccacatacactctcaccctcactaaaaa

SEQ ID NO: 22925 - DNA, 36 bp, Artificial Sequence
  Synthetic oligonucleotide
aacccaattaacatacactctcaccctcactaaaca

SEQ ID NO: 22926 - DNA, 36 bp, Artificial Sequence
  Synthetic oligonucleotide
aacccaattcacaaacactctcaccctcactaaaca

SEQ ID NO: 22927 - DNA, 36 bp, Artificial Sequence
  Synthetic oligonucleotide
aacccaattcacacacactctcacccccactaaaca

SEQ ID NO: 22928 - DNA, 36 bp, Artificial Sequence
  Synthetic oligonucleotide
aacccaattcacacacactctcaccctcactaaaca

SEQ ID NO: 22929 - DNA, 36 bp, Artificial Sequence
  Synthetic oligonucleotide
aacccaattcacacacactctccccctcactaaaca

SEQ ID NO: 22930 - DNA, 36 bp, Artificial Sequence
  Synthetic oligonucleotide
aacccaattcacagacactctcaccctcactaaaca

SEQ ID NO: 22931 - DNA, 36 bp, Artificial Sequence
  Synthetic oligonucleotide
aacccaattcacatacaatctcaccctcactaaaca

SEQ ID NO: 22932 - DNA, 36 bp, Artificial Sequence
  Synthetic oligonucleotide
aacccaattcacatacacactcaccctcactaaaca

SEQ ID NO: 22933 - DNA, 36 bp, Artificial Sequence
  Synthetic oligonucleotide
aacccaattcacatacaccctcaccctcactaaaaa

SEQ ID NO: 22934 - DNA, 36 bp, Artificial Sequence
  Synthetic oligonucleotide
aacccaattcacatacactatcaccctcactaaaaa

SEQ ID NO: 22935 - DNA, 36 bp, Artificial Sequence
  Synthetic oligonucleotide
aacccaattcacatacactatcaccctcactaaaca

SEQ ID NO: 22936 - DNA, 36 bp, Artificial Sequence
  Synthetic oligonucleotide
aacccaattcacatacactcccaccctcactaaaaa

SEQ ID NO: 22937 - DNA, 36 bp, Artificial Sequence
  Synthetic oligonucleotide
aacccaattcacatacactcgcaccctcactaaaca

SEQ ID NO: 22938 - DNA, 36 bp, Artificial Sequence
  Synthetic oligonucleotide
aacccaattcacatacactctcaacctcactaaaca

SEQ ID NO: 22939 - DNA, 36 bp, Artificial Sequence
  Synthetic oligonucleotide
aacccaattcacatacactctcacactcactaaaaa

SEQ ID NO: 22940 - DNA, 36 bp, Artificial Sequence
  Synthetic oligonucleotide
aacccaattcacatacactctcaccatccctaaaca

SEQ ID NO: 22941 - DNA, 36 bp, Artificial Sequence; identical to SEQ ID NO: 2131
  Synthetic oligonucleotide

SEQ ID NO: 22942 - DNA, 36 bp, Artificial Sequence
  Synthetic oligonucleotide
aacccaattcacatacactctcacccgcactaaaca

SEQ ID NO: 22943 - DNA, 36 bp, Artificial Sequence
  Synthetic oligonucleotide
aacccaattcacatacactctcaccctaactaaaca

SEQ ID NO: 22944 - DNA, 36 bp, Artificial Sequence
  Synthetic oligonucleotide
aacccaattcacatacactctcaccctcaataaaca

SEQ ID NO: 22945 - DNA, 36 bp, Artificial Sequence
  Synthetic oligonucleotide
aacccaattcacatacactctcaccctcaccaaaca

SEQ ID NO: 22946 - DNA, 36 bp, Artificial Sequence
  Synthetic oligonucleotide
aacccaattcacatacactctcaccctcactaaaag

SEQ ID NO: 22947 - DNA, 36 bp, Artificial Sequence
  Synthetic oligonucleotide
aacccaattcacatacactctcaccctcactaaagc

SEQ ID NO: 22948 - DNA, 36 bp, Artificial Sequence
  Synthetic oligonucleotide
aacccaattcacatacactctcaccctcactaaagt

SEQ ID NO: 22949 - DNA, 36 bp, Artificial Sequence
  Synthetic oligonucleotide
aacccaattcacatacactctcaccctcactaaatc

SEQ ID NO: 22950 - DNA, 36 bp, Artificial Sequence
  Synthetic oligonucleotide
aacccaattcacatacactctcaccctcactaaatt

SEQ ID NO: 22951 - DNA, 36 bp, Artificial Sequence
  Synthetic oligonucleotide
aacccaattcacatacactctcaccctcactaagaa

SEQ ID NO: 22952 - DNA, 36 bp, Artificial Sequence
  Synthetic oligonucleotide
aacccaattcacatacactctcaccctcactaagca

SEQ ID NO: 22953 - DNA, 36 bp, Artificial Sequence
  Synthetic oligonucleotide
aacccaattcacatacactctcaccctcactaagga

SEQ ID NO: 22954 - DNA, 36 bp, Artificial Sequence
  Synthetic oligonucleotide
aacccaattcacatacactctcaccctcactaagta

SEQ ID NO: 22955 - DNA, 36 bp, Artificial Sequence
  Synthetic oligonucleotide
aacccaattcacatacactctcaccctcactaataa

SEQ ID NO: 22956 - DNA, 36 bp, Artificial Sequence
  Synthetic oligonucleotide
aacccaattcacatacactctcaccctcactaatca

SEQ ID NO: 22957 - DNA, 36 bp, Artificial Sequence
  Synthetic oligonucleotide
aacccaattcacatacactctcaccctcactaatga

SEQ ID NO: 22958 - DNA, 36 bp, Artificial Sequence
  Synthetic oligonucleotide
aacccaattcacatacactctcaccctcactaatta

SEQ ID NO: 22959 - DNA, 36 bp, Artificial Sequence
  Synthetic oligonucleotide
aacccaattcacatacactctcaccctcactacaca

SEQ ID NO: 22960 - DNA, 36 bp, Artificial Sequence
  Synthetic oligonucleotide
aacccaattcacatacactctcaccctcactagaca

SEQ ID NO: 22961 - DNA, 36 bp, Artificial Sequence
  Synthetic oligonucleotide
aacccaattcacatacactctcaccctcactataca

SEQ ID NO: 22962 - DNA, 36 bp, Artificial Sequence
  Synthetic oligonucleotide
aacccaattcacatacactctcaccctcactcaaca

SEQ ID NO: 22963 - DNA, 36 bp, Artificial Sequence
  Synthetic oligonucleotide
aacccaattcacatacactctcaccctcactgaaca

SEQ ID NO: 22964 - DNA, 36 bp, Artificial Sequence
  Synthetic oligonucleotide
aacccaattcacatacactctcaccctcacttaaca

SEQ ID NO: 22965 - DNA, 36 bp, Artificial Sequence
  Synthetic oligonucleotide
aacccaattcacatacactctcaccctcattaaaca

SEQ ID NO: 22966 - DNA, 36 bp, Artificial Sequence
  Synthetic oligonucleotide
aacccaattcacatacactctcaccctccctaaaaa

SEQ ID NO: 22967 - DNA, 36 bp, Artificial Sequence
  Synthetic oligonucleotide
aacccaattcacatacactctcaccctccctaaaca

SEQ ID NO: 22968 - DNA, 36 bp, Artificial Sequence
  Synthetic oligonucleotide
aacccaattcacatacactctcaccctccctaaaga

SEQ ID NO: 22969 - DNA, 36 bp, Artificial Sequence
  Synthetic oligonucleotide
aacccaattcacatacactctcaccctccctaaata

SEQ ID NO: 22970 - DNA, 36 bp, Artificial Sequence
  Synthetic oligonucleotide
aacccaattcacatacactctcaccctcgctaaaaa

SEQ ID NO: 22971 - DNA, 36 bp, Artificial Sequence
  Synthetic oligonucleotide
aacccaattcacatacactctcaccctctctaaaaa

SEQ ID NO: 22972 - DNA, 36 bp, Artificial Sequence
  Synthetic oligonucleotide
aacccaattcacatacactctcaccctgactaaaca

SEQ ID NO: 22973 - DNA, 36 bp, Artificial Sequence
  Synthetic oligonucleotide
aacccaattcacatacactctcacccttactaaaca

SEQ ID NO: 22974 - DNA, 36 bp, Artificial Sequence
  Synthetic oligonucleotide
aacccaattcacatacactctcaccttcactaaaca

SEQ ID NO: 22975 - DNA, 36 bp, Artificial Sequence
  Synthetic oligonucleotide
aacccaattcacatacactctcaccttctctaaaca

SEQ ID NO: 22976 - DNA, 36 bp, Artificial Sequence
  Synthetic oligonucleotide
aacccaattcacatacactctcacgctcactaaaca

SEQ ID NO: 22977 - DNA, 36 bp, Artificial Sequence
  Synthetic oligonucleotide
aacccaattcacatacactctcactctcactaaaaa

SEQ ID NO: 22978 - DNA, 36 bp, Artificial Sequence
  Synthetic oligonucleotide
aacccaattcacatacactctcactctcactaaaca

SEQ ID NO: 22979 - DNA, 36 bp, Artificial Sequence
  Synthetic oligonucleotide
aacccaattcacatacactctcagcctcactaaaca

SEQ ID NO: 22980 - DNA, 36 bp, Artificial Sequence
  Synthetic oligonucleotide
aacccaattcacatacactctcatcctcactaaaca

SEQ ID NO: 22981 - DNA, 36 bp, Artificial Sequence
  Synthetic oligonucleotide
aacccaattcacatacactctccccctcactaaata

SEQ ID NO: 22982 - DNA, 36 bp, Artificial Sequence
  Synthetic oligonucleotide
aacccaattcacatacactctcgccctcactaaata

SEQ ID NO: 22983 - DNA, 36 bp, Artificial Sequence
  Synthetic oligonucleotide
aacccaattcacatacactctctccctcactaaata

SEQ ID NO: 22984 - DNA, 36 bp, Artificial Sequence
  Synthetic oligonucleotide
aacccaattcacatacactgtcaccctcactaaaca

SEQ ID NO: 22985 - DNA, 36 bp, Artificial Sequence
  Synthetic oligonucleotide
aacccaattcacatacactttcaccctcactaaaca

SEQ ID NO: 22986 - DNA, 36 bp, Artificial Sequence
  Synthetic oligonucleotide
aacccaattcacatacattctcaccctcactaaaca

SEQ ID NO: 22987 - DNA, 36 bp, Artificial Sequence
  Synthetic oligonucleotide
aacccaattcacataccctctcaccctcactaaaga

SEQ ID NO: 22988 - DNA, 36 bp, Artificial Sequence
  Synthetic oligonucleotide
aacccaattcacatacgctctcaccctcactaaaaa

SEQ ID NO: 22989 - DNA, 36 bp, Artificial Sequence
  Synthetic oligonucleotide
aacccaattcacatacgctctcaccctcactaaaga

SEQ ID NO: 22990 - DNA, 36 bp, Artificial Sequence
  Synthetic oligonucleotide
aacccaattcacatatactctcaccctcactaaaaa

SEQ ID NO: 22991 - DNA, 36 bp, Artificial Sequence
  Synthetic oligonucleotide
aacccaattcacatatactctcaccctcactaaaca

SEQ ID NO: 22992 - DNA, 36 bp, Artificial Sequence
  Synthetic oligonucleotide
aacccaattcacatccactctcaccctcactaaaca

SEQ ID NO: 22993 - DNA, 36 bp, Artificial Sequence
  Synthetic oligonucleotide
aacccaattcacatgcactctcaccctcactaaaca

SEQ ID NO: 22994 - DNA, 36 bp, Artificial Sequence
  Synthetic oligonucleotide
aacccaattcacctacactctcaccctcactaaaaa

SEQ ID NO: 22995 - DNA, 36 bp, Artificial Sequence
  Synthetic oligonucleotide
aacccaattcacctacactctcaccctcactaaaca

SEQ ID NO: 22996 - DNA, 36 bp, Artificial Sequence
  Synthetic oligonucleotide
aacccaattcacgtacactctcaccctcactaaaca

SEQ ID NO: 22997 - DNA, 36 bp, Artificial Sequence
  Synthetic oligonucleotide
aacccaattcacttacactctcaccctcactaaaca

SEQ ID NO: 22998 - DNA, 36 bp, Artificial Sequence
  Synthetic oligonucleotide
aacccaattcagatacactctcaccctcactaaaca

SEQ ID NO: 22999 - DNA, 36 bp, Artificial Sequence
  Synthetic oligonucleotide
aacccaattcatatacactctcaccctcactaaaaa

SEQ ID NO: 23000 - DNA, 36 bp, Artificial Sequence
  Synthetic oligonucleotide
aacccaattcatatacactctcaccctcactaaaca

SEQ ID NO: 23001 - DNA, 36 bp, Artificial Sequence
  Synthetic oligonucleotide
aacccaattcccatacactctcaccctcactaaaca

SEQ ID NO: 23002 - DNA, 36 bp, Artificial Sequence
  Synthetic oligonucleotide
aacccaatttacatacactctcaccctcactaaaca

SEQ ID NO: 23003 - DNA, 36 bp, Artificial Sequence
  Synthetic oligonucleotide
aacccacttcacatacactctcaccctcactaaaca

SEQ ID NO: 23004 - DNA, 36 bp, Artificial Sequence
  Synthetic oligonucleotide
aacccatttcacatacactctcaccctcactaaaca

SEQ ID NO: 23005 - DNA, 36 bp, Artificial Sequence
  Synthetic oligonucleotide
aaccccattcacatacactctcaccctcactaaaaa

SEQ ID NO: 23006 - DNA, 36 bp, Artificial Sequence
  Synthetic oligonucleotide
aaccccattcacatacactctcaccctcactaaaca

SEQ ID NO: 23007 - DNA, 36 bp, Artificial Sequence
  Synthetic oligonucleotide
aacccgattcacatacactctcaccctcactaaaca

SEQ ID NO: 23008 - DNA, 36 bp, Artificial Sequence
  Synthetic oligonucleotide
aaccctattcacatacactctcaccctcactaaaaa

SEQ ID NO: 23009 - DNA, 36 bp, Artificial Sequence
  Synthetic oligonucleotide
aaccctattcacatacactctcaccctcactaaaca

SEQ ID NO: 23010 - DNA, 36 bp, Artificial Sequence
  Synthetic oligonucleotide
aaccgaattcacatacactctcaccctcactaaaca

SEQ ID NO: 23011 - DNA, 36 bp, Artificial Sequence
  Synthetic oligonucleotide
aacctaattcacatacactctcaccctcactaaaaa

SEQ ID NO: 23012 - DNA, 36 bp, Artificial Sequence
  Synthetic oligonucleotide
aacctaattcacatacactctcaccctcactaaaca

SEQ ID NO: 23013 - DNA, 36 bp, Artificial Sequence
  Synthetic oligonucleotide
aactcaattcacatacactctcaccctcactaaaca

SEQ ID NO: 23014 - DNA, 36 bp, Artificial Sequence
  Synthetic oligonucleotide
aatccaattcacatacactctcaccctcactaaaca

SEQ ID NO: 23015 - DNA, 36 bp, Artificial Sequence
  Synthetic oligonucleotide
accccaattcacatacactctcaccctcactaaaaa

SEQ ID NO: 23016 - DNA, 36 bp, Artificial Sequence
  Synthetic oligonucleotide
accccaattcacatacactctcaccctcactaaaca

SEQ ID NO: 23017 - DNA, 36 bp, Artificial Sequence
  Synthetic oligonucleotide
agcccaattcacatacactctcaccctcactaaaaa

SEQ ID NO: 23018 - DNA, 36 bp, Artificial Sequence
  Synthetic oligonucleotide
atcccaattcacatacactctcaccctcactaaaaa

SEQ ID NO: 23019 - DNA, 36 bp, Artificial Sequence
  Synthetic oligonucleotide
cacccaattcacatacactctcaccctcactaaaaa

SEQ ID NO: 23020 - DNA, 36 bp, Artificial Sequence
  Synthetic oligonucleotide
cacccaattcacatacactctcaccctcactaaaca

SEQ ID NO: 23021 - DNA, 36 bp, Artificial Sequence
  Synthetic oligonucleotide
gacccaattcacatacactctcaccctcactaaaca

SEQ ID NO: 23022 - DNA, 36 bp, Artificial Sequence
  Synthetic oligonucleotide
tacccaattcacatacactctcaccctcactaaaca
